United States Patent Application Publication US 2008/0050393 A1 - sequence listing, part 37

SEQ ID NO: 128363 - DNA, 2028 bp, Homo sapiens
gtaatcaatattatcaatgctgcccaggaaagtagtcccatgcctgtgacagaagccctagaccgtgtgctggaaattctaagaaccactgagttatattcaccacagtttggtgctaaagatgatgatccccatgccaatgaccttgttgggggcttaatgtctgacacaggccttgaaataatcaaggatggagaggaagaaggggagagccgcacagcgcagcagtaccctgggctgtcagagtccacgcggcagccctggaggaggtccaggacccccaggaccacctggggctggaaagcaacagagcaacagtgtccagacttcccgcctcctggcccgcaccctcatctagagcttctcatcttccactgtgaaggacaaggaactggccagaaacacagcacctcatacccgtgcacactcatgtctgagaagcgtggcttaatgaacgtcttctttgcaaaatacacaggccctgcaatgaggaagtcctctggattgactcctagcttattacatctttattgtgcagaccctctccattcaaagcccctcttcaactgcccaccccccactacctccaagacagagattctgggttcttgcaactgcagcccctcagagagtgtaagaggggcagaaaaaggagatcaagagctgctagcgaatataaagcaggcagaaaaacatgaaaagaaccacccggaggtgactgtggccatggctctgactgacatagacctgcagctgcagttctccatgtcccaacccgaagccctccttctcctggcagcaggcccagctgaccacctcctgctgcagctctactctggacacctgcagtcagcaacaggtatctacggggagggccgtgcatcatctgctaccctggaggatctggagagccagtaccaagaactagcagtggccctggattcaagctccacaataatcagtcaactcactgaaaacatcaattcactggttcacacattgaaagaggagaagcatgagatacatcaggtacagaagcttgggaggaacttgttcaaactcaaaaaccagacggctgaacccctggccccagagcccccagcacggccctctaaggtggagcagctccaagatgagaccaaccacctaaggaaggagctggagagtgtgggaagacagctccaggctgaggtggaaaacaatcagatgttgagtctcctgaacaggagacaggaggagaggctgcaggaacaggaggggtggcaggaggaacaggagaggctgctggacaagaataatgagaacaagagtgcactgcagttggagcagcaagtaaaggagctgaagcttggagaacctggaagctaccagccagtagaaacagcagctaaagcccagttgagcctcatggctctccctggggaaggagatggaggaggacatctggacagtgagcaggaggcgcctcggcccatgccgaacatcccaggggacctggagagccgggaggccatggtggcatttttcaactccgctggagccaatgcccaggaggagcaaagggtgtgctgccagcccctggctcacccagtggcctcgtcccagaaaaagccagaggtagcggccccagccccagagactgggggtgaatctgtgtgtggggagacccaccaggccctgcagggggccatggagaagctgcaggaaagtacatcagccagggggcagtgtcagagacgcagcactgggagaggaggacatcgtcaggctggcccaggaccaggaggagatgaagagatgctctgcacctgcacccaggtgtcgtccgcgggcaggggcatgggcatgctgacggtggtcctggtggtgtcactgatgatgctgagcgcctccttcagcacgtggtgcatgcgcagcatctcgtcgtgccactgtgcctactctgcccactcctccatcagtgtgttctggttcccacgcgagtacatattggccagtggctccgagatgatgaactccgtggtctga

SEQ ID NO: 128364 - DNA, 564 bp, Homo sapiens
tttcgttgcgagtgtcgctgctgaaggctgtggtggaccgggctggatcgcggattctgagctacattgcgggtttgggggtggatcttggatttgggggtggatcgcgggttgcgggggggatcgcggatttggggcggagtgggggtggaaaggccacgaggagccgccgcggctcaagagcgggtggtgggcgtctgagaagtcgccaccatgaggaagctcttcagcttcgggagacgcctgggccaggcgctcctgagctccatggaccaagagtatgcgggtccgggttacgacattcgggactgggaactgcggaagatccacagggctgccatcaagggcgacgccgcaggaggtggagcgctgccatgacgcgcaggttccgggacttggacgcccgcgacagaaaagacaggactgttctacatttgacctgtgcccatggccgtgtggaagtggtcaccctcttgctgagcagaagatgccagattcgacatctgtgacagactaaaacaggacacctttaatgaaggctgtacactgccaggaagaggcttg

SEQ ID NO: 128365 - DNA, 1284 bp, Homo sapiens
atgttcgtgtggaggaatgtggaaggtcactctgtggccgtgttcccctggtactccatccccttcctgacccctccctgcagccacatgaggcccagcaaactgccagtcactcagtggcctccaaccagagaaaacaacctgccaagttggcagctgttgctcatgagcgtccaccaggcccagtccctcagtgccctgcgcaaggaacaggactcatcttctgagaaggatggacgcagccccaacaaatgggacaaggaccacatctggtggcccatgagtggcagtcataatcttcagcaagcagcaccaggccctggcagggcgcaccagggtcaccccaaccaggataaccggaccatcagccagatgctgagcgagcaatggtacaccctggggcccaatgagatgcagaaatacgacctggccttccagcacatggccagtgaggacatagcgagtgacgaggagcacacggtcatccatgaggaggagggggtggagaagctgaggacaggctcagggaaccggagaccgagaaggcgctgtcctcttcactgcacgcgccccggaccagtgccggccctgatcatgcagctcttccaggcccactgcttcttcctgtccactaggccacagctgctctccaggcccactatgcacacatcttcccctccaaggacctccacaagcccctactgtgcctggggccactgcgacctgctggttctcctggaatcaatgtcggtgcagggctgtgtccagctatccctgaaaggtctgattatctcctctccccactgcatggtcaccctggtctgtctggaatgtgtgcacctgtatcctaatgccagctctgggtcctctgacaccattctgcttcagaagcagctccgaatccgtatcgcagaggggacgagtccccgggctgtgactgagcgcttccagctgcctggctggccgcgctccgggcgctataagagggcggcggccgcggcgcgccctgcgcggagctgggagcgcgatggtcggccgccgaggcgcggcaagatgctggatgggtccccgctggcgcgctggctggccgcggccttcgggctgacgctgctgctcgccgcgctgcgcccttcggccgcctacttcggcctcctaccccgagcgccgccgctgggagccctggctggccttcggatcccagcccccgacctggacgccctgggccgctccctcagccgggccgccgccctccgccggtcacctgttcccggccctctggcctga

SEQ ID NO: 128366 - DNA, 777 bp, Homo sapiens; identical to SEQ ID NO: 128116

SEQ ID NO: 128367 - DNA, 499 bp, Homo sapiens
cttgttggggctgcgtccatccttctcagaagatgagtcccgttccttgggtagggcactgagggactgggtccgacgttttccgggcggtagaggcaactggatctcaggagacatgatggagaggaaggcatcatcatggtcactctctgtctcactgtccagccggggctctcctggggggccggaggcctcctcctccgtggtgggaggcggacccttaccagattccaccacccccaaagggtgtgggggtccgggtcctgggctctcagggcatgtggctccagggggccgctcagggtcagcactccctgtcccacctggtggccgttcatgagcaacagctgccaacttggcaggttgtttgctctggttggaggccactgagtgactggcaggttgccgggcctcgtgtggctgcagggaggggtcaggaaggggacggagtaccaagggaacatggccacagagcgaggttccacattcctccacatga

SEQ ID NO: 128368 - DNA, 753 bp, Homo sapiens
ctagagaggcacgacggtttgccacgtacgaagcttggggcatcggttggccacgttgcacatccaacacccaaggggcttccccgtgtggatgtcagtgaggaatcccggggcctgatttccacacaggatctggtagtcagccccttcctcctcatggatgaccgtgtgctcttcgtcactcgctatgacctcgctggccatgtgctggaaggccaggttgtatttctgcatctcattgggccccagggtgtaccaccgctcgctcagcatctggctgacggtccggttatcctggttgggatgaccctggtgcgccccgccagggcctggtgccgcctgctgaagatcatgagcgccactcatgggccaccggatgtggtccttgtctgatttgttggggctgcgtccatccttctcagaagatgagtcctgttccttgcgcccttgttcttttacaactatagggtccaggcaggtagtagcagtagcatccggtgtgtacccggcctgacagtggcagcggaaggagccaaggctgttgatgcactccccatgagcacacaggtgagcaagcatacggcattcatctacatccacacagttgatgccagtgaagtccaggctgtagccaaagggacactcacagcggaaggatccatcggtgttgacacagacgccgttagtgcagacgccagggttctctgcacactcattcacgtcctcgatgtaaattgcaaagctttcaggcat

SEQ ID NO: 128369 - DNA, 2499 bp, Homo sapiens
tcagggtctgtcctcacaggaacctgatgccagagctgtgcactgaaaggatttggacacaggtattttgtggaactgagcattttccaggtcttgctggaggtcattctgtgtgaacttgatggagatctttctcatgcgctgttttcctaagtgtgggagagcatggcctgcatgactgctggcttccagcacgtggcgtgcaaacccatgccagagtgtgtaattcactgtagccctggaagacacttgatagttcagaagccgagatcctgcgaggtgtctcagagagctcagctgtgaccctgcactgtatggaagggcaggcagtggggcccaggcaggtgaagaggattgtccactgttgagcatcatcagcctaaaacccacatgcaatgctattgctgcaaaaccgctgacttgccctttgcacatctgtccctcaaggtgctgctgtcctctgtggagggtgggatcccgggaactagagcccctctcctgctggagacactcggcactcagaaagtgtgtgcttgggggcacggcctcgctttgggacaactcagggcagcatcgacggtgaacaaaatcctttctgtttgcagccctgcctgtggtagttatggagacccccaggtgttgaggcagggctggggtgtccccttccaaccaggctgtcaaggccccaactctggggcagaggcagtggcagggcagccaggtttgtgccagagcctgagcaggttgaggtggggtcaggcaggggtgactctcgggcagaggcagtggtggggcagccagggcagcgtcaagagtctgagccaggtgaggtgcggtcaggacccccacagggcttggaggggaagatgtgtgcatagtgggcctggagggcggctgtggcctagtggacaggaagaagcagtgggcctggaagagctgcatgatcagggccggcactggtccagggcacgtgcagtgaagaggacagctccttctcggtctccggttccctgagcctgtcctcggcttctccaccagaaggtggcaggatccattgggaggaaacaggccaccttggaaggcgtccctgggcccccatccccaggggttggggccgtagggggcccgctctgctgcgttgaccagactcctgggctttgaaggctcctgggcccagtaagaaggaggtgggcgccaaggttgaggaggaagcatccgagtatgtgtaggaggaggacagggtgtgaccatagactgccaaaagccactccttgaacttgagatcggtgtcggtggtgctaaagccatcatcagcaatgacatcatcaccccctcctcctcatggatgaccgtgtgctcctcgtcactcgctgtgtcctcactggccatgtgtgtgtgcagccattctgccccacagaggctgctccttggtatccgagctctgaagtgtttgggctgcaactgactggagttcagaggacaccccaggggcagtggcagtgcccgtctctgatattctccgctcccacgagcccttgttacactcctgctagcccctggcttgtgggcttggcctctgagctggacttctttcggtccttgttgcaagtgggccaccttcacctggaaggccaggtcgtggtatttctgcatctcactgggccccagggtgtaccaccgctcgctcagcatctggctgacggtccggttatcctggttggggtgaccctggtgcgccccgccagggcctggtgccgcttgctgaagatcatgagcgccactcatgggccaccagatgtggtccttgtcccatttgttggggctgcgtccatccttctcagaagatgagtcctgttccttgcgcagggcactgagggactgggctgtccagcagggactcccctgaggggcccagggctcctcctccatggtgggaggtgagcttttaccaggttccaccacccccaaagtgtgtggggttgcgggccctgggctttcagggcaggtggctccagggggccgcccagggtcaacactccctgtcccacctggtggacgctcatgagcaacagctggcaacttggcaggttgttttctctggttgcaggccactgagtgactggcaggttgctgggcctcgtgtggctgcagggaggggtcaggaaggggatggagtaccaggggaacacagccgcagagtgaccttccacattcctccacacgaacatgattaccctgatgggcagtacctgtggctgtttctgctccctcacccagtccataggcttctggttgtaaaaagtgtgcatcttgagactgttcagaaagcgcaaagtcatctcctttggaggctgcatcgctcaaatcttcttcatccacgtcattggtggtgtggagatggtgctgctcatagccatggcctagtttattgagggtttttagcatgaagggctgctgaattttgtcgaaggccttttctgcatctattgagagaagcat

SEQ ID NO: 128370 - DNA, 616 bp, Homo sapiens
tcacccactccttgaacttgagatcagtgtcagtggtgctaaagccgtcatcagcaatgacatcatcaccccctcctcctcatggatgaccatgtgctcctcgtcactcgctatgacctcgctggccatgtgctggaaggccaggtcgtggtacttctgcatctcattgggccccagggtgtaccaccgctcgctcaggatctggctgatggtccagttatcctggtaggggtgaccctggtgcgccctgccagggcctggtgccgcttgctgaagatcgtgaccgccactcatgggccaccagatgtggtccttgtcccatttgttggggctgcgtccatccttctcagaagatgagtcctgttccttgcacagggcactgagggactgggcctggtggacactcgtgagcaacagctgccgacttggcaggttctttgctctggttggaggccactgagtgactggcaggttgctgggcctcacgcggctgcagggaggggtcaggaaggggacagagtaccaggagaacacagccacagagcaaggttccacattcctccacacaaacatgctgacaccaccagaggccttgctggacgcagacatcaggggc

SEQ ID NO: 128371 - DNA, 1155 bp, Homo sapiens
atccttaattaaattaagctccccccccccggctgccgccgtcgcgggggccgtcaccgccgccaccgctaccgaggccgagcggagccgttagcgccgcgccgccgccgcctcccgcccgccccggagcagccccgggcccgcccgcccgcatccagatttttgaaaaatacaatgtctaatggttatgaagaccacatggccgaagactgcaggggtgacatcgggagaacgaatttgatcgtcaactacctccctcagaacatgacccaggatgagttacgaagcctgttcagcagcattggtgaagttgaatctgcaaaacttattcgggataaagtaccaggacacagcttgggctatggctttgtgaactacgtgaccgcgaaggatgcagagagagcgatcaacacgctgaacggctttgaggctccagtcaaaaaccattaaggtgtcgtatgctcgcccgagctcagaggtgatcaaagacgccaacttgtacatcagcgggctcccgcggaccatgacccagaaggacgtagaagacatgttcttctcggtttggggcggatcatcaactcgcgggtcctcgtggatcagactacaggtttgtccagaggggttgcgtttatccggtttgacaaacggtcggaggcagaagaggcaattaccagtttcaatggtcataaacccccaggttcctctgagcccatcacagtgaagtttgcagccaaccccaaccagaacaaaaacgtggcactcctctcgcagctgtaccactcgccagcgcgacggttcggaggccccgttcaccaccaggcgcagagattcaggttctcccccatgggcgtcgatcacatgagcgggctctctggcgtcaacgtgccaggaaacgcctcctccggctggtgcattttcatctacaacctggggcaggatgccgacgaggggatcctctggcagatgtttgggccgtttggtgccgtcaccaatgtgaaagtgatccgcgacttcaacaccaacaagtgcaaagggtttggctttgtgaccatgacaaactatgaagaagccgcgatggccatagccagcctgaacggctaccgcctgggggacaaaatcttacaggtttccttcaaaaccaacaagtcccacaaa

SEQ ID NO: 128372 - DNA, 2340 bp, Homo sapiens
atgttcgtgtggaggaatgtggaaggtcactctgcggccgtgttctcctggtactccatccccttcctgacccctccctgcagccacacgaggcccagcaacctgccagtcactcagtggcctccaaccagagaaaacaacctgccaagttggcagccgttgctcatgagcgtccaccaggcccagtccctcagtgccctgcgcaaggaacaggactcatcttctgagaaggatggacgcagccccaacaaatcagacaaggaccacatccggtggcccatgagtggcgctcatgatcttcagcaggcggcaccaggccctggcggggcgcaccagggtcatcccaaccaggataaccggaccgtcagccagatgctgagcgagcggtggtacaccctggggcccaatgagatgcagaaatacaacctggccttccagaacgtagaggcccggatccgctacgtcatcgtccgcggaaacgagcaaggtttctttcgcatgcatcacctccgtggcgtcagctccctgcagctggggcggaggcgtccggggcctggaacctaccggctggaggtggttgacatgattacaatcgatgctcggtaccggtgttcaggactgaggtctccaccagaccccgaccatctgaaatctgtggacttacacaggaatgaacacttctttctgcaaaaagccaggtgggaaatacatttggttttgcaggccacaccatctcagatacaactactccatgtggcctttgtactagcaaagcagccattgaggtgccggaagcagacactcttcctcatatctgtagttggcacaaaggagaagaatgtggcctccgagggccggaacccagttcgccccctccgcggccatcgctggctgcccgcgtctccgccggccgcggagcacttcgcaggcggcgccgaccggaagtcccgcctctcccgcgcgccccggagcgccgcgacagctacgccggccaatgagcagcgcgccgtggcggacgtcggccaatgggctcgcgcgcggggggggcgtgtccgggccgcgggccggagcgggtcgtgcgcgctgaggaggagccgctgccggcgtcgccgtcgccgccaccgtcgccaccgataccgaggccgagcggagccgttagcgccgcgccgcgctgcatccggccagccaggaaaactcagggcccgcagggggatcaattgtaatgccagcagtatccccatgctccaagtcgtgaggatcaaaagtatctccaaacattgccagatggctcgggttgcgggggaggggtctcttccactctcacacgcacagctcactcactgtgtctttgggaataaacaggtgcagaggaccattgcctacctgccccctcagcagcagggtgtccagggatttttgaaaaatacaatgtctaatggttatgaagaccacatggccgaagactgcaggggtgacatcgggagaacgaatttgatcgtcaactacctccctcagaacatgacccaggatgagttacgaagcctgttcagcagcattggtgaagttgaatctgcaaaacttattcgggataaagtagcagtgggacttctaagcctttgtgtccccatccggaatgtggagattgtggcttctacatcctggtggtccctacctctggccccatatgtccctcgggggatcagaaggagtcagccctctaccctcatggatgacctgtcatgccggagccaccaggctgcagccccattcacggcttctgtcttgctgtatatctctggtcgggttaaagcccacaccgctgcccaaggctttaaccacatcccggaggagggggtgtcccaagaggcggggtcgggctggtctcaggcttggaaagacggttggcttaccaatgtcttcatgttctcttgcacaggacacagcttgggctatggctttgtgaactacgtgaccgcgaaggatgcagagagagcgatcaacacgctgaacggcttgaggctccagtcaaaaaccattaaggcaggcccctgcaactgggcttcctgcagcagccactgcacccacccgccctcagtgcccgccttcacaagatacccacagacactgccccatgatcttggttactcagtggccaaaccctggctcagcagcagctctcccagacctgccccatgccgcatggacgtggtgtgcagtgggctccctgagggcaggcgcgccactcctgcctcctcgtgtccagtgcaggtcctcagaggcaccttccccggtgggggctggcagggcctcctggagccttgtgctcatcctgggctctga

SEQ ID NO: 128373 - DNA, 1053 bp, Homo sapiens
  misc_feature (1)...(1053): n = a,t,c or g
atgcatactctcaacccctactcagaaatgaaagcagaaagaagctatttacagcaagtcatgtgggcgtcaggaacagaatatgcttccaaaattaaacttctggaagaagtttatactgggaggagaattgattatgagatcaatgcccacaaatactggaatgacttctacaaaatccacgaaaatgggtttttcaaggatagacattggctttttaccgaattccctgagctggcacctagccaaaatcaaaatcatttgaaggactggttcttggagaacaagagtgaagtacctgaatgtagaaacaatgaggatggacctggtttaataatggaagaacagcacaagtgttcttcaaagagccttgaacataaaacacagacacttcctgtggaggagaatgtaactcagaaaattagtgacctggaaatttgtgctgatgagtttcctggatcctcagccacctaccgaatactggaggtaaccttttattgtcttggtagtgggatatgtgaagctattatatttgtgcacatgagggttcctgaagtcaacatcaaaatcaacaaatgtcatgagtactgtttagctctggtcactacaccttccctaatacagttaggccagattcttgttgattattatttttctagcttttctagctttagggaattaactctggaaagttctgtgattaatagttcatttctgtctgcaggttggctgtggtgtgggaaacacagtctttccaattttacaaacgaacaaacaaattcagaatatgatccttctcggtgttttgcctttgttcacgacctgtgtgatgaagagaagagttacccagtgcccaagggnagtcttgatattatcattctcatatttgttctttcagcaattgttccagacaagatgcagaaggctatcaacaggctgagcaggcttctgaaacctggcgggatgatgcttctgcgagattacggccgctatgacatggctcagcttcggtttaaaaaaggtattttgaaagtgctgaatcctaaccactag

SEQ ID NO: 128374 - DNA, 1525 bp, Homo sapiens
  misc_feature (1)...(1525): n = a,t,c or g
atgcatactctcaacccctactcagaaatgaaagcagaaagaagctatttacagcaagtcatgtgggcgtcaggaacagaatatgcttccaaaattaaacttctggaagaagtttatactgggaggagaattgattatgagatcaatgcccacaaatactggaatgacttctacaaaatccacgaaaatgggtttttcaaggatagacattggctttttaccgaattccctgagctggcacctagccaaaatcaaaatcatttgaaggactggttcttggagaacaagagtgaagtacctgaatgtagaaacaatgaggatggacctggtttaataatggaagaacagcacaagtgttcttcaaagagccttgaacataaaacacagacacttcctgtggaggagaatgtaactcagaaaattagtgacctggaaatttgtgctgatgagtttcctggatcctcagccacctaccgaatactggaggtaaccttttattgtcttggtagtgggatatgtgaagctattatatttgtgcacatgagggttcctgaagtcaacatcaaaatcaacaaatgtcatgagtactgtttagctctggtcactacaccttccctaatacagttaggccagattcttgttgattattatttttctagcttttctagctttagggaattaactctggaaagttctgtgattaatagttcatttctgtctgcaggttggctgtggtgtgggaaacacagtctttccaattttacaaacgaacaatgacccaggactctttgtttattgctgtgatttttcttccacagctatagaactggtccagacaaattcagaatatgatccttctcggtgttttgcctttgttcacgacctgtgtgatgaagagaagagttacccagtgcccaagggcagtcttgatattatcattctcatatttgttctttcagcaattgttccagacaagatgcagaaggctatcaacaggctgagcaggcttctgaaacctggggggatggtacttctgcgagattacggccgctatgacatggctcagcttcggtttaaaaaaggtcagtgtctatctggaaatttctacgtgagaggtgatggaaccagagtttacttatgtcatacaagatgtaactggacacgcttttcacccactgctggactggaaaaaccacaaaaacctggtggatcgccgactgcaggtgaaccgaggaaagacaactgacaatgtaccgggtttggattcagtgcaaatactgcaagccccttctgtccagcaccagctgagagggcanctgctgccaacacgatgcaagcccgttgttgtttccgggctttttttaaaaaaaaaaattgtagcactgggcgtggtgcatgcctgtaatcccagccactcaggaggctgaggcggggaggatccattgagcccagcagtccaacctgggcaaaatagtgagagaccctgtatctgaaagtaatgataaaataaaaagaatataaatga

SEQ ID NO: 128375 - DNA, 1336 bp, Homo sapiens
  misc_feature (1)...(1336): n = a,t,c or g
tcggaattcccggcccgacgatttcgttggccggctcctaccctgaagggtgcacctgcagtcctcgccgataaagaggcagcagttcggaagccggttcctgagagatccgggcgcgctttttccaccacaatgcctggtaatcactctgccccttcgcccggcctgtcgctgaccctctgtcccgccgcctcggagcactccgaaaagcccctgaccgccggccacgagtcaagctgccctaccccgaggcactctccaaggggagagaaactcctaggccagcgactcaccctgcccgcagccaggacgtgaggcccctaaagttgcccgtttgattttctcagggacaatgtggaagtggtcggaagaggnaagccgcggcggcggacgaagaaaagtccaggagaacaagtattccagcgggttgttgccaggagaaacaagtttgattatgagatcaatgccccacaaatactgggaatgacttctacaaaattccacgaaaaatggggttttttcaaggatagacattggctttttaccgaattccctgagctggcacctagccaaaatcacgtgcagtttgaaggattggttcttggagcaacaagagtgaagtatgtgaatgtagaaacaatgaggatggacctggtttaataatggaagaacagcacaagtgttcttcgaagagccttgaacataaaacacagacacctccatgtggaggagaatgtaactcagaaaattagtgacctgggaaatttgtgctgatgagtttcctggatcctcagccacctacccgaatactggaggttggctgtggtgtgggaaacacagtctttccaatttttacaaaccgaacaatgacccaggactctttggtttattgctgtgatttttcttccacagctataggaactggtccagacaaattcagaatatgatccttcttcggtgttttgcctttgttcaaggacctgtgtgatgaagagaatcagttacccagtgcccaagggcagtcttggatattatcattctcatatttgttctttcagcaattgttccagacaagatgcagaaggctatcaacaggctgagcaggcttctgaaacctggcgggatgatgcttctgcgagattacggccgctatgacatggctcagcttcggtttaaaaaagaggaactggacacgcttttcaccactgctggactggaaaaagttcagaacctggtggatcgccgactgcaggtgaaccgaggaaagcaactgacaatgtaccgggtttggattcagtgcaaatactgcaagccccttctgtccagcaccagctga

SEQ ID NO: 128376 - DNA, 474 bp, Homo sapiens; identical to SEQ ID NO: 117935

SEQ ID NO: 128377 - DNA, 5799 bp, Homo sapiens
atgactcctgaatcaagggatactacagatttgtctccagggggtacccaggagatggaaggcatcgtgatagtgaaggtggaggaggaagatgaagaagaccattttcaaaaggaaagaaacaaagtagagtcatcgccacaagttctcagtcgctctacaactatgaatgagagagccttattgtcatcgtatttagttgcatatagagtggcaaaagagaaaatggctcacacagcggctgaaaaaattatccttccagcatgtatggacatggtacggacaatttttgatgacaaatcagctgataaactaagaactatacctcttagtgataatacaatatctcgtcgaatctgtacgattgcaaaacatttggaagcaatgcttattacacggctgcagtccggtatagactttgcaatccaactcgatgagagcactgatattgcaagttgtcccacactcttggtttatgtcagatatatcccgctgaaattacgcttaggaggacttcttcaaccagaaaaacccattgttctaaaggttgagtcaagggatgggaccattcagtacaactctcaacagcacataaatctttcagcagcttggctgaagactgctgtgcagggcagggaagctccaggcaaacagcccagcaaacagcagcactcagctaaaaggaagactcacagaacacagttgaagaaggaaagtggcgatggacctcatcccaaatttggcggtggaaacctggcttctcctggctgtcagcctggtgctcctctatctagatacttcacgtacagaggcagtgaactgactgctttctggttgaccaccttgaaaaagatgagtgtgcctggcactgtgcttctcagatatgggacccgtacacatggactttttaagagactgggaattccagggcccacacctctgcctttgttgggaaatgttttgtcctatcgtcagaagttggtgaaaattgaagaggtggctgatgtggctgtatccttcatcctggaggaatgggggcatttggaccagtcccagaagtccctttatagggatgacaggaaggagaactatgggagtattacttccatgggttatgagtccagggacaatatggagctcatagtgaagcagatttctgatgactctgaatcacactgggtggcgccagaacacaccgaaaggagcgttcctcaggatccagactttgcagaagtcagtgaccttaaaggcatggtacaaaggtggcaggtcaaccccactgtggggaaatcaaggcagaatccttcccagaaaagggatctggatgcaatcacagacatcagccctaagcaaagcacacatggcgagagagggcacagatgcagcgattgtggcaaattcttcctccaagcctcaaactttattcagcatcggcgcatccacactggagaaaaaccgtttaagtgcggagaatgtgggaagagctacaatcagcgggtgcacctcacccagcaccagcgcgtccacacaggggagaaaccctacaaatgtcaggtgtgcggaaaggctttccgggtgagttcccacctggttcagcaccacagtgtccacagcggagagaggccctatggctgcaatgagtgtgggaagaacttcggtcgccattcgcatctgatcgaacacctaaaacgccacttcagggagaaatcccagagatgcagtgacaaaagaagtaagaacacaaaattaagtgttaagaagaaaatttcagaatattcagaagcagacatggaactatctggaaaaacccaaagaaatgtttctcaagttcaagattttggagaaggctgtgagtttcaaggcaagctggatagaaagcagggaattcccatgaaagagatactaggacaaccatcttcaaagaggatgaactacagtgaagtcccatatgtccacaaaaaatcctccactggagagagaccacataaatgtaacgagtgtgggaaaagcttcattcagagtgcacatcttattcaacatcaaagaatacacactggggagaaaccattcaggtgtgaggaatgtgggaaaagctacaaccaacgcgtgcacctaactcagcatcagcgcgtccacacaggtgagaagccctacacctgtcccttatgtgggaaagccttcagagtgaggtcccaccttgttcagcatcagagcgtgcacagtggggagagacccttcaagtgtaacgaatgtgggaaaggctttgggaggcgttcccacctggctggacatcttcgactccactcccgagagaaatcccatcagtgtcgtgaatgtggggaaatcttttttcagtacgttagcctaattgaacatcaggtgctccacatgggtcagaaaaatgaaaaaaatggcatctgtgaggaagcatatagttggaacttgacagtgattgaagacaagaagattgagttacaagagcagccttatcagtgtgatatctgtggaaaagcctttggttatagctcagacctcattcagcattacagaactcatacagcagagaagccctatcaatgtgatatatgtagagaaaatgttggccagtgttcccacaccaaacaacatcaaaaaatctactccagcacaaaatcccatcaatgtcatgaatgtggcagaggcttcactctgaagtcacatcttaatcaacatcagagaatccatactgatcgcgactgtggccgaggcaggggcaccagcaaccagtggcgctcagtgaagggcaggctgggtctgttccgccatttgccggaccggggtggccgagccgaggacctggaggagaagcgccctgcgccctcgacatctctgaatagcttccttcaactgccagtgaaagatagcaggcctgatttcattggacgcaactgttttcagccccaattagagggtctctggaaatttgacacagagtgctataaaaagtatggaaaaatgtggggaacgtatgaaggtcaactccctgtgctggccatcacagatcccgacgtgatcagaacagtgctagtgaaagaatgttattctgtcttcacaaatcgaaggatgttccccatcattgcccagtatggagatgtattggtgagaaacttgaggcgggaagcagagaaaggcaagcctgtcaccttgaaagacatctttggggcctacagcatggatgtgattactggcacatcatttggagtgaacatcgactctctcaacaatccacaagacccctttgtggagagcactaagaagttcctaaaatttggtttcttagatccattatttctctcaataatactctttccattccttaccccagtttttgaagcattaaatgtctctctgtttccaaaagataccataaattttttaagtaaatctgtaaacagaatgaagaaaagtcgcctcaacgacaaacaaaagaggccagccgaaggatgtctgcaggtcagggagacaggaccaggtaacccagctgtcactgaagattatatagagtttgagaatgttggaatatttgaaaatgctcccccaaaaaagctgctgatgagttctggaaatgtcaggagattaatctatacggacactgctgaagaaaaagctctgtctgatctggagctcgcagcccagtcaataatcttcatttttgctggctatgaaaccaccagcagtgttctttccttcactttatatgaactggccactcaccctgatgtccagcagaaactgcaaaaggagattgatgcagttttgcccaataaggaacgcagctccgcaccagcaacggaaagctggatggagaatgactttgacgagttgagagaagaaggcttcagacgatcaaactactccgagctaaaggaggaagttcgaacccatggcaaagaagttaaaaaccttgaaaaaagattagacaaatggctaactagaataatcaatgcagagaagtccttaaaggacctgatggagctgaagaccatggcacgagaactacgtgatgaatgcacaagcctcagtagccaattcaatcaactggaagaaagggtatcagtgatggaagatcaaatgaatgaaatgaagaaagaagagaagtttagaagaaaaagaataaaaagaaaggaacaaagcctccaagaaatatgggactatgtgaaaagaccaaatctacgtctgattggtgtacctgaaagtgacggggagaatagaacgaagttggaaaacactctgcaggatattatccaggagaacttccccaatctagcaaggcaggccaacattcaaattcaggaaatacagagaacgccacaaagatactcctcgagaagagcaactccaagacacataattgtcagattcaccaaagttgaaatgaaggaaaaaatgttaagggcagccagagagaaagaaatacaaactaccatcagagaatactataaacacctctatgcaaataaactagaaaatctagaagaaatggataaattcctcgacacatacactctcccaagactaaaccaggaagaagttgaaactctgaatagaccaataacaggttctgaaattgaggcaataattaatagcttaccaaccaaaaaaagtccaggaccagatggattcaccgccgaattctaccagaggtacaaggaggacctggtaccattctttctgaaactattccaatcaatagaaaaagagggaatcctccctaactcattttatgaggccagcatcatcctgataccaaagcctggcagagacacaaccaaaaaagagaattttagaccaatatccctgatgaacagtgatacaaaaatcctcaataaaatactggcaaaccgaatccagcagcacatcaaaaagcttatccaccatgatcaagtgggcttcatccctgggatgcaaggctggttcaacatacgcaaatcaataaacataatccagcatataaacagaaccaacgacaaaacccacatgattatctcaatagatgcagaaaaggcctttaacaaaattcaacagcccttcatgctaaaaactctgaataaattagtgttggaagttctggccagggcaatcaggcaagagaaagaaataaagggtattcaattaggaaaagaggaagtcaaattgtccctgtttgcagatgacatgattgtatatctagaaaaccccatcgtctcagcccaaaatctccttaagctgataaacaacttcagcaaagtatcaggatacaaaatcaatgtgcaaaaatcacaaatattcttatacaccaataacagacaaacagagagccaaatcatgagtgaactcccattcacaattgcttcaaagacaataaaatacctaggaattcaacttacaagggatgtgaaggacctcttcaaggagaattacaaaccactgctcaatgaaataaaagaagatacaaacaaatggaacaacattccatgctcatgggtaggaagaatcaatatcatgaaaatggccatactgcccaaggtaatttatagattcagtgccatcgccatcaagctaccaatgactttcttcacagaactggaaaaaactactttaaagttcatatggaaccaaaaaagagcccgcattgccaagtcaatcctaagccaaaagaacaaagccggaggcatcatgctacctgacttcaaactatactacaaggctacagtaaccaaaacagcatggtactggtaccaaaacagagatattgatcaatggagcagaacagagccctga

SEQ ID NO: 128378 - DNA, 2724 bp, Homo sapiens; identical to SEQ ID NO: 117938

SEQ ID NO: 128379 - DNA, 3441 bp, Homo sapiens; identical to SEQ ID NO: 118068

SEQ ID NO: 128380 - DNA, 3309 bp, Homo sapiens; identical to SEQ ID NO: 121964

SEQ ID NO: 128381 - DNA, 2367 bp, Homo sapiens
atggtaaagggatcaattcaacaagaagagctaactaatctaaatatgtatgcacccaatacaggagcacccagattcataaagcaagtcctgagtgacctacaaagagacttagactcccacacattaataatgggagactttaacacccaactgtcaacattagacagatcaatgagacagaaagtcaacaaggatacccaggaattgaactcagctctgcaccaagcagacctaatagacatctacagaactctccaccccaaatcaacagaatatacattcttttcagcaccacaccacacctattccaaaattgaccacatagttggaagtaaagctctcctcagcaaatgtaaaagaacagaaattataacaaactatatctcagaccacagtgcaatcaaactagaactcaggattaagaatctcactcaaaactgctcaactacatggaaactgaacaacctgctcctgaatgactactgggtacataacgaaatgaaggcagaaataaagatgttctttgaaaccaacgagaacaaagacacaacataccagaatctctgggacacattcaaagtagtgtgtagagggaaatttatagcactaaatgcccacaagagaaagcaggaaagatccaaaactgacaccctaacatcacaattaaaagaactagaaaagcaagagcaaacacattcaaaagctagcagaaggcaagaaataactaaaatcagagcagaactgaaggaaatagagacacaaaaaacccttcaaaaaattaatgaatccaggagctggttttttgaaaggatcaacaaaattgatagaccactagcaagactaataaagaaaaaaagagagaagaatcaaatagatgcaataaaaaatgataaaggggatatcaccactgatcccacagaaatacaatctaccatcagagaatactacaaacacctctacacaaataaactagaaaatctagaagaaatggataaattcctcgacacatacactctcccaagactaaaccaggaagaagttgaatctctgaatagaccaataacaggagctgaaattgtggcaataatcaaaacttaccaaccaaaaagagtccaggaccagatggattcacagctgaattctaccagagaaaaagagggaatcctccctaactcattttatgaggccagcatcatcctgataccaaaacctgacagagacacaaccaaaaaagagaattttagaccaatatccttgatgaacattgatgcaaaaatcctcaataaaatactggcaaaccgaatccagcagcacatcacaaagcttatccaccatgatcaagtgggcttcatccctgggatgcaaggctggttcaatatacgcaaatcaatacgtgtaattcagcatataaacagaaccaaagacaaaaactacatgattatctcaatagatgcagaaaaggcctttgacaaaattaaacaatgcttcatgctaaaaactctcaataaattaggtattgatgggacatatttcaaaataataagagctatctatgacaaacccacagccaatatcattctgaatgggcaaaaactggaagcattccctttgaaaactggcacaagagagggatgccctctctcaccactcctattcaacatagtgttggaagttctggccagggcaattaggcaggagaaggaaataaagggtattcaattaggaaaagaggaagtcaaattgtccctgtttgcagacgacatgattgtatatttagaaaaccccattgtctcagcccaaaatctccttaagctgatcagcaacttcagcaaagtctcaggatacaaaatcaatgtacaaaaatcacaagcattcttatacaccaataacagacaaacagagagccaaatcatgagtgaactcccattcacaattgcttcaaagagaataaaatacctaggaatccaacttacaagggataggaaggacctcttcaaggagaactacaaaccactgctcaaggaaataaaagaggatacaaacaaatggaagaacattccatgttcatgggtagaaaaaatcaatatcgtgaaaatggccatactgcccaaggtaatttacagattcaatgccatccccatcaagctaccaatgactttcttcacagaattggaaaaaactactttaaagttcatctggaaccaaaaaagagcccgcatcaccaagtcaatcctaagccaaaagaacaaagctggaggcatcacactacctgacttcaagctatactacaaggctacagtaaccgaaacagcatgcagagccctcagaattaatgctgcatatctacaactatctgatctttga

SEQ ID NO: 128382 - DNA, 2094 bp, Homo sapiens; identical to SEQ ID NO: 120831

SEQ ID NO: 128383 - DNA, 2337 bp, Homo sapiens; identical to SEQ ID NO: 116373

SEQ ID NO: 128384 - DNA, 1989 bp, Homo sapiens; identical to SEQ ID NO: 119731

SEQ ID NO: 128385 - DNA, 2559 bp, Homo sapiens
atggaggaagatctaccaagcaaatgtaaaacaaaaaaggcaggggttgcaatcctagtctctgataaaacagactttaaaccaacaaagatcaaaagagacaaggaaggccattacataatggtaaagggatcaattcaacaagaagagctaactatcctaaatatatatgcacccaatacaggagcacccagattcataaagcaagtcctgagtgacctacaaagagacttagactcctacacaataataatgggagactttaacaccccactgtcaacattagacagatcaatgagacagaaagttaacaagaatacccaggaattgaactcagctctgcaccaagcggatctaatagacatctacagaactctccaccccaaatcaacagaatgtacatttttttcagcaccacaccacatgtattccaaaattgaccacatagttggatgtaaagctctcctcagcaaatttaaaagaacagaaattataacaaactgtctctcagaccacagtgcaatcaaactagaactcaggattaagaaactcactcaaaactgctcaactacatggaaactgaacaacctgctcctgaatgactactgggtacataacgaaatgaaggcagaaataaagatgttctttgaaaccaacgagaacaaagacacaacataccagaatctctgggacacattcaaagcagtgtgtagagggaaatttatagcactaaatgcccacaagagaaagcaggaaagatccaaaattgacaccctaacatcacaattaaaagaactagaaaagcaagagcaaacacattcaaaagctagcagaaggcaagaaataactaaagtcagagcagaactgaaggaaatagagacacaaaaaacccttcaaaaaattaatgaattcaggagctggttttttgaaaggatcaacacaattgatagaccgctagcaagactcataaagaagaaaagagagaagaatcaaatagatgcaataaaaaatgataaaggggatatcaccaccgatcccacagaaacacaaactaccatcagagaatactacaaacacctctacgcaaataaactagaaaatctagaagaaatggataaattcctcgacacatacaccctcccaagactaaaccaggaagaagttgaatctctgaatagaccaataacaggctctggaattgtggcaataatcaatagcttaccaaccaaaaagagtccaggaccagatggattcacagccgaattctaccagaggtacaaagaggaactggtaccattccttctgaaactattccaatcaatagaagaagagggaatcctccctaactcattttatgaggccagcatcatcctgataccaaagctgggcagagacatagccaaaaaagagaattttagaccaatatccttgatgaacattgatgcaaaaatcctcaataaaatactggcacaccgaatccagcagcacatcaaaaagcttatccaccatgatcaagtgggcttcatccctgggatgcaaggctggttcgatatacgcaaatcaataaatgtaatccagcatataaacagaacgaaagacaaaaaccacatgattatctcaatagatgcagaaaaggcctttgacaaaattcaacaacccttcatgctaaaaactctcaataaattagtgttggaagttctggtcagggcaatcaggcaggagaaggaaataaagtgtattcaattaggaaaagaggaagtcaaattgtccctgtttgcagatgacatgattgtatatgtagaaaaccccattgtctcagcccaaaatctccttaagctgataagcaatttcagcaaagtctcaggatacaaaatcaatgtacaaaaatcacaagcattcttatacaccaataacagacaaacagagagccaaatcatgagtgaactcccattcacaattgcttcaaagagtataaaatacctaggaatccaacttacaaggcatgtgaaggacctcttcaaggataactacaaaccagcgctcaatgaaataaaagaggatacaaacaaatggaagaacattccatgctcatggataggaagaatcaatatcgtgaaagaattggaaaaaactactttaaacttcatatggaaccaaaaaagagcccgcatcgccaagtcaatcctaagccaaacgaacaaagctggaggcatcatgctacctgacttcaaactatactacaaggctacagtaacccaaacggcatgcgtttgcaaagctcatctgtctgattatccagttacctcactgaacaagatcttggctaagtcctgcccatctatgacatcacccccttcttcagccactgcgagaaaggcagagagaggtgaggaagttgcagaagaaaagttggaagctagcagaggttggttcctgaggtttatggaaagaagccatttccataacataaaagcacaaggtaaagcagccagtgtcgttgtagaaactgctgcaagttatcaagaagatctagctaagaccactgatgaaggccactaa

SEQ ID NO: 128386 - DNA, 1674 bp, Homo sapiens
atggcaaaatgcgctgaaaacctgggagtatcatcctatgcttctggggacatccgaggtgcaggaattaaaatcatattcatgaacagatatagaaaagctggggcacactctaaggaaagcaattacaatattaaagagactaaaaactacaaggagaagcagatgaagaaactgagaatgcctgcatgggtcctggataagatggtcacagcttacttcaaggttttccatgatgctgagaggaagccaggatgtttcagtctgaatgttcactgtatcactgacttttttggcaggctgaacagagcattaggacatgcaaaggccttaactaatacagcattatctggtttcaagaaaaatccccctgctgtatttcaggaagcacagaaggaggaaattcaaaccaaaggcaaagaagttgaaaactttgaaaaaaatttagacaaatgtatagctagaataaccaatacagagaagtgcttaaaggagctgatggagctgaaagcaaggctcgagaactacgtgaagaatgcagaagcctctggagctgatgcgatcaactgcaagataggactaaaccaggaagaagttgaatctctgaatagaccaataacaggatctgatattgtggcaataatcaatagcttaccaaccaaaaagagtccaggaccagatggattcacagctgaattctaccagaggtataaggaggaactggtaccattccttctgaaactattccaatcaatagaaaaagagggaatcctccctaactcattttatgaggccagcatcatcctgataccaaagcctggcagagacacaaccaaaaaacagaattttagaccaatatccttgatgaacattgatgcaaaaatcctcaataaaatactggcaaaccgaatccagcagcacatcaaaaagctgatccaccatgatcaagtgggcttcatccctgggatgcaaggctggttcaatatatgcaaatcaataaatgtaatccagcatataaacagaaccaaagacaaaaaccacatgattctctcaatagatatagaaaaggcctttgacaaaattcaacaatgcttcatgctaaaaactctcaataaactagtgttggaagttctagccagggcaattaggcaggagaaggaaataaagggtattcaattaggaaaagaggaagtcaaattgtccctgtttgcagacgacatgattgtatatctagaaaaccccattgtcccagcccaaaatctccttcagctgataagcaacttcagcaaagtctcaggatacaaaatcaatgtacaaaaatcacaagcattcttatacaccaacaacagacaaacagagagccaaatcatgagtgaactcccattcacaattgcttcaaagagaataaaatacctaggaatccaacttacaagggatgtgaaggacctcttcaaggaggactacaaaccactgctcagtaaaataaaagaggatacaaacaaatggaagaacattacatgctcatgggtaggaagaatcaatatcgtgaaaatggccatactgcccaagtatgcctgctcctcctttacttctcctatgattgcaagcttcctgaagccttcaccagaagcaggtgctgatttcatgtttcttgaacagcctgcagaaccatga

SEQ ID NO: 128387 - DNA, 1848 bp, Homo sapiens
atggataaattcctggacacatacacccacccaagactaaaccaggaggaagttgaatccctgaatagaccaataacagactctgaaattgaggcaataattaatagcctaccaaccagaaaaagtccaggaccagacggattcacagccgaattctaccagaggtacaagcaggaactggtaccattccttcagaaaatattccaatcaatagaaaaagagggaatcctccctaactcattttatgaggccagcatcatcctgataccaaagcctggcagagacacaacaaaaaaagagaattttagaccaatatccctgatgaacatcgatgtaaaaattctcaataaaatactggcaaacagaatccagcagcaaatcaaaaagcttatccaccacgatcaagtgggcttcatcccagggatgcaaggctggttcaacatacacaaatcaataaatgtaatccagcatataaacagaaccaaagacaaaaaccacatgattatctcaatagatgcagaaaaggcctttgacaaaattcaacagcccttcatgctaaaatctctcaataaattagtgttggaagttctggccagggcaatcaggcaggaaaaagaaatgaagggtattcagttaggaaaagaggaagtcaaactgtccctgtttgcagatgatatgattgtatatttagaaaaccccatcatctcagcccaagatctccttaagctgataagcaacttcagcaaagtctcaggatacgaaattaatgtgcaaaaatcacaagcatccttatacaccaataacagacaaacagagagccaaatcatgagtgaactcccattcacaattgcttcaaagagaataaaatacctaggaatccaacttacaagagatgtgaaggacctcttcaaggagaactacaaaccactgctcaacgaaataaaagaggacacaaacaaatggaagaacattccatgctcatgggtaggaagaatcaatattgtgaaaatggccatactgcccaaggtaatttatagattcaatgccatcctcatcaagttaccaatgactttcttcacagaactgaaaacaactactttaaagttcatatggaaccaaaaaagagcctgcattgtcaagacaatcctaagccaaaagaacaaagctggaggcatcacgctacctgacttcaaactatactacaaagctacagtaatcaaaacagcatgcaacatgaatggactggatgctgttatccgaagtgaattgatgtgggaaggtaaaagcaaataccacatgttctcacttataagtgggaggctgcgtcagagactgcaacagtcagcacacttcctgtctgatcaggctccctccctcaagtcctctgcgatggctctggcgatgcttcgggactggtgcaggaggatgggtgtgaacgcagagcgctctctgctcatcctggatatccctgacgactgcgaggaacatgagttccaggaggccgtgcgggctgccctgtcgcccctgggcagggcctaccaggaactgagacccttttcagggagggagcagccaggctgcaaggaagagtcctttgagagctggatggagcacgccaaggatatgctgcagctgtggtaccatgcgtcggaaagggagaggaagagatggctgctggagagcttgggtggcccagccctggacgttgtgagcggcctcctagaggaagatcccaacttggcggcactggactgccaggtgctgctggactgctgggcggcggtgctggggcaggcgtttggaaaccgggaccctcgaatgacttccaggctgaagttcctgacctga

SEQ ID NO: 128388 - DNA, 2055 bp, Homo sapiens; identical to SEQ ID NO: 120365

SEQ ID NO: 128389 - DNA, 1554 bp, Homo sapiens; identical to SEQ ID NO: 122774

SEQ ID NO: 128390 - DNA, 2562 bp, Homo sapiens; identical to SEQ ID NO: 116377

SEQ ID NO: 128391 - DNA, 1873 bp, Homo sapiens
atgaaggcagaaataaagatgttctttgaaaccaacgagaacaaagatacaacataccagaatctctgggacacattcaaagcagtgtgtagagggaaatttatagcactaaatgcccacaagagaaagcaggaaagatctaaaattgacaccctaacatcacaattaaaagaactagaaaagcaagagcaaacacattcaaaagctagcagaaggcaagaaataactaaaatcagagcagaactgaaggaaatagagacacaaaaaacctttcaaaaagttaatgaatccagcagctggttttttgaaaggatcaacaaaattgatagaccgctagcaagactaataaagaaaaaaagagagaagaatcaaatagatgcaataaaaaatgataaagggtatatcaccaccgatcccacagaaatacacactaccatcagagaatactacaaacacctctatgcaaataaactagaaaatctagaagaaatggataaattcgtcggcacatacactctcccaagactaaaccaggaagaagttgaatctctgaatagaccaataacaggctctgaaattgtggcaataatcaatagcttaccaaccaaaaagagtccaggaccagatggattcacagccgaattctaccagaggtacaaggaggaactggcgggcagagacacaaccaaaaaagagaattttagaccaatatccttgatgaacattgatgcaaaaatcctcaataaaatactggcaaaccgaatccagcagcacatcaaaaagcttatccaccatgatcaagtgggcttcatccctgggatgcaaggctggttcaatatatgcaaatcaataaatgtaatccagcatataaacagaaccaaagacaaaaaccacatgattatctcaatagatgcagaaaaggcctttgacaaaattcaacaacctttcatgctaaaaactctcaataaattagtgttggaagttctggccagggcaattagtcaggagaaggaaataaagggtattcaattaggaaaagaggaagtcaaattgtccctgtttgcagacgacatgattgtatatctagaaaaccccattgtctcagcccaaaatctccttaagctgataagcaacttcagcaaagtctcaggatacaaaatcaatgtacaaaaatcgcaagcattcttatacaccaataacagacaaacagagagccaaatcatgagtgaactcccattcacaattgcttcaaagagaataaaatacctaggaatccaacttacaagggatgtgaaggacctcttcaaggagaactacaaactactgagcaaggaaataaaagaggatacaaacaaatggaagaatattccatgctcatgggtaggaagaatcaatatcgtgaaaatggccatactgcccaaggtaatttacagattcaatgccatccccatcaagctaccaatgactttcttcacagaattggaaaaagctactttaaagttcatatggaaccaaaaaagagcccgcattgccaagtcaatcctaagccaaaagaacaaagctggaggcatcacactacctgacttcgaactatactacaagactacagtaaccaaaacagcatggtactcataccaaaacagagataatagatcaatggaacagaacagagccctcagaaataacgccgcatatctacaactatctgatctttgacaaacctgagaaaaacaagcaatggggaaaggattccctatttaataaatggtgctgggaaaactggctagccatatgtagaaagctgaaactggatcccttccttacaccttatacaaaaatcaattcaagatggattaaagacttaaaacgttag

SEQ ID NO: 128392 - DNA, 3413 bp, Homo sapiens
atgggagactttaacaccccactgtcaacattagacagatcaacgagacagaaagtcaacaaggatacccaggaattgaactcagctctgcaccaagcagacctaatagacatctacagaactctccaccccaaatcaacagaatacacatttttttcagcaccacaccacacctattccaaaattgaccacatacacggaagtaaagctctcctcagcaaatgtaaaagaacagagattataacaaactatctctcagaccacagtgcaatcaaactagaactcaggattaagaatctcactcaaaacctctcaactacatggaaactgaacaacctgctcctgaatgactactggatacataacgaaatgaaggcagaaataaagatgttctttgaaaccgacgagaacaaagacataacataccagaatctctgggatgcattcaaagcagtgtgtagagggaaatttatagcactaaatgcccacaagagaaagcaggaaagatccaaaattgacaccctaacatcacaattaaaagaactagaaaagcaagagcaaacacattcaaaagctagcagaaggcaagaaataactaaaatcagagcagaactgaaggaaatagagacacaaaaaacccttcaaaaaattaatgaatccaggagctggttttttgaaaggatcaacaaaattgatagactgctagcaagactaataaagaaaaaaagacagaagaatcaaatagacacaataaaaaatgataaaggggatatcaccactgatcccacagaaatacaaactaccatcagagaatactacaaacacctccatgcaaataaactagaaaatctagaagaaatggataaattcctcgacacatacactctcccaagactaaaccaggaagaagttggatctctgaatagaccaataacaggagctgaaattatggcaataatcaatagtttaccaaccaaaaagagtccaggaccagatggattcacagccgaattctaccagaggtacaaggaggaactggtaccattccttctgaaactattccaatcaatagaaaaagagggaatcctccctaactcatttcatgaggccagcatcattctgataccaaagctgggcagagacacaaccaaaaaagagaattttagaccaatatccttgatgaacattgatgcaaaaatcctcaataaaatactggcaaaccggaatccagcagcacatcaaaaagcttatccaccatgatcaagtgggcttcatccctgggatgcaaggctgattcaacatacacaaatcaataaattgtaatccagcatataaacagagccaaagacaaaaaccacatgattatctcaatagatgcagaaaaagcctttgacaaaattcaacaacgcttcaggctaaaaactctcaataaattaggtattgatgggacgtatttcaaaataataagagctatctatgacaaacccacagccaatatcatactgaatgggcaaaaactgaaagcattccctttgaaaactggcacaaggacagggatgccctctctcaccactcctattcaacataggtgtttgggaagttctggcccaggcaattaggcaggagaaggaaataaagggtattcaattaggaaaagaggaagtcaaattgtccctgtttgcagatgacatgattgtatatctagaaaaccccatggtctcagcccaaaatctccttaagctgataagcaacttcagcaaagtctcaggatacaaaatcaatgcacaaaaatcacaagcattcttatacaccaataacaaacaaacagagagccaaatcatgagtgaactcccattcacaattgcttcaaagagaataaaatacctaggaatccaacttacaagggacatgaaggacctcttcaaggagaactacaaaccactgctcaatgaaataaaagaggatacaaacaaatggaagaatattccatgctcatgggtaggaggaagaatcaatctcgtgaaaatggccatactgcccaaggtaatttacagattcaatgccatccccatcaagctaccaatgactttcttcacagaattggaaaaaaactactttaaagttcatatggaaccaaaaaagagctcgcatcaccaagtcaatcctaagccaaaagaacaaagctggaggcatgacactacctgacttcaaactatactacaaggctacagtaaccaaaacagcatggtactggtaccaaaacagagatatagatcaatggaacagaacagagccctcagaaataatgccacatatctacaactatctgatctttgacaaacctgaacaaaaacaagaaatggggaaaggattccctatttaataaatggtgctgggaaaactggctagccatatgtagaaagctgaaactggatcccttccttacaccttacacaaaaatcaattcaaaatggattaaagacttaaacgttagacctaaaaccataaaaaccctagaagaaaacctagacattaccattcaggacataggcatgggcaaggacttcatgtctaaaacaccaaaagcaatggcaacaaaagccaaaattgacaaatgggaactaattaaactaaagagcttctgcacagcaaaagaaactaccatcagagtgaacaggcaacctacaaaatgggagaaaattttcgcaacctgctcatctgacaaagggctaatatccagaatctacaatgaactcaaacaaatttacaagaaaaaaacaaacaaccccatcaaaaagtgggtgaaggacatgaacagacacttctcaaaagaagacatttatgcagccaaaaaacacatgaaaaaatgctcaccatcactggccatcagagaaatgcaaatcaaaaccacaatgagataccatctcacaccagttagaatggcaatcattaaaaagtcaggaaacaacaggtgctggagaggacgtggagaaataggaacagttttacactgttggtgggaccgtaaactagttcaaccattgtggaagtcagtgtggcaattcctgagggatctagaactagaaataccatttgacccagccatcccattactgggtatatacccaaaggactataaatcatgctgctataaagacacatgcacacgtatgtttattgcggcactattcacaatagcaaagacttggaaccaacccaaatgtccaacaatgatagactggattaagaaaatgtggcacatatacaccatggaatactatgcagccataaaaaatgatgagttcatatcctttgtagggacatggatgaaattggaaaccatcattctcagtaaactatcgcaagaacaaaaaaccaaacaccgcatattctcactcataggtgggaactga

SEQ ID NO: 128393 - DNA, 3752 bp, Homo sapiens
atgcacattgttgtagaaacagctctgtcagcttcatggcagaacaaggccaagcccccagctagggttctgcttcaggtggtccccaatgtgtggttccttgtggctgttgtgtgggaactgtatccatctttggatctcatggatcgttccatagaatgcagttcctcaccagcaacggaacaaagctggacagagaatgactatgacaagctgagagaagaaggcttcagacgatcaaattactctgagctacaggaggacattcaaaccaaaggcaaagatgttgaaaactttgaaaaaaatttagaagaatgtataactagaataactaatacacagaagtgcttaaaggagctgatggagctgaaaaccaaggctcgagaactacgtgaagaatgcagaagcctcaggagccgatgcgatcaactggaagaaagggtatcagtgatggaagatgaaatgaatgaaatgaagcaagaagggaagtttagagaaaaaagaataaaaagaaatgagcaaagcctccaagaaatatgggactatgtgaaaagaccaaatctacgtctgattggtgtacctgaaagtgatggggagaatggaaccaagttgaaaaacactctgcaggatattatccaggagaacttccccaatctagcaaggcaggccaaagttcagattcaggaaatacagagaatgccacaaagatattccttgacaagagcaactccaagacacataattgtcagattcaccaaagttgaaatgaaggaaaaaatgttaagggcagccagagagaaaggagcacccagattcataaagcaagtcctgagtgacctacaaagagacttagactcccacacattaataatgggagactttaacaccccactgtcaacattagacagatcaacgagacagaaagtcaacaaggatacccaggaattgaactcagctctgcaccaagtggacctaatagacatctacagaactctccaccccaaatcaacagaatacacatttttttcagcaccacaccacacgtattccaaaattgaccacatacttggaagtaaagctctcctcagcaaatgtaaaagaacagaaattataacaaactatctctcagaccacagtgcaatcaaactagaactcaggattaagaatctcactcaaaaccgctcaactacatggaaactgaacaacctgctcctgaatgactactgggtacataacgaaatgaagctagaaataaagatgttctttgaaaccaacgagaacaaagacacaacataccagaatctctgggacgcattcaaagcagtgtatagagggaaatttatagcactaaatgcccacaagagaaagcaggaaagatccaaaattgacaccctaacatcacaattaaaagaactagaaaagcaagagcaaacacattcaaaagctagcagaaggcaagaaataactaaaatcagagcagaactgaaggaaatagagacacaaaaaacccttcaaaaaattaatgaatccaggagctggttttttgaaaggatcaacaaaattgatagatagatcactagcaagagtaataaagaagaaaggagagaagaatcaaatagacacaataaaaaatgataaaggggatatcaccaccgatcccacagaaatacaaactaccatcagagaatcctataaacacctctatgcaaataaactagaaaatctagaagaaatggataaattcctcgacacatacaccctcccaagactaaaccaggaagaagttgaatctctgaatagaccaataacaggctctgaaattgtggcaatagtcaatagctttaccaaaccaaaaagagtcccaggaccagatggattccacagccgaatttctaccagaggtacaaggaggagcttgtacccattccttctgaaactattccaattaatagaaaaagagggaatcctccctaactcattttatgaggccagcatcatcctgataccaaagcctggcagagacacaacaacaacaaaaaaagaattttagaccaatatccctgatgaacatcgatgcaaaaatcctcaataaaatactagcaaaccgaatccagcagcacatccaaaagcttatccaccatgatcaagagggcttcatccctgggatgcaaggctggttcaacatacacaaatcaataaacgtaatccagcatataaacagaaccaaagacaaaaaccacatgattatctcagtagatgcagaaaaggcctttgacaaagttcaacaacacttcatgctaaaaactctcaataaattagatattgatgggttggaagttctggccagggcaatcaggcaggagaaggaaataaagggcattcaatcaggaaaagaggaagtcaaattgtccctgtttgcagatgacatgattgcatatctagaaaaccccatcgtctcagcccaaaatctccttaagctgataagcaacttcaacaaagtctcaggatacaaaatcaatgtgcaaaaatcaccaagcattcctatacaccaacaacagacaaacagagagccaaatcatgagtgaactcccagttcacaattgcttcaaagagaataaaatacctaggaatctaaacttacaaggggtgtgaaggacctcttcagggagaactacaaactactcactgatcaaggaaataagagaggacacaaacaaatggaaaaacattccatgctcatggataggaagaatgaatatcatgaaaatggccatacttgcccaaggtaaatttatagattcaatgccatccccatcaagctaccaatgactttcttcataggattgggaaaaatcttacttttaagttcatatggaaccaaaaaaagagcccacattgccaagacaatcctaagacaaaagaacaaagctggaggcatcacactacctgacttcaaactatactacaaggctacagtagccaaaacagcatggtactggtaccaaaacagagatatagaccaatggaacagaacagagccctcagaaataatgccgcatatctacaactatctgatctttgacaaacctgagaaaaacaagcaatggggaaaggattccctatttaataaatggtgctgggaaaactggctagccatatgtagaaagctgaaactggatcccttccttacaccttatagaaaaatcaattcaagatggattaaagatttaaacgttagacctaaaaccataaaaaccctagaagaaaacctaggcattaccattcaggacataggcgtgggcaaggacttcatgtccaaaacaccaaaagcaatggcaaccaaagccaaaattgacaaatgggatctaattaaactaaagagcttctgcacagcaaaagaaactaccatcagagtgaacaggcaacctacaaaatgggagaacattttcgcaacctactcatctgacaaagggctaatatccagaatctacaatgaactcaaacaaatttacaagaaaaaaacaaacaaccccatcaaaaagtgggtgaaggacatgaacagacacttctcaaaagaagacatttatgcagccaaaaaatacatgaaaaaatgctcatcatcactggccatcagagaaatgcaaatcaaaaccactatgagatatcatctcacaccagttagaatggcaatcattaaaaagtcaggaaacaacaggtgctggagaggatgtggagaaataggaacactttga

SEQ ID NO: 128394 - DNA, 1690 bp, Homo sapiens
  misc_feature (1)...(1690): n = a,t,c or g
caattccttagtagccacgtcacaaaaatgggtgaaattaatttttaacgtatgacacnnnnnnnnnnnnnnnnnnnnnnnnnnnnnnnnnnnnncacatctaataaaagtgtgcttttttcctagtcttctaaaactggtgtgtgttttaatatttcagtctagattagctgtatttcacatgcatagcagccacatgtggccaatggctacttggctggacagcacagacctagagtggaggtcacacccgcagatttcagccccacccccccaagaactaagatctgcccgaatgtacttggtgaaatcaaacaccgccagttatttttaagcactccaaacactaagaaccgctgagtaagcggacgccttgctgggtgcggtcgagtgctagaaagcaaaagttgaggttttctgttcacccaagttcaggtaccggctcaggacctcggttacctcccccatcctccggaaagaagagagtacttcagccagagagaggagagaacaattagttaaatctcgaggagagggcgtttcggcacaaatcttcagagcaccttccccatttaaaagtacatttcaggcacagttcatgcggaatcaagacaaaaagcctactccacgtttctcctccaacaaccttaatcttcccgtatccgcccctctggggtaacccatcaaactgagctcggccaccgtgctcggtccatagtgggccgtatccccaaggcctagcgtcgataattgcacacgggagtccgggaaacgttcgcggagtacacgtttgaattaatgactccgaaggggggatcagccgaccttccaccgcatcccacaaagaaactccgcgcccgccgacaccggcccgacacgccgaccttgccgctacccgtccgcgttcactcacaacttccccgtccaggcgccgggccgcgagcgcttccagggcagggcctagcgttgggggcttgggtctccggcccagcgggagagccccaagggcggaggtcgcgctccccgctggtctgagtcccgcgggcctggctgggccaccgccgagcggacgaagcacaggcgcccttccgcccgcagcggccccgaccacttccgggccacggcctcgacacctcctaatgcgcccgccccgggccacactctttcttctcggagcccgcaccgcgctgccagaccaccgccgcactgcggggctgaggagtggaccggcttcacgatgcgtccttcctggaggatttctcaatcgttcattgtgaaggattcctagcctctcctcagtggacagccaagagcctcctctcagctgggagccttcctcccattcactgcagtctccctgaactgcttccagagcccagcttctctggccaatggccaaggactcaaacaggcactgttctttcagcacagaaacacagaaaccaagtgccttggtacaaacagaaggctgcattctttggctaggatctggagacagggtgaaacctggcaaaaagatggaatgtgttttatcccagtacctgttttgatgtggctgactcttgttggtggtaacactgggcattttgacacagatggagggttctctgtctctcctctcaattgtcatccctggttctccatcacgtggtccaggtgtgcaaatgatagggctccaatagctctccat

SEQ ID NO: 128395 - DNA, 1854 bp, Homo sapiens
atgatagctcgtactaggtacaaaagacaaccagttcgtaaaggaacagatctgaagcctccagaagataacactgttaggatatttgatgggctgaatagatgtagaagacatttagacaactggcaaggttctaggcattacatttataacaagttcatagaagagcatattgttaaagtgctggctggtgttcctaagaagattgcattagagaaaatatacttattagataagctttgttctgacatgagctatagtgctgttagccatgagttcagtgttaatgaatgcatgcaatatctttatacagaaacatatataaaacaagtaagctggtcctttgatttgggtgtctgtattcttcggatcctgatgggtaaatcttcagaaccaattttcttcagttttaaatgtgtaaagtctttcagggcaaggaatcatggctccctaaaggggaacagagagaatgtgcctttgaaaaacaacaaggatgagaggggagattctttcaacctgggaaagagagagacctctgctagagccccaggacgtgggagaccggggtccttggcaccaccgagagtttcagcccggaaggagaattaccttccgtgttccggagccctccctgacagcagaaatggaactggtagaaggagttgcaggacagtcacagaagcagcactcagacatatgaaccatggctcaagtgctacaaagtttgcagcggtattgagaggcacttctaatggaataagggctggaggaaaaaaggccaccaatattggaaaggtctcagaggtccaccagaagccagatgaaagtcccggtgaattttatgagacgttctgtgaggcttactggctttacacaccatttgacccagaggctgcaggaaagtcagtaaacatctatactgactcaaggtatgcttttgccactttgcatgcccatggatccatatataaggaaagaggatcattaacaactgaaggaaaggaaatcaaaaataaaaaggaaatagagcacctcttagatgctgtatgggctccaaaagaagtagcagtcatccattgtaaagggcatcaaacagaggagggctgttccggttttctgggattctcttcaggccctattcatctggttcacttccgcacccggagatgtcactcaaggaggttggagaacagcaaagatgagtgtgtgctccttcttcttggatctctgaccttgaggggcaccaacctgatgccagtaggaatgctcctgtttagagtgtctgacagcccctgttggagggtctcacttgggtggcacagggagcatgacccatttaatgaacattttggctgtcccttgatggaggaggtgtgcttcactgggggtaaacccactggcctgggatgcctggattcctcagaactagaaggacgaaagactaagtctgctgtcctagaggattccaagttcaatatcaaggtgctggcaaatccagtgtctggaccgcagaatgctgaagatttcttccctggagagagtaaggcacaggatcactggactcacaggtacacacacaatgaagatgctagggatacctcactgcaaacagggagtaggggacacctcagtgcaaaaaactttagcatgttgggtgctgaggtcctagaggttgattcccctgttggctctcaagacaatggcaaccctgtcattactatccagacaagacgttacaagaatcttttctgcgaaatcatattagatcagcctaatttaaaggacatcagagaaaactcccacccacatgctctgagccatcaatcaactgtactagccccaattcttatatga

SEQ ID NO: 128396 - DNA, 2416 bp, Homo sapiens
aaagtgtgtaaaagagatggtctcgggagagaccaaggcgggcacctctggcaaagcttagacagaaggctgccccggctgcctccggagactcagactcagaaggaagcacccctcaggcaacaccacgcagagaggagccagagcccttgactgaaaagccaagggaggaactccagggtgatgaggtcggccgccttaggtcggtccgtgcccaagcaatgcagatgccactctgagaaacatggggaaataaacgctggagagaaaaaggccaccaatatcggaaaggtctcagaggttcgccagaagccagataaaagtcccggtgaattttatgagaggctgtccagcttatccaggtggctactaaggtgtttgtaaatcagaaggaggaggccaagagaaaagctagatgcagagctaaggaaaaggcagacttgctggcggtggccttagttggaagagaaactggttttgtgagaggatgtggtcgtggttgcggtcatgatagaggacaaactaggtaaaaccaggaagctaagccaggacaagagggccaacttaggcttaagcatgcccatggagccatatataaggaaagaggattgttaactactgaaggaaaggaaatcaaaaataaaaaggaaatagagcagctcttagaagctgtatgggctccaaaagaagtagcagtcatccattgcaaagggcatcaaacaggaggacatgacaaggccagagaaaacagaaaggcagaaagagaagccaaaagagctgcaatgacagcgataactaagaaggaagaggaaacccttaccatgcccttattggagcttcctcttacagaaccccctaactactcctctaatgaaaaggcttggtttgagcaggaaagtggaagttaccagaaaggaagttggtggaagttctcaaatgggaggctcgccagctatcccagaagcaatagcccctggttcataaaacagtttcatcaaggaacacatatgggaaaaactgcattagagactcttgtaggatggcatttctattgctgagcctaactgccatcactcgagccatgtgaaaacctgcatgtgggctttactgagctgcctcgaaccggaggctaccggtgcatgctagtgtttgtctgcactttctcagggtgggttgaggcatttcccaccaggacaaagaaagctcgggaagtaaccagaatcttactaaaggacattattcctagatttcgactgcctctaactttaggatcagacaatggcccagcatttgtggcagaaatagtacaacagctaacacagaggttaaaaatcaaatgaaaactgcatacagcttatcacccatagagttctatgacccagagttcttgccctatgacttcttatttgaagtccaaatttggtgaacccctaatgccatcatatacaaaccccacagaaactggggtcagtaaacttgtaaacaaaacgcaagtattcacttacgcgcataaagggcccgtctccatatattttgatgcctgccaagctgcacatctcagtaaactaaataatatttggaccatctgtaaaaatctaggacaagaaagagtcagccagcagagccaccaaggccataacagaagaatccaaaaaggagtgccctgattgtgataatcagtggaccacacatgaatttaatcagcacctatacactggaagggctgctctgtttgccagccaagaggagaagatagggtacacaactggaacatgctacccactcaatctgacaatactaaagccaaatatgactttctggactaaagggcataaaggattactaacctttgatcaggcaggagctctcctaggacttggtattcctctggtcatcacaaagaaaacccaaaggactcaagttcaacttagcccaatacaacagttcaggttttataaatctttcaatgaacactttaattctgaagtatcaaaaattcaaattcctcctatatcaactgaaaatctgtttgtccagctagccaaaagtattgctaacaatttaggagttacttcctgttatgtatgtggaggtgctaatatgagagatcaatggccctgggaagccagagaattgatgctgcaagacaattttaccttgcctgaatttgttacaaaattcaatgcaaatccaagtgtttggctattaaggaaccccatcattggaaaatactgtattgcctgttggggcaagtcctttcagaaccagataggggaaacaacttgcctaggtcaacaatattttgaagaatctgagaacagaacacaatggagaagctttatagatgattcctctgtgtcactttaatccctttttgcagttcccaacactaaatcaatcatggtaccaattagaa

SEQ ID NO: 128397 - DNA, 1071 bp, Homo sapiens
  misc_feature (1)...(1071): n = a,t,c or g
atgtggcccaatgtcacccaaattccctggacagcatctccagcagccagttttgtatcagctgtatttggacagtgtccccactggtggctctcggcatcttgcaagcagacctttctcagatccatttgtctaatttccacttgtgaaaagcaaatggaattgattttctgcaatgatactaaatacaacgctgttataatgttcagaacagttatgccctacaactgttcttctcaaacaggggactcctcagatccccagggtcacaaaccagtgtgccccaggaggacgcaacgtttccggaccaacgggcacatcttcttggggctcaatttgaatagatggtctttcctcatgcgtcacctcaacaaggtcatccttgaccacccatttgcaactgcaactccaccccctcacaaactccctcataaaattccacgacccatttggtcactgacctctcggggaacatcaggttgttccctgaaccaaggatccaggcctgcttcagcagaccctggggccacacaagctgccacgaacccaggacccaggcccatccctagggacccagtctccaggcaggaccagtgccagcggactaaggatctaggcctgcccccagtgaacccagggtctaagcaccnaggctggccttcatggactcaggatccaggactgcccgtacaggcccaggtaccaggatggtccccacaaactaaagatcctacctctaccactacagactcaggctttaagcacaccccaatgccaggccagccactgcgaactcaggctcctaccccaaccctattgatccagttattgcccctgacccgtgagaacaggattgctcaagcagccatccaaggactacctgaatcgggatcatccgagagctcattcaatactagatttctgagtcaaacagaatcagaattactggacccagtcagacacttgcggggaccaaaaggagaatcacccggaaacaaagccccaaaaatgcacagacacagcggtattaaaagggtgatgcgggaaaacgaccgccgattacttgaatga

SEQ ID NO: 128398 - DNA, 414 bp, Homo sapiens
  misc_feature (1)...(414): n = a,t,c or g
agagctctgactctttgatagaggcttccagcaccccatctgtctgcccctaaaaaacgaaagagagccactctccactgtctactatatgttaggtactaggatttttctcattatagcacttcattcctttcttgggggggactggannnnnnnnnnnnnnnnnnnnnnnnnnnnnnnnnnnnnnnnnnnnnnnnnnnnnnnnnnnnnnnnnnnnnnnnnnnnnnnnnnnnnnnnnnnnnnnnnnnnnnnnnnnnnnncgggaggtttctgtcctccctgagctcgccttaggacacctgcgttaccgtttgacaggtgtaccgccccagtcaaactccccacctggcactgtccccggagcgggtcgcgcaagaccgaacgcgcggccgggcgcttggcgccagaagcgag

SEQ ID NO: 128399 - DNA, 376 bp, Homo sapiens
gaactttttttttactgcagaaaacatttttataactttagaacttttctaaaatactactttgtcagctgaacaatatagaaaagtgcagaggcaagtgcctttccagaaccgcgtggtgacttagaagcggggcttgcgcttgcggccggtgtactgggtcaaaaagcgacgtcgctatgaacgcttggccgccacaagccagttatccctgtggtaacttttctgacacctcctgcttaaaacccaaaaggtcagaaggatcgtgaggccccgctttcacggtctgtattcgtactgaaaatcaagatcaagcgagcttttgcccttctgctccacgggaggtttctgctcgtgccgaattcctcagcgcgga

SEQ ID NO: 128400 - DNA, 1656 bp, Homo sapiens
  misc_feature (1)...(1656): n = a,t,c or g
ggccacagcaacgcggcatccacaggtctcgagtgccgaagtccttcaggattggggcaacgtcccctctagagcatgggccgaggccggggtggggtttggctccagccaaccgcacacagcctacgcgccgttgctgagcaacgcttgcccgctgaatcccgaggttttagctctagtcaagtgccaaaagagcccaatgtgtgttcgggtttcaattctccagtcagcgtcagagttggaggcctcaattttaaagaaggcaaagccatggtcatcgttgcgggtaaggaacaacgcagaagcctcttccacccccaaatttcgacctgcttctgggtcggggtttcgtacgtagcagagcagctccctcgctgcgatctattgaaagtcagccctcgacacaagggtttgtctacgaatggtttagcgccaggttcccccacgaacgtgcggtgcgtgacgggcgagggggcggcgcgcctttccggccgcgccccgtttcccaggacgatatgtcactccgcaccggaccccggtcccggcgcgcggcggggcacgcgccctcccgcgcgcgcggggcgcgtggagggggggggggcggcccgccggccggggacaggcgggggaccggctatccgaggccaaaccgaggctccgcggcgctgccgtatcgttccgcctgggcgggattctgacttagaggcgttcagtcataatcccacaagatggtaactttcgcccccattgggctcctcaancccaagcacattacaccaaatgtctgaacctgccggttccgtcgtccgtactgagcacggattaccatggcaaccaaacacaatcatcaagtaggggtaaaaacttaaccttgtctcacgacgggtcttaaccccagctcacggttccctattagtgggggtgaacaatccaacgccttgggtggaattctgcttcacaatgataggaagagccgacatcgaagggatcaaaagccggacgtcgctatgaacgctttggccgccacaagccagttatccctgtggtaacttttctgacacctcctgcttaaaaacccaaaagggtcagaaggatcgtgaggccccgctttcacggtctgtattcgtactgaaaatcaagatcaagcgagcttttgcccttctgcttcacggggaggttttctgtcctcccttgagctcgccttaggacacctgcgttaccgtttgacaggtgtaccgccccagtcaaactccccacctggcactgtccccggagcgggtcgcgcccggccggcgcgcggccgggcgcttggcgccagaagcgagagcccctcggggctcgcccccccgcctcaccgggtcagtgaaaaaacgatcagagtagtggtatttcacccgggggcccgcagggccggcgggaccccgccccgggcccctcgcggggacaccgggggggcgccgggggcctcccacttattctacacctctcatgtctcttcaccgtgccagactagagtcaagcccaacagggtcttctttccccgctgattccgccaagcccgttcccttggctgtggtttcgctggatagtaggtagggacagtgggaatctcgttcatccattcatgcgcgtcactaattagatgacgaggcattt

SEQ ID NO: 128401 - DNA, 705 bp, Homo sapiens
cggctcctggccaggcctggacgatggatcggcaaccaggatcctcgcctgcccctggccaggcctgggcgatggaccagcagctcccaaagcgaacctgccgcttgtgaggtggaagccccagtgctttcgaggggagggtctctgaggctcctcctgcttctcagccaccctcttgactggcctagacttgtgggcgtgctgcagcagcaggtccactgcctctgcgaggttgtccacgtacccatcagccttcacttccggatggtgctcgtcactgggcccaacagaggaggcaccgggctcctggataaactgccctctggctgggattctgggggcagcaacctctccaaagccttcagccattccccaggcatctcctgaggtctcactggatgctgaggacacaggaatgaagccatgagacagtgcagaggcctccgggccctgccaggggactttgtggaaggggctgtgggctgagtcctgcttgtatggggctacggccgcttcccctcctgcacagtctccgagcacagcactcacgagcctcacatccctctcccttccatcctccaaggaagaagtggtcacccccatccgcacccgctccatcagcaccctcacccgcacccgcttcattaacaccctcacccgctccaccagcaccctcacccgcacccacacccgcacccgctccat

SEQ ID NO: 128402 - DNA, 1257 bp, Homo sapiens
  misc_feature (1)...(1257): n = a,t,c or g
cccacgcgttcgcctacgcgtccgcagagcatgagggggaggaatcactgatgacaggcactggcctgcccagctgggggcctttgtttattcatttggtgggcacttcctgggtgcctgctctgggtcatgcctgtgggggggaccactgagggcaggaaacctggcctgtccctccaggaagcgaagtcaacactggcacctgcagatgaagtggcagagcagcccccatctttgatggcatggggtggttggggggcacattctgcatgctcagaagagagagcaactcgccctgtggaaggagcatacagtgggagatggggacaggcccagtgacgagcaccatccggaagtgaaggctgatgggtacgtggacaaccttcgcagagccagttggacctgcttgcttgcagcacgccgacaagttgatggcctcctgggagagccccgcctcctccacccctgcctctcctccacccctgcctcccctccacccctgcctctcctcctctgctccacccgcccaggagagccccacctcctccacccgtgcctttccttcacccctgcctcccctccacctgacccagtgcccagaccaaccaaggccctgacaggcctgccttctgccctctgccctgcatgggcaggcatttgttccctacctgggtggcctgctcccctgcctgggccctgacttcagctccctgtagtgaagtccaggagggtgggacaggcctgtcaggcctctgggaatctcccaaatcccagaactcaccactcaccatgggcctttaaatgcagtaaattccaccctaaccaagatttcaggggcactatgccccactgcctcctcttcagactctttgcatttcagtgaagacccctggaagaaaccccaggggcntccctatgcacaagatcttgcagccccagaacccaagtcagcctccctgcgaactgccccaggcacactgccccaccaccccacccccgaaacaatgcccagcccgctgctttttctatcctcccagtcacctttgcagacaaagacccaggggcagctcccgagggcactgtgaaggctcccatgcccacacagtgagaactgtagcctctgcgtccaagggaacacagggtactttctggacccactgctggacagacttgaaggtgtcatgcccgggtgtgtgcaggaggaaactaacagttcagtaaactctgccttgaccagcaaaaaaaaaaaaaaagggc

SEQ ID NO: 128403 - DNA, 1506 bp, Homo sapiens
atgtccaggaataatggtgaggtgggagctcctgtatcactggaagagctggaacgatcaaatattagggatcagggtctgcgaggattgtgggggctctggggattgccagaaattaaggggagctctggaaataacgggggtcccgtatcacaaggagacaacggaggctacgggggacggcagggagagcgaaggtcgcggagggtggggaccgagtcgggccacgggtcactcaccggctccgccgcagccgccgcacagcgcaggcgcagaactgcgctccgccgagccccaccagcaggccgcaactgcgcagccgcaacgttagcgccgcgcgggtaccccagcttcctggggccacaacggcgcacgcgcaaaaactccatcgcgcgcatgcgcgtgcctcgggttgtacccgatacatcagcccacagcaaggcgggctccagcagcccggagccatgggcccggccctcctgcactccccaggaagggggctgcccacggcccaaggagcgtgagtcaccacccccttcggccctgcagccggtccagctgcctcgcctggccttgtctccaccacccccagcccctccactgccacccccaccgccactggcccaagtggcaccctcaccccctagccccccaccccctcctcggcctccacccacgctctcggcctcagacccctccctggacttcctgcgggcccagcaggagactgccaacgccatccgggagctggccggcacccttcgacagggactggccaaactgagcgaggccctcagcgctctgctgccccttctgccaggaaccccagttgactccctgcctccacctctgcccccacccccacccccaccgccacctcccaggcctgtcctgcccccaccggcccccaaggtggagatcaccccagagcccgtgtccgtggtggctgctgtggtggacggggcagtggtggcagccaggggagtgatcattgccccaaggagcgaggagggggcaccccggccccccccagccccgctccctccgcacgactcccccccacacaagcggagaaaaggtttccctacacggaaaaggcgcggccgatggaaatctccgtgaaatctactatctatgatcctgcctgcaacccctctccccagcttggcgcagtcgaggggggcgatgctctctgcccatcccagctgcaccctagctccccttccctaacagttcctgttcttgacttgaagagaattgacccgtgggggactccccacctccccaacccagactttggagcgggtgggagttgtaagacaaatcaaaatacggatgacaaagaggatatagccgtgtataccccagggagaggaggcgccgagttctgatgggagaggtacaggttgggttctctgcctaccattgctgtctctgacttccagagctcaaccccctcctttctcccagtggtgacaagatatcaataaacttatttttaataca

SEQ ID NO: 128404 - DNA, 772 bp, Homo sapiens
  misc_feature (1)...(772): n = a,t,c or g
tttaattgtattaaaaataagtttattgatatcttgtcaccactccccgaaaggagggggttgagctctggaagtcagagacagcaatggtaggcagagaacccaacctgtacctctcccatcagaactcggcgcctcctctccctggggtatacacggctatatcctctttgtcatcccgtattttgatttgtcttacaactcccacccgctccaaagtctgggttggggaggtgggggagtcccccaccgggtcaattctcttcaagtcaaagaacaggaactgttaggggaagggggagatgtgcagaaccgagaggttccctcccccaccccacatagggcaataataaataacatggaaattggatgggcttaggaagtcaagggttaagggaggcagccaggggaggacaagcactgttaccagagaaaggggttgggggggcccatttactgaggcccccccaccagagaatcaggtcactaactagcacagggagtgggtgctcacatccctggagcagggagctagggtgcagctgggatgggcagagagcatccgcccccctcgnactgcgccaagnctggggagaggggnttgcaggcaggaatcatacgatagtaccatttcacggagatatatccatcgcgccgcgccttttaccgtgtagggaaacccttttctccgcattgtgtgggggggagtcgtgcggaggnnttcctcggctngtgcttaggnatttaggcntcgcaggnttccgaccgacct

SEQ ID NO: 128405 - DNA, 486 bp, Homo sapiens
atgaaaggggaggtgtcctgcaagcagcatcaagatgctcttcaacaagttctctgggctatgctccaggatgccgacaaacaagtccgcagggccccaggacctgtggaaaatgaaaaccactgtgactttgtaaagctgcgggaaatgctcatttgtacaaatatggaggacctgcgagagcagacccataccaggcactatgagctttacaggcgctgcaaactggaggaaatgggctttacagatgtgggcccagaaaacaagccagtcagagtcttgctttttaagtccttgtctgactcaaaaagagttaaatatgatgaagaatggataagactgcctgtagagagaaatacatctagaaagaaaggtgactcagaaacagccttgagtccctttagtatttgtcagctggaggagcagataggagagcttgagaagggaggaggaggaaaaccagcagtgtcacgtcttggaacttga

SEQ ID NO: 128406 - DNA, 2428 bp, Homo sapiens
atgatgtggtctgtccttttacagccagtagtgctcgccgcagttgagcgacagggcgaagccctcgagttcctgattggtgtacctgaaagtgatggggagaatggaaccaagttggaaaacactctgcaggatattatccaggaggacttccccaatctagcaaggcaggcccacgttcagattcaggaaatacagagaacaccacaaagatactccttgagaagagcaactccaagacacataattgtcagattcaccaaagttgaaatgaaagaaaaaatgttaagggcagccagagagaaaggtcgggttaccctcaaagggaagcccatcagactaacagcagatctgtcggcagaaaccctacaagccagaagagatagggggccaatattcaacattcttaaagaaaagaattttcaacccagaatttcatatccagccaaactaagcttcacaagtgaaggagaaataaaatactttacagacaagcaaatgctgagagattttgtcaccaccaggcctgccctaaaagagctcctgaaggaagcgctaaacatggaaaggaacaaccggaacttctttggagtaactttcgccttcttcgtcggagggcagagcctcggcaaagcgcttcaggaaacctccataccgtttctgagagaagaggacctggaaaagactagcattttggagactgggaatggtgactgggaggccacaagagggctgcctgaagaatgtgctggaatgagggaaagagattgtcagcaaaacgaaaaataccaagtgcctcaattcgatcaatcaacgattaaaaatattgagtctgcaaaaggacttgatgtgtgggacagctggccgctgcaaaacgctgacggaacagtagctgaatacaacggctatcacgttgtgtttgctcttgcgggaagcccgaaagacgctgatgacacatcaatctacatgttttatcaaaaggtcggcgacaactcaatcgacagctggaaaaacgcgggccgtgtctttaaagacagcgataagttcgacgccaacgatccgatcctgaaagatcagacgcaagaatggtccggttctgcaacctttacatctgacggaaaaatccgtttattctacactgactattccggtaaacattacggcaaacaaagcctgaccacagcgcaggtaaatgtgtcaaaatctgatgacacactcaaaatcaacggagtggaagatcacaaaacgatttttgacggagacggaaaaacatatcagaacgttcagcagtttatcgatgaaggcaattatacatccggcgacaaccatacgctgagagaccctcactacgttgaagacaaaggccataaataccttggactcattccaacctacgacatcagcagcaatatttacctaatctccaaatcgtgtttgtggcaggctaactttagactaaattcagctttagcacaaagtcccgctatcactaacttccagttccggggccactctctgaagacacttgatctcttaaccatgaagaaccttgacagcaaggtaaacattataccagtgattgccaaagcagatacggtttctaaaactgaattacataagtttaagatcaagttcatgagtgaactggtcagcaatggcgtccagatataccagtttccaacggatgatgacactattgctaaggtcaacgctgcaatgaatggacagttgccgtttgctgttgtgggaagtatggatgagataaaagtcggaaacaagatggttaaagctcgccagtacccttggggtgttgtacaggtggaaaatgaaaaccactgtgactttgtaaagctgcgggaaatgttcatttgtacaaatatggaggacctgcgagagcagacccataccaggcactatgagctttacagggcgcttgcaactggaagaaatgggctttacagatggtggccccaaaaaacaagccagccagtgttcaagagacctatgaagccaaaagacatgagttccatggtgaacgtcagaggaaggaagaagaaatgaaacagatgtttgtgcagcgagtaaaggagaaagaagccatattgaaagaagctgagagagagctacaggccaaatttgagcaccttaagagacttcaccaagaagagagaatgaagcttgaagaaaagagaagacttttggaagaagaaataattgctttctctaaaaagaaagctacctccgagatatttcacagccagtcctttctggcaacaggcagcaacctggaggaaggacaagggccgtaagaactcccaattttttgtaaaacagaagttccagagcacaggaaggtcatcatccacaagccaactttattaaaaaaaaactagaagtgtgctttgattttgctggttaattgttttac

SEQ ID NO: 128407 - DNA, 425 bp, Homo sapiens
ggtggcaagtgagatttatttaaacaacgacatgtcaacaggaacaggaagaggaacatgtgcgaccactgtagtgaccaaggcttctcaagagtgtgggatgagacctgcggacgaggcccgcccaccgctcagggagcttgcaggtctcctccaggagggcaagtggcttcggcttctggctcggcataagcattcgacagattaataagttatctccttcagcccaagctcatttcctcctttggttgcccagcaaaggcagtaatgcgcatgagctgctccagagtcacatttcatccaggaattcaagtgattctatcctgtgactctaatgacttgcaggtctccactcccgccagttcacactggcgtctccgcaggttttcaatcatgatctgcccaaaccgatcacgcatgttcac

SEQ ID NO: 128408 - DNA, 677 bp, Homo sapiens
catccccacccaatccaagggcaccttacctcttccctgcatcattgcaaaaccctgcaaactggtctccccacttccagtatctccccattctaagccaacctagatccgtcctgacagccttccgtcagcaagcccagcccaggatttctatgccgcaagctcaaacacctttccggccacagatggagcgccttgaccaaaatatacgaagatcaaaccagccacaacattcccttaagccaaaactaatccagagcaaggccctaactctcttcaattctgtgaaggctgagaaagatgaggaagctgcagaagaaaagtttgaagttacgagagttgtccacatcaggggcctaattgatggtgtggtggaagctgacattgtggaggccttgcaggagtttggactcatcagctatgtgatggtaatgtctaaaaagagacaagcactggtggagtttgaagatgtgctagaggcttgcaacgcagtgaactacacagccgacaaccaaatacatattgccggtcacccagcttttgtcaactactctaccagccagaagatctcccgccccgggaactcggatgatccggagcgtgaacagtgtgcttctctttaccatcctgaaccccatctattcgatcaccacggatgttctttacactatcggtaa

SEQ ID NO: 128409 - DNA, 648 bp, Homo sapiens
atggagagttttggggtgctacctctatttcttggtgcggatgctggctacgtgggtgtcatcgcgggtgtgcgatgcttgttgtccggagtcgttccagtggatctagaggagttcaccggggacgtgttgttctccgcctgtgggccacggtcctttgaatccggatcaaagaagacagtcgtccagctattatttcgtgttatgccctctcgtgtagttagattggctacgacgtgtcgttgggatcccaagccttcgttggacctgtgccactttggtgggaacgaggcgtgctgccagacaccgttgtgtgaatgtgtgggagtgcggagggctgaaggagataacttattaatctgtcgaaggcttatgccgagccagaagccgaagccacttgccctcctggaggagacctgcaagctccctgagcgccaagttgtgaatgcaaaggaaaagttcttggaggaaatgaaaaagtgctactccagtgaacacatgaatgataagaaagcgaaactgtattattaccgatatggagaaagtttgagcggtctgtatagaagatcaaaccagccacaaccttcccttaagccaaagcctaatcgagagcagggccctaactctcttcaattatgtgatggctga

SEQ ID NO: 128410 - DNA, 772 bp, Homo sapiens
  misc_feature (1)...(772): n = a,t,c or g
gtaatttgggtccctttaaaaggccgcccctttttttttttttggtggcaagtgagatttatttaaacaacgacatgtcaacaggaacaggaagaggaacatgtgcggaccactgtagtgaccaaggcttcttcaagagtgtgggatgagacctgcggacgagggcccgcccaccgctcagggagcttgcaggtctcctccaggagggtcaagtggcttcggcttctggctcggcataagccttcgacagattaataagttatctccttcagcccaaggcttcatttcctcctttgggttgcccagcaaagggcagtaatgccccnatgaagctgctccaagactcccaattttcatccagggatttcaagtgattctatcctgcttcacttcagcttcgaggtaacctgttgttacaacttccatcatgttcggacgggccgatgctgttttcccaccctttcgacaggagccaatctttctgagactgtaatgaccagcaggtctccactcccgccaggtcacactgggcgtctccgcagttattcaatcatgatctgcccaaaccgatcacccatgttcacctgttggtagtaatatgaacatggctctctcaaaactgttgggctgcccacttcaggaagtttgcngactgcctctgagtcatgtaaaccancacacattcagctattcaaggtgttggccaattgtgtatcatgttacattnccttagcttcctctccagttcaaacaggtnctcgagatctgctcc

SEQ ID NO: 128411 - DNA, 489 bp, Homo sapiens
gtaaggagtggcattgaaacaacagtaactttcttgaaaaggttcctatcagagcagatctgtctgaggaaaaggggccagggaaggcgttctccaaatccaattaggccacagaaactcaattcgcgtagggccagcatgatctcagagctgctcttggtgttccagaagagtggtcgttggccttatgggatttgccagacagccgggggcagggaaagccacgagaggcccttcaatgaaatgccatctccagcagggggaagcagtggcctctacaccgagaagtgcaattcctttgggcttctgactctgttcatcagtcccaaggagctgatggcttggacagaactgaagacacggaaagcagcctgggccgggagtgggccacgtggggactactgtgtggagctgaccgcactccccagcatgctgggctccagctccccaagggccagcaccaacaggcgaggaagggtgtcattttaa

SEQ ID NO: 128412 - DNA, 459 bp, Homo sapiens
cgtccagtgtggcggaattcacagccaccaacggctgcctaccgctgggcatccggctcccgcatgtggagtacgagcttttcaagatggaacaagaccccctcgggcaaagcctgctcttcatcggacaaaggcccaccgatggctcaagtcccgataccccagagaaacgtcccacctcctaccaagcacccctggtgctctgtcatggggaggcccccgacttctccaggccaccgcagcacaggccatcgctgcagaagcaccccagcacagggggtcttcacatagcccccttcccacttctgcccctagttctagggctggccttcctccactggctatgacattggacttgacatcaggatggcggctctggacacccattcaacccttcagactccctcctggcagctgtagggaaggaaccattctcctctgctctgtcatggatggatg

SEQ ID NO: 128413 - DNA, 2562 bp, Homo sapiens
atggcaccaggtgtttctgggaaatggaatttgagaagtaacatgatcatccaacagttgaaagatagtttgaagctgaagtctactgtttggcccatcagctttaaccaaattctgatggactccaatttccttaacagcaaaccacagactgaaattaagaccaacttgccatggaaaggaagatctcccacgtggaagaaagtttgggcaccagagctggccttggtgggctccttcttccgcaaggactgggtggaacgagggaggctgggtgaccctcagctggaggccgaagctggagccggcggggtgagggttcgccactggctcccaatcgccccaaccaaagctcaagagggcccccttgtggaagctcccaagaacagctcggcaacaggacattcagtgagatctgggcacattcagaaccccttctacgcagtgatgctacaagctgtcatcatcccctcaccggctcctccaagcaccagtttcctcatcagcaaaatgggtgcattgacagaacccatgtcacgggtggttgtgtcgattatacctgtcaatcctttgggctctgccaaggtactgacacgctgccgctgtgaggactcaaggcccagccaagctcatctaggggtcactctagaggacctggagcttgtgctgcagcgcctgcttcccgtgtccatcttccagtcaccttctgccctgagcccaattcctccccctgcccacactgcaccggcggctggggaggccgggggcagctgcctgcgctgggaaccccactgccagcagcccttgccagatagagtgcccagcactgcgatcctgcctccacgccttaatggaccttggatctccacaggctgcgaggtgcgcccaggaccggagttcctgacccgcgcctacaccttctaccccagccggctctttcgagcccaccagttctactacgaggaccccttctgcggggaacctgcccactcgctgctcgtcaagggcaaagtccgcctgcgccgggcctcctgggtcacccggggagccaccgaggccgactaccacctgcacaaggtgggcatcgtcttccacagccgccgggccctggtcgacgtcaccgggcgcctcaaccagacccgcgccggccgggactgcgcgcggcggctgcctccggcccgggcctggctgcctggggcgctgtacgagctgcggagcgcccgggctcagggggactgcctggaggcgctgggcctcaccatgcacgagctcagcctggtccgcgtgcagcgccgcctgcagccgcagccccgggcgtcgccccggctggtggaggagctgtacctgggggacatccacaccgacccggcggagaggcggcactaccggcccacgggctaccagcgcccgctgcagagcgcactgcaccacgtgcagccgtgcccagcctgtggcctcattgcccgctccgatgtgcaccacccgcccgtgctgccgccccctctggccctgcccctgcacctgggcggctggtgggtcagctcggggtgcgaggtgcgcccagcagtcctgttcctcacccggctcttcactttccacgggcacagccgctcctgggaagggtattaccaccacttctcagacccagcctgccggcagcccaccttcaccgtgtatgccgccggccgctacaccaggggcacgccatccaccagggtccgcggcggcaccgagctggtgtttgaggtcacacgggcccatgtgacccccatggaccaggtcaccacggccatgctcaacttctctgagccaagcagctgtgggggtgcgggggcctggtccatgggcactgagcgggatgtcacagccaccaacggctgcctaccgctgggcatccggctcccgcatgtggagtacgagcttttcaagatggaacaagaccccctcgggcaaagcctgctcttcatcggacaaaggcccaccgatggctcaagtcccgataccccagagaaacgtcccacctcctaccaagcacccctgcccgggtccccagtcaagcacttggatgcggcagtgatgttcatcgctacaccttcagaagttgagcactttcttttcaatcaagtctcagaccagatgttgtctcctgaagatgtcaccattcgcatcccaaagagcagccccatttccctggtccttctgtcagtccactgcatcacagttcctcacactgagacccgtgaacggatcacctccatctaccagattcagcgaccctcgagaggcccagctgagtcagtgagaggccagacagccgggggcagggaaagccacgagaggcccttcaatgaaatgccatctccagcagggggaagcagtggcctctacaccgagaaggtctcaggagttaaatgttattcaggtgttcaaagtgacactgggaagcccaagacccctatctcttcatacatgtatttctcaaactacaatgagaaatgggccattcctttagagaaggagctgaaaatgacatataacattgtattttggcatggattctga

SEQ ID NO: 128414 - DNA, 1869 bp, Homo sapiens
gtattacgaccgtggcgccgagtaggccagcgtcttctgactgcgagtcggacggatcataagagcaggacgcaggtcccggatccagaatgggaccggagaaatgagcgggacccagaccgacgagacgagtggggcggtggtcccagacacatagtcagacggacgacacgagtggggcagtggtccctgagtacccatctgaccgatgatacgcggggggccgtggtcccggtcaggtggcccaacagtccacccctgaaaaaggcggtcataaaacccccaggagacgaagatgatggcacgtcgggaccccaaatcttgggccaagagactgagtcctgtgtagccacgtttggctgcgttgttgacatcggcttcaccatcgtgccccttggaaccccgagtccttcctttcagagttcctccgtcacacgggctttgcgagggaacatcgtacccgaactctcccggcacttaacggcccccatgccgctcaagtgcaaaaactgcggggcctttggccacacggccagaagtaccaggtgccccatgaagtgctggaaggcagccctggttccagcgaccttggggaaaaaggaagggaaggaaaacctgaaaccatggaagccccgggttgaagccaacccggggcccttgaacaaggataagggagagaaggaagagagaccaaggcaacaagacccgcagaggaaggctctcctccacatgttttccgggaaacctccagagaagccgctgccgaatggaaaaggatccacggagtcttctgatcatctgagggtcaccctggttgatttcctttcagcttcccgtctgcgggaggaaatcggggaacccctctttcttgccttcttggggtcagggactccacgatccttccaggttgcaagcgggccaatgccggtccacacaaccagtaagaggccgcgcgtggaccctgtcctcgctgatcgctcagctgccgaaatgtctggcaggggctccgtcttggcttcactgtctcccctcagaaaagccagcctgagctcctcctcaagtcttggaccaaaggaaagacagacaggggctgcggccgacatccctcagcctgcagtcaggcaccagggccgcgagcctctcctcgtggtgaagccgacacacagccgccccgagggtgactgccgagaagttccccaggctgcctccaaaacccacggcctgctccaggccgccagaccccaggcacaagacaaacgtcctgcggtgacctcgcagccctgcccgccagccgccacacacagcttgggcctaggctccaatctcagcttcgggccaggagccaagagacctgcccaggctccgattcaggcttgcctgaacttccccaagaaaccgagactgggtcccttccagatccccgaaagcgccatccagggaggtgagctgggggccccggaaaatctccaacctccgccagccgcaaccgaacttggaccaagtacgtcgccccagatgggcaggaggacaccggcccaggtgcccagcgtcgaccggcagcctccgcacagcagaccttgcctgcctactgcccaggcctgcaccatgtcccatcactcagcggccagccatgatggggcccagcctctcagagtgctcttccggagactggaaaacggacgctggagctccagcctcctggcggccccctcatttcactctcctgagaagccgggagccttcctcgctcagagccctcatgtgtcagagaagtctgaggctccctgtgttcgtgtcccaccgagcgtcctctatgaggaccttcaggtttcctcctcctcagaggacagcgattctgacctggagtga

SEQ ID NO: 128415 - DNA, 1515 bp, Homo sapiens
atgggaatgcgaaaagaaatgtactgcagcatgctgaattggtggcccaacagtccacccctgaaaaaggcggtcataaaacccccaggagacgaagatgatggcacgtcgggaccccacatcttgggccaagagactgagtcctgtgtagccacgtttggctgcgttgttgacatcggcttcaccatcgtgccccttggaaccttgagtccttcctttcagagttcctccgtcacacgggctttgcgagggaacatcgtatccgaactctcccagcacttaacggcccccatgccgctcaagtgcaaaaactgcggggcctttggccacacggccagaagtaccaggtgccccatgaagtgctggaaggcagccctggttccagcgaccttggggaaaaaggaagggaaggaaaacctgaaaccatggaagccccgggttgaagccaacccggggcccttgaacaaggataagggagagaaggaagagagaccaaggcaacaagacccgcagaggaaggctctcctccacatgttttccgggaaacctccagagaagccgctgccgaatggaaaaggatccacggaaccttctgattatctgagggcgagtgtcaccccgggcccctggtctttttctcctctaggttgcaagcgggccaatgccggtccacacaaccaaaaagccagcctgagctcctcctcaagtcttggaccaaaggaaagacagacaggggctgcggccgacatccctcagcctgcagtcaggcaccagggccgcgagcctctcctcgtggtgaagccgacacacagcagccctgagggtggctgccgagaagttccccaggctgcctccaaaacccacggcctgctccaggccgccagaccccaggcacaagacaaacgtcctgcggtgacctcacagccctgcccgccagccgccacacacagcttgggcctcggctccaatctcagcttcgggccaggagccaagagacctgcccaggctccgattcaggcttgcctgaacttccccaagaaaccgagactgggtcccttccagatccccgaaagcgccatccagggaggtgagctgggggccccggagaatctccaacctccgccagccgcaaccgaacttggaccaagtacgtcgccccagatgggcaggaggacaccggcccaggtgcccagcgtcgaacggcagcctccgcacagcagaccttgcctgcctactgcccaggcctgcaccatgtcccatcactcagcggccagccatgatggggcccagcctctcagagtgctcttccggagactggaaaacggacgctggagctccagcctcctggcggccccctcatttcactctcctgagaagccgggagccttcctcgctcagagccctcatgtgtcagagaagtctgaggctccctgtgttcgtgtcccaccgagcgtcctctatgaggaccttcaggtttcctcctcctcagaggacagcgattctgacctggagtga

SEQ ID NO: 128416 - DNA, 1299 bp, Homo sapiens
atggcagaagaacacacaatatccgaggatgcgcgcagcacattgtgttctacagatttgaccgactggtggtggcccaacaatccacccctgaaaaaggcggtcataaaacccccaggagacgaaaatgatggcccgtcgggaccccacatcttgggccaagagactgagtcctgtgtagccacgtttggctgcgttgttgacatcggcttcaccatcgtgccccttggaaccttgagtccttccttttcagagttctcccgtcacacgggctttgcgagggaacatcgtatcgctcaagtgcaaaaaatgcggggcctttggccacacggccagaagtaccaggtgccccatgaagtgctggaaggcagccctggttccagcgaccttggggaaaaaggaagggaaggaaaacctgaaaccatggaagccccggggtgaagccaacccggggcccttgaacaaggataagggagagaaggaagagagaccaaggcaacaagacccgcagaggaaggctctcctccacatgttttccgggaaacctccagagaagccgctgccgaatggaaaaggatccacggaatcttctgagcatctgagggttgcaagcgggccaatgccggtccacacaaccagtaagaggccgcgcttggaccctgtcctcgctgatcgctccgctaccgaaatgtctggcaggggctccgtcttggcttcactgtctcccctcagaaaagccagcctgagctcctcctcaagtcttggaccaaaggaaagacagacaggggctgcggccgacatccctcagcctgcattcaggcaccagggccccgagcctctcctcgtggtgaagccgacacacagcagccctgagggtggctgccgagaagttccccaggctgcctccaaaacccacggcctgctccaggccgtcagaccccaggcacaagacaaacgtcctgcggtgacctcacagccctgcccgccagccgccacacacagcttgggcctaggctccaatctcagcttcgggccaggagccaagagacctgcccaggctccgattcaggcttgcctgaacttccccaagaaaccgagactgggtcccttccagatccccgaaagcgccatccagggaggtgagctgggggccccggaaaatctccaacctccgccagccgcaaccgaacttggaccaagtacgtcgccccagatgggcaggaggactccggcccagcttggctaccacgcaaatgaatccacccaaacgtcaccaagtggagcagggtaccagtatag

SEQ ID NO: 128417 - DNA, 1341 bp, Homo sapiens
atgatggcacgtcgggaccccaaatcttgggccaagagactggtgagagcccagaccctccagaagcagcggagggccccagttgggccaagggctcccccgcccgatgaagaagatcccaggctcaagtgcaaaaactgcggggcctttggccacacggccagaagtaccacgtgccccatgaagtgctggaaggcagccctggttccagcgaccttggggaaaaaggaagggaaggaaaacctgaaaccacggaagccccggggtgaagccaacccggggcccttgaacaaggataagggagagaaggaagagagaccaaggcaacaagacccgcagaggaaggctctcctccacatgttttccgggaaacctccagagaagccgctgccgaatggaaaaggatccacggaatcttctgattatctgagggcgagtgtcaccccgggcccctggtctttttctcctctaggttgcaagcgggccaatgccggtccacacaaccaaaaagccagcctgagctcctcctcaagtcttggaccaaaggaaagacagactggggctgcggccgacatgcctcagcctgcagtcaggcaccagggccgcgagcctctcctcgtggtgaagccgacacacagccgccccgagggtggctgccgagaagttccccaggctgcctccaaaacccacggcctgctccaggcctccagaccccaggcacaagacaaacgtcctgcggtgaccccacagccctgcccgccagccgccacacacagcttgggcctaggctccaatctcagcttcgggccaggagccaagagacctgcccaggctccgattcaggcttgcctgaacttccccaagaaaccgagactgggtcccttccagatccccgaaagcgccatccagggaggtgagctgggggccccggagaatctccaacctccgccagccgcaaccgaacttggaccaagtacgtcgccccagatgggcaggaggacaccggcccaggtgcccagcgtcgaccggcagcctccgcacagcagaccttgcctgcctactgcccaggcctgcaccatgtcccatcactcagcggccggccatgatggggcccagcctctcagagtgctcttccggagactggaaaacggacgctggagctccagcctcctggcggccccctcatttcactctcctgagaagccgggagcctttctcgctcagagccctcatgtgtcagagaagtctgaggctccctgtgttcgtgtcccaccgagcgtcctctatgaggaccttcaggtttcctcctcctcagaggagagcgattctgacctggagtga

SEQ ID NO: 128418 - DNA, 714 bp, Homo sapiens
atgtatggttaccggcgcttaagaagccccagagattcccagacagaaccgcagaatgacaatgaaggagagaccagtttggctaccacacaaatgaatccacccaaacgtcgccaagtggagcagggtcccagtacaggtgcaaaaaaaccctcaatttcaggagctccacacctgaattcataccagtccctggaacttccccagaagcagcaggattctggcactgaggagctcatgatagtcctggaacaagggacagaagtgaggttgagcctggaagaggtcatcctcatcttggccccagagacagtgctgcagctgaccctggagaacacagtccttgtgattgtccctgagcatgtcctgaggtcagaagatggcctgcagtcccctgtgcagatccagtacatcataccttccgttgatgacttcagcttggagttccatgctcaagatggagacatctcagacatgagaagagagaatgtgcctttttcacctgcagaagaagggaaggcagcacccctgtatcagcagcccttgatgataccccaagcaaaccacatggctgggatcagcccttctttcctacagcagcagaattccagcacagagacgttcatcatcgtggtcccggaacaagggacagaactcacactgagactggaagagtatgtcctcatcctgtccccacagacagccctgccctga

SEQ ID NO: 128419 - DNA, 1869 bp, Homo sapiens; identical to SEQ ID NO: 128414

SEQ ID NO: 128420 - DNA, 1519 bp, Homo sapiens
atggcagaagaacacacaatatccgaggatgcgcgcagcacattgtgttctacagatttgaccgactggtggtggcccaacaatccacccctgaaaaaggcggtcataaaacccccaggagacgaaaatgatggcccgtcgggaccccacatcttgggccaagagactgagtcctgtgtagccacgtttggctgcgttgttgacatcggcttcaccatcgtgccccttggaaccttgagtccttccttttcagagttctcccgtcacacgggctttgcgagggaacatcgtatcgctcaagtgcaaaaaatgcggggcctttggccacacggccagaagtaccaggtgccccatgaagtgctggaaggcagccctggttccagcgaccttggggaaaaaggaagggaaggaaaacctgaaaccatggaagccccggggtgaagccaacccggggcccttgaacaaggataagggagagaaggaagagagaccaaggcaacaagacccgcagaggaaggctctcctccacatgttttccgggaaacctccagagaagccgctgccgaatggaaaaggatccacggaatcttctgagcatctgagggttgcaagcgggccaatgccggtccacacaaccagtaagaggccgcgcttggaccctgtcctcgctgatcgctccgctaccgaaatgtctggcaggggctccgtcttggcttcactgtctcccctcagaaaagccagcctgagctcctcctcaagtcttggaccaaaggaaagacagacaggggctgcggccgacatccctcagcctgcattcaggcaccagggccccgagcctctcctcgtggtgaagccgacacacagcagccctgagggtggctgccgagaagttccccaggctgcctccaaaacccacggcctgctccaggccgtcagaccccaggcacaagacaaacgtcctgcggtgacctcacagccctgcccgccagccgccacacacagcttgggcctaggctccaatctcagcttcgggccaggagccaagagacctgcccaggctccgattcaggcttgcctgaacttccccaagaaaccgagactgggtcccttccagatccccgaaagcgccatccagggaggtgagctgggggccccggaaaatctccaacctccgccagccgcaaccgaacttggaccaagtacgtcgccccagatgggcaggaggactccggcccagcttggctaccacgcaaatgaatccacccaaacgtcaccaagtggagcagggtaccagtataggtgcaaaaacaccctcaattccaggagctccacactgaattcaggccagtccctggaaactccccagcctttttggagaatactgacggccatcttttcacgggagcagcaggattccagcaatgaggagctcatcatagtcctagaacaagggacagaagtgaggttgagcctggaagagttcatcttcatcttgccccagagacagcgctgcagctga

SEQ ID NO: 128421 - DNA, 1326 bp, Homo sapiens; identical to SEQ ID NO: 116101

SEQ ID NO: 128422 - DNA, 1120 bp, Homo sapiens
accggaaccggaaccgggggcacgaggcggggagcagctcaacgaggactttgaggggtaggtggccgtccccacttgtttgcactgccctgcactctccagaacccagtctcgggcgatccaggccttgacggtgagaaggggagaggccaccatccgtcccccgccatgtgacgacaccaagggaggccaccgctttctcaacgagctcatcaaggtcgtgtctcccaaggttggtgcccccagcccaagctcagacctgccctgtcggatgtggggagaggaaagaggctggacagtgggcctgcccgaggaggtgaaaatcgcagaggcctaccagatgctaaagaagcagggtgaggcacacagagggtggggggcgaccagggcctgccttcccctcccccaccatgagcggccgaagaatgtgatctttgaagatgaggagaaatccaaggtgagactccaaggaggcacatatggggactctgagcccaggtgggggtccgtgggttccatcaaagagatggtgcaggaggtagcggccgagcccagagcacagggaggaggcgggatgggggtattgagctgggccaccaatgtgaaactgctcacggagatggtgatgagccacagccagggcggcgcagcagctggcagcagcgaggacctcatgaaggtgcacctgcctccctgcctaccccactccctgcccactccacagcccacgcggaccctgcggatgcggcccacgctcttccgactggcgagtgacacagaggacaatgatgaggccttaggtgagcccagggcaggtgctgaggtcaggtccccccctctccctccacctcctgcccccgtgcggggtgaggaggtcaacggtgatgccacagccggctccatccctggtgaggaggtggcaggagagctgggagggcacccatcaggctggaggggcacagagagttacccagctatgcccacccgccctggcgagcaggccagccctgagcagcccagtgcctcagtttccctgcttgacgacgagctcatgtctctgggtgaggaaggggccaggcctggaggagggcgggctcagcagcagatggggcatgatccc

SEQ ID NO: 128423 - DNA, 434 bp, Homo sapiens
ggcacgaggcaggaagtgactgcgggagtggagccggcgagagagtggcagcggcggctgatggaagtgcagtgggggctggagagggcaccctactgtatccagcatgctccaaggccacagctctgtgttccaggccttgctggggaccttcttcacctgggggatgacaccagctggggcagctctcgtgttcgtattctctagcggacacaggccgatcttagatggaagccttggctttgctgcatgggtcatgctgccagcttcctattggcctcttctggccccagccgttgccatggtcacgtcctctggcggcttcggtgcctttgccttcttccctgtggctgccgcactcggattcgcggctacagcacttacgccgtttgctacccccctccactctcccccctttggctcctcccatcccg

SEQ ID NO: 128424 - DNA, 471 bp, Homo sapiens
  misc_feature (1)...(471): n = a,t,c or g
ctcngcgattcgtagaccatagtcagagtggtggaattcgaagcccagaatcataatcgtgtccctgatgtaaaggcattaatggagagtcccgagggacagttatctctggagcccaaatctgatagtcacttccaagcatcacacactgggtgccagagccctttatgttcagcccagcgtcacactcctcagagccccttcaccaatcatgctgcagctgctggcaggaagactcttcgcagctgcatggggctggagtggtttccagagctctatcctggttaccttggactaggggtgttgccagggaagcctcagtgttggaatgcaatgacccagaagccacaacttatcagtccccagggggaaagactctcgcaaggctggatcaggtgcaacaccaccataaggaagagtggattcggtggcatcacgatgctcttcacaggatacttcgtcctgtgttgg

SEQ ID NO: 128425 - DNA, 402 bp, Homo sapiens
tgcccccagaggacgtggccatctcaactgctggggccagaagagaccaataggaagctgccaacatgacctgtccactagagaatacgaacacgagagctgccccagctgctgtcatcccccaggtgaagaaggtccccagcaaggcctggaacacagagctgtggccttggagcatgctggatacagccccttccaagctccaggtggctgcccttccaagtcccacactcttgtcctgatggcctccgaccccgggcctcgagcccaaccaaaggcaccgaaggagagaaaagccaactcactagggtgccctctccagcccccactgcacttccatcagcccccgctgccactctctcgccggctccactcccgcagtcacttcctgcttccacgaaa

SEQ ID NO: 128426 - DNA, 588 bp, Homo sapiens
cgtgtgcaatttttcttttaaaacaagttgtaagttgaaatatcaaatctgcacagcgctgtcccttcacagaaggcaagaaactgccggcacatcatgtcagaggccgccctcggtgctgtaggctgtggaagtgggcctccctcagggtctggttgatgtggaagtagaggccttggcacagcgcggactgctcgggcacgggctgaggcgtgttagggctggatccggccatggtctggctcaagctgccttccggcccgctggccctgtccgggctgttgatgctgctgctgctgctgctgctgctcccaccactgtcactgcctgaagacgcgcagaacgctttgtttcctcttagtctgttttctttactgtttctcattacaggtactgtctctgtgtcccaggaatcctgaaagacagggtttctgctacttcttttggtctgggggggaagatggttgtcttcttcgttgccattccttctccttttcctgggacggaggcgctcgctcatggcagctggcggatggaagctacgcggcgccgctccgcgaagagagggaacagagggggttgtgtttc

SEQ ID NO: 128427 - DNA, 629 bp, Homo sapiens
  misc_feature (1)...(629): n = a,t,c or g
caaggcccgagggggtgggcgtggcggccgccgaatacacaaccccctctgttccctctcttcgcggagcggcgccgcgtagcttccatccgccagctgccatgagcgagcgcctccgtcccaggaaaaggagaaggaatggcaacgaagaagacaaccatcttcccccccagaccaaaagaagtagcagaaaccctgtctttcaggattcctggggacacagagtctttcaggcagtgacagtggtggggagcagcagcagcagcagcagcagcattcaattagcccggacagggccagcgggccggaaggcatctttgagcaagaccatgggccggattccagccctaacacgcctcagcccgtgcccgagcagttccgcgttgttgccaaggctcttactttccacattcaaccaggaccctgaggggagggcccactttccacagccttacaggcaccgagggcggccttttgacattgatgttgccggcagttttcttggctttcttgtgaagggacagcgctgttgcagatttgataatttcaacttacaacttgttttaaaagaaaaatttgcacacgaaaaatgctgttggnttttcagtctatatttgaattacaggtta

SEQ ID NO: 128428 - DNA, 2676 bp, Homo sapiens
tttcctgctggagagggcaccctacggagttggcttttctctccttccgggcctttggttgggctcgagggccggggtcggacgccatcacgacaagagagtgggacttggaagggcacccacctggagcttggaaggggctgtatccagcatgctccaaggccacagctctgtgttccaggccttgctggggaccttcttcacctgggggatgacagcagctggggcagctctcgtgttcgtattctctagtggacaggtgagttgccttgctttggttctggatgttggtggggagcccgttggtaaaggggcactgtcccactccatggagcaggtttgtagacttttcagtgcccctggccacacccccaggcattgtgtactggggtttgttcgctgtcttcttattttctcaccttctccctgccaggccgggagaacagatgtctgcttgctgtagacaccttcatgcaccatcatctcccctcttgacccttgacagcctgataaaggtttacagttgtaattcacagggaaagcttgtgagagtctttccccctggggactgataagttgtggcttctgggtcattgcattccaacactgaggcttccctggcaacacccctagtccaaggtaaccaggatagagctctggaaaccactccagccccatgcagctgcgaagagtcttcctgccagcagctgcagcatgattggtgaaggggctctgaggagtgtgacgctgggctgaacataaagggctctggcacccagtgtgtgatgcttggaactgactatcagatttgggctccagagataactgtccctcgggactctccattaatgcctttacatcagggacacaatgatgattctgggcttctgctttcttttcttgaagaaatgttgtagctagagaggcaagactttgactacttgactgcgatacagaatgaaactggtaagtcgtctccctcggaatgaacaaacttaaatgtggtctttccccttgagactcctttcctgtgactgaatccctggtgttgaagttctcacagccatggctcatgacagtccgttcctgcttttctgttgcagacatacttttctctgcatttcctttgctcccacacgtctctactcccagggtaagtcctttctcttgtttctccatgacttggattttacctaatgagctcattttaaggcttaaaatgagggattctgtgttcttttctggagtctcagtaactgtaacatcagtagggactcctgagaggtgatccctgcctttggaatctctctcattgcttaataatgttcttacccttttaaccccatcactgacattctttggagaaatatgacaatcaccagtaggcacatctagtaattttactagaagttcctgtctttggggatcaattttgtccaatttgagatcaccagaggtagtttgtacatcattaggtagagttgaggaatattttctatcttgatttgacaaagaaggttctattgagccaaccagtaaagacgctccagcttctgaaggattacatcgactttctcctgatttaggcaaatctttggcaagttctcttttaggagaggttttctctgatgcgtaaaactgagccttggtttcttcttggaaagtagtcattggtttagtattttttaacattttgaaggatggttggattggattcttgatgtctttatctgcctttgtagtagctgctctttccaaaccaacagctggcagtggaaaggtcttcactgtctgttctggtttgtccaccaccaacttagaatttctttcttcattctctgtctctaactctttccctttagctttaattaaatctttgattggtcctttcatctttttagcacgtgggagtgtagctggcttggactgataaactttttgatcagtaggtatggttggtcctatcatcttacagtatggcaagtgggattttaatcgtttaaatggcttcttacagtaaggacacacttccattctgggtggattatcactcatcctattccagtcggtgcggttgggatggtgccactgcgcagccgcgagagggcggtaccacggcggcagcgacatgggggggcgcggagcagacgccggaagtagtggtggtacgggtccgactgaggggtactcgccaccggctgcgtccacccgagcggcaatggtctttccattcagcaaacagttcccaaacacctgctgtctgcccagcactgtcctgatgctcgagtaccctatgtcttcttcctctccttccggagttctttctgtcctcctcgggggtggtgcgtgttctccttccttgtcatttccacagtcctcctgggcctgccttcccagatgtctagaatcctttttcacacagatcttcaagacaggactctttgtatattgttgagagagattcttggccagagccttcataaatttatcttgcttgtgttcacagactagaaactgattgtagttcttgccttgattttcagacagtaccctgtttctttcttcttccttccagtcttcaggcagtgacagtggtgggagcagcagcagcagcagcagcagcatcaatagcccggacagggccagcgggccggaaggcagcttgagccagaccat

SEQ ID NO: 128429 - DNA, 680 bp, Homo sapiens
tttcgtctctgggcactggcaggctgcagagagccgcgttgccattcatccaccagaatccatccagagacagccttgcgggctgggatctttggagctttcctttggaaggattagcagtgcccgtctgtctggtgctctacacagtgctgtgaacatgaaattaaaggataaaaacaaaataaatccatgggtaggaaatcccagggcttcgtggcatcatttggcaatcatttgtactgtacagcatcatgcggtatgcctgcttcctccacgtccacacagacctggccccgggtgctccccctccattcgcaggaagctcacacggtggttgttcttggagaggtaggcgatgagggccacggccacgcccacataagacgccagtcccaatggtgatggacagcactgccaggaatagggcccgccgggagctggtgctggcctggtgcaagtcccccttggccacggctttgttggtctcatgggacaagtagaaggctgcgattcccagaggccagaagcagcagagcatggagaagacactgaggcccaggtggtccgcgggggcatcatgaggaaattgtcctcactctctgtgtcgcttgagtaagcgctctccagctcctggaactcctcctcctcctccacatcgtaggacagggtgtggattttta

SEQ ID NO: 128430 - DNA, 641 bp, Homo sapiens
ttttttttttacgggtaaataaaagatgttcttttattcatttgcctgccaatccaaaaatacaaatatagttaattgtacataggaaggtattacttgttcagagttttgagtgtgtgaattacatatatgaacatctgagaaaatcctataagcagtttaatcaactgttccactccactccaagtgagtccataggcagaattgagttatggggagagcggcctagtaataattggtttgcgtaatacaaagttctactgggtagtgatgttgtagaagttcatatagaatcagctgagctttcagaaatggtgaaagggtggtaatagtcataacttagattgtaatttttttcccataggcttttaaaaaatattcatgaggttctttttttatttcaataggtttttggggaacaggaggtgtttggttacatgaataagttctctagtggtgatttctgagattttggtgcacccaccaccttgagcagtgaacactgtacccaatgtgtagtcttttatccttcagctccctccttcccgtttcccccagtccccaaagtccattgtgtcattcctcatagcttagttcccacttatgaatgggaacatacgatgtgaaacaattaaaattat

SEQ ID NO: 128431 - DNA, 1815 bp, Homo sapiens
atggggcggctggccaggcggggggctggcccccccacctccctcccggacggggtggctggccagggctctgtcaccattatccggagttgcatcctccacctgcccttgatcatcccagaacaggaagtgaagacctcctcccccgaggaaaatcagaggcgatgggcagaccgtgtcgaatctgaacatgacgtggcttgctgcagcaagcttactgccatgctaaacacttattcgcaagggctggttccctggaccagcagcatcagggtcatctgggaacgttttaggatcgtgaagtctcgtcagctcccaagacctgctgactcggaagctctggggacggggctggcagtctggcgggaagcctccaagacttgggaaggaaaggcagtgaagacctcacttgtctcctgctgggccgtgggcccaggtgctggcttcacggtggtgactcatgaacacacgaagaattgggatgctgatggctgcattggtgccacagctgtggctgtggctctcactgaaacagctcagcaaggaaaactggcacagggctccagagaaaagagggagagaggacaacggagagtgaaagagggaactaccaggattcaccccttatcccaggctgccttaccgaggaacgttcacaaaacttatatgagctcctccaccataacctacaagtcagaagggccatcagaagaggcttctgcctgtcctacgctgggctctggtccagccctcggcctgctcatggttggctgtgactccagatccttcctgttcctaaacggcctgcatgctggaccccgtggtgccctgaggaaagcaggcgtgctgaggggcactggtgaggagggccaggaggcgtttgcagaagccacagtgtctgcccctgtggacaagaccaacaaagccgtggccaagggggacttgcaccaggccagcaccagctcccggcgggccctattcctggcagtgctgtccatcaccattgggactggcgtctatgtgggcgtggccgtggccctcatcgcctacctctccaagaacaaccacctaggccacagacccaccacagtgcctatggctgcacatgctggcagctccacaggagagaatgaggaatgtgaagagctgaatccacgagacctgtgctcagctcccagagcaggctcgtacccagggctcccagggctgcagagagaccagctggcatctgcacaggattcagacttggctgtgttgactgagctggggatgctgcccccgaggatcctgcaggcagagggcaagaggacctctatgatgaggagctccctggctgggggctgtgcattccccaccctgcctgcctacagccctgccatgcctgagttacaaaagccggcccagggtgaaagtgatcctgccaagctgagacactcagagaacaaaggacatcttgaaggctggtggtggtcttcatccattcatttcatcaatagtgctcatggcaaacccgctgtcatcgtccggcccaggggaatctgggtgctgaacaccactcccctcagtgggcagtggggcccctacatcggagtttacactgcggccactgtagacatgaagtcccttggatcaggttccctggggctccagctggccctgcctctggcagcctcctggctcggagtcctcacggaggcagccagggtttttggggaacaggtggtgtttggttacatgaatagtttctttagtggtgatttctgggattttggtgcacccatcactcgagcagtgtacactgtacccaatgtgtag

SEQ ID NO: 128432 - DNA, 696 bp, Homo sapiens
gaagtacagagaacgccaccaagatactcctcgagaagagcaactccaagacacataattgtcaggttcaccaaagttgaaatgaaggaaaaaatgttaagggcagccagggagaaaggtcggggttaccacaaagggagagccatcagcctaacagctgatctctcagcagaaactctacaagccagaagagagatcaacaaaattgatagaccactagcaagactgataaagaagaaaagagagaagaatcaaatagatgcaataaaaagtgacaaaggggatatcaccacagataccacagaaatacaaactaccatcagagaatactacaaacacctctacgcaaataaactagaaaatctagaagaaatggataaattcttcgacacatacaccctcccaaaactaaaccaggaagaagttcgctctctgaatagaccaataacaggctctgaaaatgtggcaatattcaatagcttaccaacgaaaaagagtccaggaccagatggattcacagccgaattctaccagaggtacaaggaggaacgggtaccattccttctgaaactattccaatcaatagaaaaagagggaattctccctaactcattttatgaggccagcatcatcctgataccaaagtcggggcagagacacaaccacaacagaggatttttagagcaatatcattga

SEQ ID NO: 128433 - DNA, 1302 bp, Homo sapiens
atgggactatgtgaaagaccaaatctacgtctgattggtgtaactgaaagtgacggggagaatggaaccaagttggaaaacactctgcaggacattatcctggagaacttccccaatctagcaaggcaggccaacattcagattcaggaaatacagagaacgccacaaagatattcctcgagaagagcaactccaagacacataattgtcacatttgccaaagttgaaatgaatgaaaaaatgttaagggcagccagagagaaaggtcgggttacccacaaagggaagcccatcagactaacagcggatctctcggcagaaactctacaagccaggagagagtgggggccaatattcaacattcttaaagaaaagaattttcaacccagaatttcatatccagccaaactaagctttataagtgaaggagaaataaaatcctttacagacaagcaaatgctgagagattttgtcaccaccaggcctgccctaaaagagctcctgaaggaagcactaaacatggaaaggaaaaaccgacagatcaacgagacagaaaatcaacaaggatacccaggaattgaactcggctctgcaccaagcggacctaatccgctgttctgtagacatctacagatgtctgtagatggtagacatctacagaactctccaccccaaatcaatagaatatacatttttttagccccacaccacacctattccaaaattgaccacatacttggaagtaaaactctcctcaaaaaatgcaaaagaacagaaattataacaaactatctctcagaccacagtgcaatcaaactagaactcaggattaagaaactcactcaaaactgctcaactacatggaaactgaaccacctgctcctgaatgactactgggtacataacgaaatgaaggcagaaatgaagatgttctttgaaaccaacgagaacaaagacacaacataccagaatctctgggacacattcaaagcagtgtatagagggaaatttctagcactaaatgcccacaagagaaagcaggaaagatctaaaatggacaccctaacatcacaattaaaagaactagaaaagcaagagcaaacacattcaaaagctagcagaaggcaagaaataactaaaatcaaagaagaactgaaggaaatagagacacaaaaaacccttcaagaaattaatgaatccaagagctggttttttgaaaggatcaacaaaattgatagaccactagcaagactaacaaagaaaaaaagagagaagaatcaaatagacgcaataaaaaattga

SEQ ID NO: 128434 - DNA, 383 bp, Homo sapiens
tgacggggagaatggaaccaagttgaaaaacactctgcaggatattatccaggagaactcccccaatctagcaaggcaggccaacattcagattcaggaaatacagagaacgccacaaagatactcctcgagaagagcaactccaagacacataattgtcagattcaccaaagttgaaatgaaggaaaaaatgttaagggcagccagagagaaagagaataaaatagctaggaatccaacttacaagggatgtgaaggacctcttcaaggagaactacaaaccactgctcaaggaaataaaagaggacacaaacaaatggaagaacattccatgctcgtggataggaagaatcaatatcatgaaaatggccatactgcccaag

SEQ ID NO: 128435 - DNA, 1539 bp, Homo sapiens; identical to SEQ ID NO: 117840

SEQ ID NO: 128436 - DNA, 1118 bp, Homo sapiens
gagagagcacctggcggaagggatggctgtgggcacagcttcagcagacttaaacatttctgcctgctggctccgaagagagcaacagatctcccagcacagtgctcgagctttgctaagggacagactgcctcctcaagagaactccagctggcatccggcaggtgcccctctgggacgaaacttccagaggaaggagcaggcagcaatctttgctgttctgcagcctccactggtgatacccaggaaaacagggtctggagtggacctcgagcaaactccagcagacctgcagaagaggggcctgactgttacaaggaaaactaacaaacagaaagcaatagcatcaacatcaacggaaaggacgcccacgcagaaacccccattcaaaagtcaccaacatcaaagaccaaacgtagataaatccgcgaagatgaggaaaaaccagagcaaaaaggctgaaaattccaaaaaccagaatacctcttctcctccaaaggatcacaactcctcgccagcaagggaacaaaactggacagagaatgagtttgatgaactgacagaagtaggcttcagaaggtgggtaataacaaactcctccaagttaaaggagcatgttctaacccaatgcaaggaaactaagaaacttgataaaaggttagaggaactgctaactataataaccagtttagagaagaacataaatgacctgatggagctgaaaaacacagcaggagaacttcgtgatgcatacacaagtatcaatagctgaatcgatcaagcagaagaaaggatatcagagattggagaccaacttaatgaaataaagtgtgaagacaagatgagagaaaaaaagaatgaaaaggaatgaacaaagcctccaagaaatatgggactatgtgaaaagaccaaacctacgtttgattggtgtacctgaaagtgacggggagaatggaaccaagttggaaaacactcttcaggatattatccatggagaacttccccaatctagcaaggcaggccaatattcaaattcaggaaatacagagaacgccacagagatactcctcgagaagagcaactccaagacacataattgtcagattcaccaaagttga

SEQ ID NO: 128437 - DNA, 1217 bp, Homo sapiens
atgctgcctattctgggcagtaggcacccctctagcctagggcaggcccgaaagttggattataggccatccaagagccaatgcctagaacctgggaccccaagagcctgcttggtgctctacacccttgtggccaagctgatttataatgactatttcattcactactttgcccccagaggccttccacctatggagaagaatgtggtttttgttattgacataagtggcttcatgtttggtaccaagatgaaacaggatcacaacttctcactagcaagggaacaaaactggacagagaatgagtttgacaaattgatggaagtagacttcagaaggtgggtaataacaaactcctccgagctaaaggagcatgttctaacccaatgcaaggaagctaacaaccttgaaaaaaggttagatgaattgctaactagaataaccagtgtagagaagaacataaatgacctgatggagctgaaaaacacagcaggagaacttcgtgaagcatacacaagtttcaatagctgcaatgatcaagcagaagaaaagatatcagagattgaagatcaactcaatgaaataaaaccaaatctacgtctgattggtgtacctgaaagtgatggggagaatggaaccaagttggaaaacactctgcaggatattatccaggagaacttctccaacctagcaaagcaggccaaccgttcagattcaggaaataccagagaacgccacaaagatacttcctcgaggaagagcaactccaaggacacattaattgtcagattcaccaaagttggaaatggaagggaaaaaatgtttaaggggcagccaggggggaaaggtcggggtcaccctcaaagggaagcccatcacactaacaggcggatctctcggcagaaactctacaagccagaagagagtgggggccaatattcaacattcttaaagaaaagaattttcaacccagaatttcatatccagccaaactaagcttcataagtgaaggagaaataaaatactttacagacaagcaaatgctgagagatttttgtcaccaccaggcctgccctacaagagctcctgaaggaagcgctaaacatggaaaggaacaaccggtaccagccgctgcaaaatcatgccaaaatgtaaagaccatcgagactaggaagaaactgcatcaactaacgagcaaaatcaccagctaacatcat

SEQ ID NO: 128438 - DNA, 1554 bp, Homo sapiens
atgcagctgtgcatagcggcagcagtgaggaccctggcctggcaggcccccacatcccttgctgagggctccaggggccagggctgctcaacaggaccaagaggaaatgaccacaggagcccccagctgctgggggtggcccccgcggtttcctgggccatttctgcagtcctcggggagcaccacgtgtgcctggctggggctgtgctctggggaaatggcaactgcgaggtcctcacagaccgggcccgggtcttaaccacagccgcatctcagcgccttgatattgctgagtggatgcccaaaaagcactgctgggtgaatgtgcgagtgaatgatgaagatggaggtggctgttggtgccagggcaaggccccaggagtctggggaggtggcaccaggcagttcaggctccacttccagacgccaagccattttctcactcccatctctcccgttgcccctatatctgagctgacctcctccctgagctctggtgaaattctagagagcccagaggtgcagctcacactcctgcgccacaaggcctttgcagtctccaccttcctgggacactccatcttagagctggtgctggtcactgggatctggtattggccgtggggacttgtccttggctgtggggacccagcgctggtccctgagacctggtactggccatggggacccgtccctggctgtgggtacccggtgctggtccctgagatctggtactggccatgggggcccgtccctggctgtgggtacccggtgctggtccctgagacctggtactggccatggaggcctgtccctggctgtgggtacccggtgctggtccctgagatctggtactggccgtgggggcccatccctggctgcagggactcagtattgtctatggggtctgtccctggcttcggggagccagtagtgcctgtggggcccatacctggtggtggggacctggtgctggaggatcctgacagcaaaaccacagaggcgacaggcctctccgtgccaggtctgcgctgttctccctggcctcggctcccacccacccggccccccagctacagacagcagcgattctccctcccactcaatggggccactgtccagcccatcattagtcttcagggctggcagatgacaccggccacgggcagtgtttcctccggccccagcacacaaggcacaaaagacaccatcctgccccaagaccctcctagtcacgtggcgcatgggaagcggtgccgggaatcttccagggcagtcccctgccccgggggagatcgtgttcaaatccccgaggaaatgctgctctttggccctttttctgaaaaaccccccaaggagaccttccaattcctcatcaaacaaactcacacgtacagcggactgggcatggccgccaccctcgggagccctcctgggaaagcttcccaaggctctgctgagctccgggaacaggtccctacctgtccgggaaccgggctggcactcaataaacaaatcaaagctcggcgccggaaggcagaactctgggactag

SEQ ID NO: 128439 - DNA, 912 bp, Homo sapiens
atggctgaaagggccaacgtagagctcaggctgtggcttcagtgggtggaagccacaagctttggaagcttccacatagtattgaacctgagagtgcacagaagtcaagaattggggtttgggaacctccacgtagatttcagaacatggaaactcctggatgcccaggattaccaaaccaataacaatgaccaggcagtagttgaaatctgtatcacaagaatcacaacagccatcagagagaccgagtccattgaaaagcatgcaaaggcccttgtggggctctgggactcctgcttggaacataacctgagaccctttgggaaagacgaagacactcctcatgcaaaaatcgcatctgatatcatgagttgcattttacaggccaaagcccgccagtttgcccgtgtgccacgcagcagccggcttcttcgcgcttaccgcgcggcccacagatgcggagaagagggcaagccagggcagaggatggcacgacaacgggaccaaacagtgacccctgcaggtgactggacgataacttggcctaggaccggccccccgccactgcaagctgcgttccctctgtgctcacaccctgcagcagtcaaagcactcccactcacacacgggctgcacacgcatagttgcagtacaccgaactcacacacactacacggaaggaaaaaagaaaaagactttgcagatgtgattaaagatttggggataggagattttccggcgttagcagtaggacccaatgcaatcacaagcatccttagaaagaaaggcagagggcccttccatgcttccgcatataagaggagaaggcaatgtgagcaggaagcagagactgaagtgatgtggccacaagccaagggatgccagcagccaccagaagctggaagaggctag

SEQ ID NO: 128440 - DNA, 511 bp, Homo sapiens
tgatatcatgagttgcattttacagaattacaaccgacccccagtgatggcattagccatccccattgcagtgaaattcctccacagaggcaacaaggaactgtgcaggaatatgtctaactacctgtctctggctgcaattaccaaggcagattctcctggctgatcacacggaagttatagtaaagagcatactccaagtttgaagaactgcatttccgtgcttctggtcacctgttcaactaccaactgtggagatcttatctctgtgtactgagtggaacacgtcactcagtggggtatgaaaaacctgtcttcatttgcttccaaaagcaagaaatgtcttttgttagataaaatacatcagaaaatgtgtaatgacttcttaaatgtgaacatgatttggataacaagcataaatactagcataaaaagccaaatagtacacctctgttaattgttacaacatttgaatgaataagaagctcaaattagttcatgcaaaaaaaaa

SEQ ID NO: 128441 - DNA, 1668 bp, Homo sapiens
ttgaaaattgtttcctgcgtggctcgcccccgccccccattcttccctgggaaagtatagattttcacgaacacagggagttctgttttctctgttaaaaacaactctcctttactggagcaggctttgtgtttcacctcaggaaacagagcgttgcactgggaggtaactccgctgggtgaggtgcagcctgtcacctgaccggtctctggggctgccggtggcatcaggctgcattccttgaattcttccacccggcaccggctccgcaatgaacaacttcaggttcactgagctgagcggattccactcgctgtgccctcggagcctgcctgaatctcccgcccagtctcaaaccatgcagctgagtaactgcaagggcgcctttgaggagtagcacgcagagagtgtcaatgaagacctcaaagtctggagaaaaatgacctttcatggaataagaagtatacctccttctacatgtttttgtcttactgacctctgataactggaacacatgactctgggtctgtagaaagtcaactgatcaaactcatcctcaccatgcatcaactgttcagactggttttgggacaaaaagatctttcacgagctggggacctcttcttcttagaataactctgagattgaagacagccttacagaagctttggagcaaattaagataattagctcatcttcagattaccaaaccaataacaatgaccaggcagtagttgaaatctgtatcacaagaatcacaacagccatcagagagaccgagtccattgaaaagcatgcaaaggcccttgtggggctctgggactcctgcttggaacataacctgagaccctttgggaaagacgaagacactcctcatgcaaaaatcgcatctgatatcatgagttgcattttaccagaattacaaccgaccccccagtcgatggcattagccatccccattgcagtgaaattcctccacagaggcaacaaggaactgtgcaggaatatgtctaactacctgtctctggctgcaattaccaaggcagatctcctggctgatcacacggaagttatagtaaagagcatactccaaggtatggtgcgaaagttgagcttgggcacatgttttgggagatatttaaaagtattttcatcaagcatttatggtttgtgggaagcaagacctagagtattagaagcaaattaatttctctgttttgctgccagttgacctgtgaacatgcaaaaggttacttaatctggctgtctgtgtcccttcccaaggcagatgaattacttagactcattaaaagaattgtaagcattcttccaaatctgtgtttctcagtttgaagaactgcatttccgtgcttctggtcacctgttcaactaccaactgttggagatcttatctctgtgtactgagtggaacacgtcactcagtggggtatgaaaaacctgtcttcatttgcttccaaaagcaagaaatgtcttttgttagataaaatacatcagaaaatgtgtaatgacttcttaaatgtgaacatgatttggataacaagcataaatactagcataaaaagccaaatagtacacctctgttaattgttacaacatttgaatgaataagaagctcaaattagttcatgaaaaaaaaaaaaaaaaaaa

SEQ ID NO: 128442 - DNA, 1117 bp, Homo sapiens
gtaacgtgtccgtgtggtggaattcgctctcagaaaggtactgtgaccaccacttgcttggctctccaacttcctcccccatttccctcttgactcctgtttgccataacaccttctgtcccctagccttgcctcaggtccccgacgaatcctgcccttaatctgtgggggtggtaggtggcactggtttgaagagcttactggatctccctcagtgagtcagcctggagttgtgtttgaaaaccacaggccctgactgtggctgtcagacctcccagacaccacctgctgctgcctatcatcatcttcaggtgctgggctcccctgtgggcctcgtctgcccgccctctgctgcagctgtcccatgggcgcccgccctctctgacaccacaagagagcccatctagattccaggaaaaaactcatctttatttgccttcttcccactgaaggtaaaagcaacattaataaccacaacaaatacttagtgagtgcttactattattcatttacttgttggcccttccatccctggccatgatgagagacatgccatagcttactcctaaagagacctgaggacacacgtgcacaaacatattgggcatatcatcaatggcatcaaaactgattttccctgtctacccagaacaggcctgagggagagggaaaagcggatacccacctgtgtcgctgtttgcgtgccaagtccaggaacagtccatacagccctgctgcatcccacgacgctgtcacaaagcaggagttcatccgaggccaaggtgttgtcatgagaatattcgttaaagtagggacgctgactttgttcttgggcagattctcttcctgtggagtatccagcctgtttgcctagttttcctgttcttctggggtctgatctctatctgttttactgcagtccagttaccaaagtggtataagtaaaattgaaagaattctaaataccttttccccccacgttagctgcctcacgttaatgtggtcttacggtctgcaaataagtggtttgatgatttggcgactgcagttacccatactagctctcctaccactcactactgacagttaattattatcgaatatccacccacccagg

SEQ ID NO: 128443 - DNA, 1368 bp, Homo sapiens
atggtgtccacaggcagtgtggatgttgtccagggaagtgagcgaaagaggtccttagtggaaaaaagattagaattcttgaacactatttggacagtctatataccggaagcccatcagtcacagagcaacaagccatgggcagccttccttctgaaatatgcaccaaaaacttgttctgatatctttccagaaatcccaccccagagaagtgaccagaaagccaaaagatatgttaaagagctattagatgaccagaatgacctgaaatatcttgaaaagagttatcagctgcatgcgatggctcacacctgtaatcccagcacttcaggaggccaaggaagagaatctgcccaagaacaaagtcagcgtccctactttaacgaatattctcatgacaacaccttggcctcggatgaactcctgctttgtgacagcgtcgtgggatgcagcagggctgtatggactgttcctggacttggcacgcaaacagcgacacagattaagggcaggattcgtcggggacctgaggcaaggctaggggacagaaggtgttatggcaaacaggagtcaagagggaaatgggggaggaagttggagagccaagcaagtggtggtcacagtacctttctgagagcagtcattggttattatgctctggaggagaggaggaaatacgtaacagagaccttcagagggaacgagcagatcgcacatttgttctttccatatgtccaggcactgccaatgatgcaaatgtcttctaaaggagcctgctcagctgaagccagggatgcccttgatacaaaaacacactttccacttgcaatgataccctcatatttactgctaaatgggaatattggagagctgccagagggcccggcgggaggctgcgcccagaatcctgggctttgggcctctggggcccggcgaggagatgaagaagtcaagcctcgagctctccggaggttcgatggccgccgggccagtgcgggctcagaggaagaccctgcaaaaaagagcgctcgcccccacccctggagccgaccctgcgcatcgccgtatcgcggggctggcggccagcgccttagaagagcctgctccgccgcaggaagaaagacgcccgacaggcgcccactgcccgaacccacgcgggggccagtcagccagcgggccgtgttgggaaagctccgcgcggcggcgggacataggatccccatcggggacctgggcgacggcctgagcttgggcgcccctccagctgggcgtcatctccacacagttcttcccttgcgccgcgaattcagcccctgtgaagacgctttgggcattggcgagcaacaggggaaaaaacgagtcacttaa

SEQ ID NO: 128444 - DNA, 1353 bp, Homo sapiens
gacctgtactgcgcggtggaattcaggaatttgcctatattaaggcattgtatgaaaggaaatttcttgttcctaagccaattgattacaatcgccatgcagtggacatggaactcataaatggttatccactatgttagatacaccatgttgaagatcctgcatcagtatatgatgaagctatggaactaattgtcgaacttgcaaatcatgggctgattcatggagattttaatgaatttaatctcattttggatgaaagtgaccatatcaccatgattgattttccacagatggattcaacttctcatcccaatgctgagtggtattttgacagagatgttaaatgcattatagatttctttatgaaacgtttcagctacgaaagtgagctttttccaacttttaaggatatcaggagagaagacactcttgatgtggaggtttctgccagtggctacacaaaggaaatgcaggcagatgatgaactgcttcatccattaggtccagatgataaaaatattgaaacaaaagagggatctgaattctcattttcagatggagaagtggcagaaaaagcagaggtttacgggtcagaaaatgaaagtgaacggaactgtctagaagaatcagagggctgctattgcagatcatctggagaccctgaacaaataaaggaagacagtttatcagaagagagtgctgatgcacggagttttgaaatgactgaattcaatcaagctttagaagaaataaaagggcaggttgttgaaaacaactctgtaactgaattttctgaggagaaaaacagaactgaaaattacaacaggcaagatggtcagagagttcaaggaggagtccctgctggctctgacgagtatgaagatgaatgccctcatctaattgccttgtcgtcattaaatagagaattcaggcctttcagagatgaagaaaatgtgggagctatgaatcagtattagaaccaaggactcctgagtatcacttctttcaggcagtgctgtaagctgttcaacaattcctccagaactggtgtaacagaaggtgaaacgtcagttgacaaaacagcaaaaatcagctgtcagacgtcgattgcagaaaggagaagcaaatatatttaccaagcaacgtagggaaaacatgcaaaatatcaaatcaagtttggaagcagccagcttttggggagaataatatatttaggatcttggatatgtttaatatattttttaaagttactgtaattcctttttgagccctcatttgtcttttttgagccaaggctatcatatattaataaataaaccctctttcatctataaaaaaaaaaaaaaaaaa

SEQ ID NO: 128445 - DNA, 2135 bp, Homo sapiens
atgggaagtaaagtcaaagaagtggaagatgatagccagatgtctgatttggtgagaggaatgaatgccttcagcaaaacaggaagtggaggagtggagcagggaagaaccgggcagggagggacaaacgggcacataaagaaagcgaaagcccgagacagggacaggaggtttaagaagacaccccaaaggaaagttggaaacgataacttgcagctcccactcagatggacagagcagcatgcagagactcacattatgaacttctgctccaagaactacaacaggaacataccaggaaaaccaagagaatccatagacactttgaatgaagcagcttgccgcggcaggctcagtaagacagccagaaaactctggtcggaagctcaggatcagagaagtttccaggccacagagatgcaagcgtttctcttcagcgcaaagcgaatagcagcagaaaagaaaacaattattagaagacgggacctttgctctatctgggggaagcttctgccacgtcccgggtcccagagtgtgcctgctcagatcccagaaaacttgcaggaacaggaagagagagcaaagtggttacttaatgggaggagcaaatttttcccgcaaacaacttctactctaggcaaagtgacttccaacaagacaggggtaaaagaacctgagctagagtccagacaaccaaatctgttaaaggttgaaatgggcatgaagaaccatgaaattgttcccggcagtttgattgcttctatagccagccttaaacatggtggctgtaataaagttttaagagaattagtgaaacataaactcatagcttgggagcgtaccaaaactgtccagggctatcggttgacaaatgcaggatatgattacctagctttgaaaacactttcttctaggcaagtagttgagtctgttggaaaaccagatgggtgttggcaaaagaatcatatatttacattgttgcaaatgaagaaggacaacaatttgcattaaagcttcacagactaggaagaacctcgtttcgaaatttgaaaaacaaacgcgattatcataaacataggcacaatgtgtcttggctttatttatctcgtctctctgccatgaaggaatttgcctatatgaagttcaggacgctggaaataagagattatttttactgggtcaaaatcaacgtgttgacaggaccatgttcccccaagaggggctctagtggagaatttgttccttgccttttgcagctcctactgggatttggtgactgctggcattcttttggcttgtggcacatcactccagtctctgtctccatgcttacgttattgccttctctactcttggtgaagcaaaaaaagcccacattagattcacggatgggtcagtttgattttgtagttgaactacagctctatttgtgtgtccttgaaagagaagtgatcagggaatatcctcctgatgggcagatctttggaaggtattttgacagagatgttaaatgcattaaagatttctttatgaaacgtttcagctacgaaagtgagctttttccaacttttaaggatatcaggagagaagacactcttgatgtggaggtttctgccagtggctacacaaaggaaatgcaggcagatgatgaactgcttcatccattaggtccagatgataaaaatattgaaaccaaagagggatctgaattctcattttcagatggagaagtgccagaaaaagcagaggtttacgggtcagaaaatgaaagtgaacggaactgtctagaagaatcagagggctgctattgcagatcatctggagaccctgaacaaataaaggaagacagtttatcagaagagagtgctgatgcacggagttttgaaatgactgaattcaatcaagctttagaagaaataaaagggcaggttgttgaaaacaactctgtaactgaattttctgaggagaaaaacagaactgaaaattacaacaggcaagatggtcagagagttcaaggaggagtccctgctggctctgacgagtatgaagatgaatgccctcatctaattgccttgtcgtcattaaatagagaattcaggcctttcaggtatagacttctgtcgattgctttttaa

SEQ ID NO: 128446 - DNA, 1974 bp, Homo sapiens
atggggttgtggctccctggtgatgcgactcccgtttattttgcttttcattttggaataaatggatttagccatactgctcagcctgccccctctgctgtcctgcaggctctggcggtggccatccagcttggtggccatctggctgatccactcctccaggtggaccctctgtcctcatgtgaagtacagaggaacctggtgccggccgcagtcaacccctatgtgatgatctttctacccgccctctttcgtgtcttggtgctggctgctgtctttggccagctaaaagaatatcagcaaaggaagagccctggtattccagcaggagcaaagacaaaaaagaaaaaaactgacagtagccctgagacaaccacttccggtggttgccactcacctggggatagccagtaccaagaactagcagtagccctggagtcaagctcagtgacaatcaatcagctcaatgaaaacatagaatcattgaaacagcagaagaaacaagtggaacatcagctggaagaagcaaagaaaacaaacaatgaaatacacaaagcacaaatggagcagttagagacaatcaacatcctcacattggaaaaggcagacttgaagaccaccctttaccatactaaacgtgctgcccgacacttcgaagaagagtccaaggatctggctggccgcctgcaatactccttacagcgtattcaagaattggagcgggctctctgtgctgtgtctacacagcagcaggaagaggacagggggcactgcctgagctccccagatcaaaacttctcactcttcaccatccagtcctcgagctgcagagaagcggtcctccaccggcggttacagcagaccataaaggagcgggcgctgctgaacgcacacgtgacacaggtgacagagtcactaaaacaagtccagctagagcgagacgaatatgctaaacacataaaaggagagagggcccggtggcaggagaggatgtggaaaatgtcggtggaggctcgaacattgaaggaagagaagaagcgtgacatacatcggatacaggagctggagaggagcttgtccgaactcaaaaaccagatggctgagcccccatccctggcacccccagcagtgacctctgtggtggaacagctacaagatgaggccaaacacctgaggcaggaggtggaaggtctggagggaaagctccagtcccaggtggaaaacaatcaggccttgagtctccttagcaaggaacaaaagcagagactccaggagcaggaggagatgctccgagagcaggaggcgcagagagtgcgggagcaggagagactgtgtgaacaaaacgagaggcttcgggagcagcagaagatgctacaggagcagggtgagaggctgcgaaagcaggagcagaggctacgcaaacaggaggagaggctgcgaaaggaggaggagaggctgcaaaagcaggaaaagaggctgtgggaccaggaggagaggctgtggaagaaggaggagaggctacaaaagcaggaggagaggctcgcgctctcccagaaccacaagctcgacaagcagctggccgagccacagtgcagcttcgaggatctgaacaacgagaaaaagagcgcactgcagttggagcagcaagtaaaggagctgcaggagaagctagacgaggtgaaggagatgcagtacatggccacctatcagcagctgacctctgagaaggaggcgctgcacaggcagttactgctgcagacccagttcgtggaccagctgcagcagcaggaagcttggggcaaagcggagcacctagaagctgccagccaccagaaccaacagctagagacccagctaagcctcgtggctctccctggagaaggagatggaggacaacatctggacagtgaggaggaggaggcgcctcggcccacgccaaacatcccagaggacctggagagccgggaggccacg

SEQ ID NO: 128447 - DNA, 4136 bp, Homo sapiens
gagctccgccacgcgaggtttcgggctcgtggttttgcttcctccggccaaggtccccgccgctgcatccctcgcggcttcccgtgcgctccgggccggagccgagccgcctgcgctgccacagccagcgcctccacacactcgcagacgctcacacgctctccctccctgttcccccgccccctccccagctccttgatctctgggtctgttttattactcctggtgcgagtcccgcggactccggcccgctatttgtcatcagctcgctctccattggcggggagcggagagcagcgaagaagggggtggggaggggaggggaagggaagggggtggaaactgcctggagccgtttctccgcgccgctgttggtgctgccgctgcctcctcctcctccgccgccgccgccgccgccgccgccgcctcctccggctcttcgctcggcccctctccgcctccatgtgccggatagcgggagcgctgcggaccctgctgccgctgctggcggccctgcttcaggcgtctgtagaggcttctggtgaaatcgcattatgcaagactggatttcctgaagatgtttacagtgcagtcttatcgaaggatgtgcatgaaggacagcctcttctcaatgtgaagtttagcaactgcaatggaaaaagaaaagtacaatatgagagcagtgagcctgcagattttaaggtggatgaagatggcatggtgtatgccgtgagaagctttccactctcttctgagcatgccaagttcctgatatatgcccaagacaaagagacccaggaaaagtggcaagtggcagtaaaattgagcctgaagccaaccttaactgaggagtcagtgaaggagtcagcagaagttgaagaaatagtgttcccaagacaattcagtaagcacagtggccacctacaaaggcagaagagagactgggtcatccctccaatcaacttgccagaaaactccaggggaccttttcctcaagagcttgtcaggatcaggtctgatagagataaaaacctttcactgcggtacagtgtaactgggccaggagctgaccagcctccaactggtatcttcattatcaaccccatctcgggtcagctgtcggtgacaaagcccctggatcgcgagcagatagcccggtttcatttgagggcacatgcagtagatattaatggaaatcaagtggagaaccccattgacattgtcatcaatgttattgacatgaatgacaacagacctgagttcttacaccaggtttggaatgggacagttcctgagggatcaaagcctggaacatatgtgatgaccgtaacagcaattgatgctgacgatcccaatgccctcaatgggatgttgaggtacagaatcgtgtctcaggctccaagcaccccttcacccaacatgtttacaatcaacaatgagactggtgacatcatcacagtggcagctggacttgatcgagaaaaagtgcaacagtatacgttaataattcaagctacagacatggaaggcaatcccacatatggcctttcaaacacagccacggccgtcatcacagtgacagatgtcaatgacaatcctccagagtttactgccatgacgttttatggtgaagttcctgagaacagggtagacatcatagtagctaatctaactgtgaccgataaggatcaaccccatacaccagcctggaacgcagtgtacagaatcagtggcggagatcctactggacggttcgccatccagaccgacccaaacagcaacgacgggttagtcaccgtggtcaaaccaatcgactttgaaacaaataggatgtttgtccttactgttgctgcagaaaatcaagtgccattagccaagggaattcagcacccgcctcagtcaactgcaaccgtgtctgttacagttattgacgtaaatgaaaacccttattttgcccccaatcctaagatcattcgccaagaagaagggcttcatgccggtaccatgttgacaacattcactgctcaggacccagatcgatatatgcagcaaaatattagatacactaaattatctgatcctgccaattggctaaaaatagatcctgtgaatggacaaataactacaattgctgttttggaccgagaatcaccaaatgtgaaaaacaatatatataatgctactttccttgcttctgacaatggaattcctcctatgagtggaacaggaacgctgcagatctatttacttgatattaatgacaatgcccctcaagtgttacctcaagaggcagagacttgcgaaactccagaccccaattcaattaatattacagcacttgattatgacattgatccaaatgctggaccatttgcttttgatcttcctttatctccagtgactattaagagaaattggaccatcactcggcttaatggtgattttgctcagcttaatttaaagataaaatttcttgaagctggtatctatgaagttcccatcataatcacagattcgggtaatcctcccaaatcaaatatttccatcctgcgcgtgaaggtttgccagtgtgactccaacggggactgcacagatgtggacaggattgtgggtgcggggcttggcaccggtgccatcattgccatcctgctctgcatcatcatcctgcttatccttgtgctgatgtttgtggtatggatgaaacggcgggataaagaacgccaggccaaacaacttttaattgatccagaagatgatgtaagagataatattttaaaatatgatgaagaaggtggaggagaagaagaccaggactatgacttgagccagctgcagcagcctgacactgtggagcctgatgccatcaagcctgtgggaatccgacgaatggatgaaagacccatccacgctgagccccagtatccggtccgatctgcagccccacaccctggagacattggggacttcattaatgagggccttaaagcggctgacaatgaccccacagctccaccatatgactccctgttagtgtttgactatgaaggcagtggctccaccttggggtccttgagctcccttaattcctcaagtagtggtggtgagcaggactatgattacctgaacgactgggggccacggttcaagaaacttgctgacatgtatggtggaggtgatgactgaacttcagggtgaacttggtttttggacaagtacaaacaatttcaactgatattcccaaaaagcattcagaagctaggctttaactttgtagtctactagcacagtgcttgctggaggctttggcataggctgcaaaccaatttgggctcagagggaatatcagtgatccatactgtttggaaaaacactgagctcagttacacttgaattttacagtacagaagcactgggattttatgtgcgctttttgtacctttttcagattggaattagttttctgtttaaggctttaatggtactgatttctgaaacgataagtaaaagacaaaatattttgtggtgggagcagtaagttaaaccatgatatgcttcaacacgcttttgttacattgcatttgcttttattaaaatacaaaattaaacaaacaaaaaaactcatggagcgattttattatcttgggggatgagaccatgagattggaaaatgtacattacttctagttttagactttagtttgttttttttttttttcactaaaatcttaaaacttactcagctggttgcaaataaagggagttttcatatcaccaatttgtagcaaaattgaattttttcataaactagaatgttagacacattttggtcttaatccatgtacacttttttatttctgtatttttccacttcactgtaaaaatagtatgtgtacataatgttttattggcatagtctatggagaagtgcagaaacttcagaacatgtgtatgtattatttggactatggattcaggttttttgcatgtttatatctttcgttatggataaagtatttacaaaacagtgacatttgattcaattgttgagctgtagttagaatactcaatttttaatttttttaatttttttattttttattttctttttggtttggggagggagaaaagttcttagc

SEQ ID NO: 128448 - DNA, 1835 bp, Homo sapiens
atgggggaggctgtgctcgagaaatcacccagtcttgctctatctgccactcagtgtcaccccagggctccttccggccgctgccttttccttcccaccaagcctggggccaggtgggtagaagcattcccaaccacttcagaaggtgcaaatgtcatcacacaaactctcatcatgcatataattccccatttcggactcccaacatccatccagtccaataacaggcccgccttcatcagccaaattaaccaaggcatctctacatccttagatgataacggaaaagtggttctagaaattgcttcaaacatcagttccagcccatgtaccagtccaaacctggaagggatgggacccaacaaaccttctaggagggccggagaacagtctccaactcgccgggggaccggaaagaggagccgagaagcgcccctcggcccccacgcagcggaggcgcggagtggcgggactgctgctctttgtgggtgcagcacgcacgacccggagcgccctccccgcggcgctgtccccggcgtcttcgtcgcgccgagcggccctggagcggggacccggaggaagcaaaaccacgagcccgaaacctcgcgtggcggagctcttggggagcgccatccgctccacttccacctccacatcctccaccggccaaggtccccgccgctgcatccctcgcggcttccgctgcgctccgggccggagccgagccgcctgcgctgccacagcagccgcctccacacactcgcagacgctcacacgctctccctccctgttcccccgccccctccccagctccttgatctctgggtctgttttattactcctggtgcgaagtcccgcggactccgcggcccgctatttgtcatcagctcgcttctccattggcggggaagcgggagagcagcgaaaaaagggggtggggaggggaggggaagggaagggggtggaaactgcctggagccgtttctccgcgccgctgttggtgctgccgctgcctcctcctcctccgccgccgccgccgccgccgccgcctcctccggctcttcgctcggcccctctccgcctccatgtgccggatagcgggagcgctgcggaccctgctgccgctgctggcggccctgcttcaggtacgcggcggtccccgcgggccgggccacgggcgggtatctcccccgggcgagaagttccgttacgcggctgctcctttctctgtccggctgcctgtgccctatatgcgccccgggggcgcctttgcctggagccttccgtacttttcataccctcgggagagagccagcgagccttttcatttaatctctactaagaggctcctccgcggcaggaagcacctgctccagtccgggcgcaggttccctcgccactgcacgctgcgggttcccagcccgggggcagcccaactttccgccgcctccaacccgaggatgcccccaggctcctcccgaccagccagcccaggcctggaggccacttcacacagcctcggccgggaccctctagctgggcgggtgcagtgccctggtcccaagtcggtctccgcctgccgtggggtccctcgaaggttgcgggaaaggggcgtgcccaccctcgccgcggggcaggaaaatccacggagggtccccctgcctgtcgccctcggggcaaggggagaggtgctctactgccagctggcagccccgaaaagtgcggacgcagctcggaagtgcctgctccgggggtggagacaggtggtgtggattaccccgctccgtggtcttcacgggtcagggcctggcgcgctccggcccgccggggggtga

SEQ ID NO: 128449 - DNA, 465 bp, Homo sapiens
tccgtgtcgtggaattcgacacggatcctctaaggcccagagtgtcccgagtagcggcagtggggagtgctcagggtacgctaatgatctgtgtcttgtaaagagcatattgctgggcttacatccgtttatcttgtttgactgttattttaatagcttggtgttctcaagagtctgccctttccgaggaagaagaggatacaaccaggcctcttgaaacagtgacatttaaggatgtggctgttgaccttacccaggaggagtgggagcaaatgaaacctgctcaaagaaacttgtatcgagatgtgatgctggagaactacagcaacctagtcacagtgggctgtcaagtcaccaaaccggatgtgatattcaagttggagcaagaagaggagccctgggtgatggaggaagaaatgtttgggaggcactgtccagaacccagaagaggagagaactgctgtg

SEQ ID NO: 128450 - DNA, 330 bp, Homo sapiens
atgtgcatgtccgtaaaggctgtagcaaataaaacattacaaagtggccagcagcacccagtagccttgtctgaaagttttgtagcaaatgcttctggtaagacaacccagtctgccacacaggatggattcctggcaaattctagagcacagatttccagcaagttccacagcaggaacaggacatggctaaggcaagaaacagtgacatttaaggatgtggctgttgaccttacccaggaggagtgggagcaaatgaaacctgctcaaagaaacttgtatcgagatgtgatgctggagaactacagcaacctagtcacagtgggctgt

SEQ ID NO: 128451 - DNA, 531 bp, Homo sapiens
atgctgctaaacatcccccaacacacaaggcagtcccccagagcaaagaattatctggcccaaaatgtcaatagtgtcaaggcttggtgttctcaagagtctgccctttccgaggaagaagaggatacaaccaggcctcttgtacgtcttaagcatttatttgtttcctgcattattttgcagtgcagttacgtactcctacctctgacccctgagtaccagctaaacaagttcttgtatgttgtgatcacaatgcctaattttgatgacttcaaattaattagcattatgtttttacaggaaacagtgacatttaaggatgtggctgttgaccttacccaggaggagtgggagcaaatgaaacctgctcaaagaaacttgtatcgagatgtgatgctggagaactacagcaacctagtcacagtgggctgtcaagtcaccaaaccggatgtgatattcaagttggagcaagaagaggagccctgggtgatggaggaagaaatgtttgggaggcactgtccaggtgaataa

SEQ ID NO: 128452 - DNA, 543 bp, Homo sapiens
atgccaaccacaacgacaagagagatgacacagaatagcagcgaaacaatcaagaacaaaaacggaaagaaacagagaaaacaaagaaagaacagcaagaaaaatcggagaaagcagaaagacgaagacaaaacaagaagacaaaacaaaagacaccacaagaaaaacgacataaacccagaagaggagagaactgctgtgcgtctgaaggatggcggagctccagctccacaggctgttcaggagcatgatgctggcatctgctccgcttctgggggtgctcaggaaacttacatcctggtagaaggcaaaggagaagccagcacttcacctggccagagcaaaggaagcagggaaggaggagtgggagcaaatgaaacctgctcaaagaaattgtatcgagatgtgatgctggagaactacagcaacctagtcacagtggctgtcaagtcaccaaaccggatgtgtattcaagttggagcaagaagaggagccctgggtgatggaggaagaaattttgggaggcactgtccaggtgaataa

SEQ ID NO: 128453 - DNA, 1230 bp, Homo sapiens
ttcgtggctgccggcattcgcggctgcggggcccggaggtgggactgtcttcccggtgccgcgagggcgggtccggacagccttccccccagtccggcgcaccatgtccctgccttgtggctggaggcgccgcggacccaaagggagggaccatcccgggaagcagccccgagagcggaagtgcagaatggcttcctcgagagagtaaagtgcagcctctccagacactggggccccagtgggcgtgggcgaagttgctgggaggaggagttggcggaagcacttggaactcctttataagtggcagctgtgagattttaatttgatttgaaaatgagtaagtgcagaaagacaccacttcagcagctagcaagtcccgcgtcattcagcccagatattcttgctgacatttttgaactctttgccaagaacttttcttattggcaagccacttaataatgagtggcagttaccagatcccagtgagattttcacctgtgaccacactgaatttaatgcatttccttggatttgaagaactccctaaaatgaagtaaaaaaacctactggagtgataagaacctgggatgagtggcatgagcacacttgctttcactaataaagcggggaaaatcatttcctcatggtagaaaatctgtgaatgctgaactttggactcaagcatggtgtaagttccatgagattttgtgcagctttccacttattccacaggaagcttttcagaatggaaaactgaattctctacacctttgtgaagctccaggagcttttatagctagtctcaaccactacttaaaatcccatcggtttccttgtcattggagttgggtagcgaatactctgaatccataccatgaagcaaatgacgacctcatgatgattatggatgaccggcttattgcaaataccttgcactggtggtactttggtccagataacactggtgatatcatgaccctgaaattcttgactggacttcagaatttcataagcagcatgggtactgtgcacttggtcactgcaaatgggagtttcgattgccaatgaaacccagccggagaccagagaatggtaaaaggtcactgttacttcccatcgtggaattggctacatctgtccaaacatactcaatgtggaaatgaatttatcttcatgacaaagaaaaagcagtccctgacagccaagagcttgcctgacaccttcagctag

SEQ ID NO: 128454 - DNA, 410 bp, Homo sapiens
ttaagagaaaggaaattacaaactctcttgacgctgcagccagccgtggcactgtccctgccgccctggctggtgtccagtacttagaacccagggcaggtgctgccggccgcctggggggtgctgggtgggggcgcgtcccaaggcctgggagctcctgtcattgtcactggtcggtcgctgaggctggaggccacaggagcaggatcagctgtttcctcacttacgcaggcagctgtcctcttcctccgtaaacacgctgaccacctggcagccacagacaaagcccagaagcgcgatcaggatctgccggccaccggtgaagggccctcacatactggggctcagggcacagccagcacctgacaccaggtcctggccatggggggccccgaggcccactgctggca

SEQ ID NO: 128455 - DNA, 1143 bp, Homo sapiens
tcaggccacgggctccttagatttggaattcagctcccaccgccagccgccggccatggagcctcgctcctggaagccccaggtccacctggtgtgttgcgtcgacaccaccgtgcgcaccaggaaaagccagggagcctcgagatcggtcagaagttcctccagcgacggcaccagccgtgctgcagtcacattggccctgcccccggagctcgcgatcaggatctgcaggcaactgtgtagggcctccacatagctgggctccagggcacagccagcacctgacaccagggcctggccatggggggccccgaggcccactgctggcacctcctcatgcagacagcctggccagcgctcacgccaccaggagcgatgccgggagaggctgaaggtcagtagctcgctgtcctcctcctccaggaaggcctccctgcccagaccccagaactcgctctcaggggcaccgggccccttcctcgtgtcgctggccaaagctgccatgtgacgtgtgtctgcctcgggacagtcttcccggctgcagccccaggtgtggttccaggaagcgggggcccgtctgcctggctgggcacctgccccagtgcccacctgtgctacactggccagagcagagagcccctttaagaggccaccgacttccaggtagaagcagatgatgaagacgttccaggtgacccagacggctgcccacagcgtgtagtgggtgccccgggaatgaggcggtgggacagccagctcaagggagccccagcgcaggtcggcgtacggacacagcatccctggctgagctgccgtgacctgtcctcgcctcaccgggctgacattacacgtggacagcacaggcctccacaccatgacatagcgcagccggtactggatggtgccgaagagtcccaggatgacgatgatgatgtggacaaagttggccaggatgggcgcccactggtagcccaggaagtcaaacacctgcctctccagggcggcgacttcctgacgctcatgcatcaccagctgccactggccatgctccaaactggggtaccgtccaggctggtgcctgtccttcatgaggtcatccgacgggcactggagtcttcgagtgcccacccttgctctccccat

SEQ ID NO: 128456 - DNA, 499 bp, Homo sapiens
ttgtatgttttcttttcttttttttttttaagagaaaggaaattacaaactctcttgacgctgcagccagccgtggcactgccctgccgccctggctggtgtccagtacttagaacccagggcaggtgctgccggccgcctggggggtgctgggtgggggcgcgtcccaaggcctcgggagctcctgtcattgtcactggtcggtcgctgaggctggaggccacaggagcaggatcagctgtttcctcacttacgcaggcctgtggggacaaggtcagagagcacctgggggaacagggctggggcggccacttgggggctgccaccccctccccttggagaacctgaaatggaacaaagtccaagcagtggacggcttcaggcctttggcagaaaggagatgggtgggactgaggctctggaaagcccccactgcctctctctgtgccggcaggtcagcgtcttgtgcctgtttgctgacatctcagtggggtctggc

SEQ ID NO: 128457 - DNA, 1431 bp, Homo sapiens
ttttttttttttttttcgagggccatgttcctgtttatttaccaacttgatgatacctgggggagcctttgggactgtttgcccaaaacccccctttacaaaaatactgcctgctcgtcaccaccatgtgccctgccctatgccttggggcctggctctgctgttcctggtcaagcccaacccccaccccagggctccatcagcctcaactcctgggtggggtgggggttcttctggcacgagtttggggttaggaaccctccatgttcaacaggggccctcaccgctttgaggggtctcgggcctcacattgacttcctggggaggctgcatcccagcagcagtgctttgcagcccgagggtccagcagccccaggtgggcacctgaagggaggggctcctcgacgagacgacagcctgggggcagagctgtgacccccatgttgccagaggaggtgggcatgtggggttttgccttttcttttgtatgttttcttttcttttttttttttaagagaaaggaaattacaaactctcttgacgctgcagccagccgtggcactgccctgccgccctggctgggtgtccagtacttagaacccagggcaggtgctgcgggccgcctggggggtgctgggtgggggcgcgtcccaaggcctgggagctcctgtcattgtcactggtcggtcgctgaggctggaggccacaggagcaggatcagctgtttcctcacttacgcaggccaattacacctgcttggacaagagactggatggcttttcattgacatggtagagaggaaatggatcaaatccaccaatgaaatcaaagctgtcctcttcctccgtaaacacgctgaccacctgggcagccacagacaaagcccagaaggcgcgattcaggattttgcaggcaactgtgtagggcctccacatagctgggctccagggcacagccagcacctgacaccaggtcctggccatggggggccccgagggcccactgctggcacctcctcatgcagacagcctggccagcgctcacgccaccaggagcgatgccgggagaggctgaaggtcagtagctcgctgtcctttaagaggccaccgacttccaggtagaagcagatgatgaagacgttccaggtgacccagacggctgcccacagcgtgtacaccatgacgtagcgcagccggtactggatggtgccgaagagtcccaggatgacgatgatgatgtggacaaagttggccaggatgggcgcccagtggtagcccaggaagtcaaacgcctgcctctccagggcggcgtccagctgaaaagcagcagaggacgacgagcgcgcagcggccgcagcaggagcccatacgaaatcgtcgccccggatattccgggccggtaccgcaggcgtatcaaggaggtgtactagtt

SEQ ID NO: 128458 - DNA, 304 bp, Homo sapiens
cggcgctgagctcgatttctcgccgggccttagctgccttcccgcggggcagggctggggacctgcagcccgccatgcctgagcctcccacccactccatgggctcctgtgcggcccgagcctccccgacgagcaccaccccctgctccacggcgcccagtcccatcgaccacccaagggcgcgaagatctgcagcttcactcctgagcccagcaagaccacgagcccaccgggatggaacaaacaactccagacgcgccaccttaagagctgtaacactcaccgcgagggtccgcggcttcat

SEQ ID NO: 128459 - DNA, 814 bp, Homo sapiens
tcatcgagccttagctaccttcccgcggggcagggctcgggacctgcagcccgccatgcctgagcctcccacccactccatgggctcctgtgcggcccgagcctccccaacgagcaccgccccctgctgcagggcgcccagtcccattgaccacccaagggctgaggagtgcgagcacacggcgtgggactggcaggccgctccacctgcagccctggtgcgggatccactaggtgaagccagctgggctcctgagttttttgggtccacgttgcttttatgagctataacagtcacctcgaagatctgcagcagcttcactcctgagcccagcgagatcacgagcccaccgggagtaaggaacgactccagatgctctgccttaagagctgtaacactcactgtgaaggtctgcagcttcactcctgagcccagcgatatcacgagcccaccgggaggaatgaacaactccagacgctctgccttaagagctgtaacactcactgcaaaggtctgcagcttcactcggccagggtccgcggcttcattcttgaagtcagtgagaccaagaacccaccaattccggacacagtagtgaaagtccaggttacacccttggcctcctttcatacctgaagggggctgttgagtgggggtaggagttccagctccccactcagggtccactgatacctggccgagaggtacaggaaggcttcttaatggtctccatgtgggttctactgacataagtggaggaggctcttttactcccaggaagtggctaaagtcctgactctcttccaagcctcct

SEQ ID NO: 128460 - DNA, 1782 bp, Homo sapiens
tgtagggctatcaatgacttccaacagagctttcagaagccagaaactcgccgtgaatttgatctgtccgaccccctagcccttaagaaagatcttccagcccggcagtcagataatgatgttcggaatacgatatcaggaatgcagaaattcatgggagaggatttaaacttccatgagaggaagaaattccaagaggaacaaaacagagaatggtctttgcagcagcaaagggaatggaagaacgcccgtgctgaacaaaaatgcgcaggtaatgaaacagaagagacgagctggtctcaacgctctcttcaacaaaccaaccctacagttttttgtaacgaagacgacaacatccctgctctcttggggtgtgtcagcgggtgatggaatagtgaggagctatgaggaagacaaaacagggaccaggcacagagttatgccctccctgctccactggaactgccctggccaacctcaccagtgacctccatgtcgcccaatccaaggtcggtttttgaccttcatctggacctaacagtcgatcacctcctgctcctggaaatgcgcatgcaggatagagcaggacagcaaggggcacaccaccagcctgtcccaggaggcaaaggcacgaacggccacacgtgggaaggtgctcctgtggccaggtcgatctgattgcttcttgcctcctttcagaggccctctacacagagacgcaccaccagaaaggcagtttgtgcatctgtgaaagacttcaacaagagccaggtataggtactccgcgacctcgggctcgacgactggaggggaggatgagcccactacggcttcccaatcaccaacctcctgcgtggggacctgctctccgagaacccgcagcaggcagccagctccttcgggccccaccgcgtggtccctgaccgctggaagggcatgacccaggagcagctggagcagatccgcctagtccagaagcagcaaatccaggagaagctggtgactgccccgcccctttttccagagcccatagagccaggctctttgctcccactgccttccagggccaccctgctgtttgagcggcagcagtggcggcggcagcgcgacctgcgcagagctctggacagcagcaacctcagcctggccaaggagcagcatttgcagtgagtgctgggtgggaccagggccaggtgggggaccgggtggagggaccgcggggctgtggaggtgggaagagcactgagtctgctgggggagtcaggaaggcttcctggaggaggcttcattggtgagacccaggaggaggatggcactgcctattcagggacggctttccaggtagagagaggggctcctgggctgccccagaaaagcctggagtctcttggttatagacaggactccaagagttcagagctccagctacaagaagatgtcaaatgcaagcaaacaggtgaacttgcacctgaaaaacacagtatttatttacttatttatctagctcttggcttaaactcagcagtcgatcaagtaatgctgccacccccaggctggtgtgggaccacgggtgggacccaggggactgcctcaggacctgtaactagagtgtggattgtgatagcctccccgacgagcgccgccccgtgctccacggcgcccagtcccatcgaccgcccaagggctgaggagtgcgagcgcacggcgcgggactagcaggcagctccacctgcagccccggtgcggaatccactggatgaagccagctgggctcctgagtct

SEQ ID NO: 128461 - DNA, 543 bp, Homo sapiens; identical to SEQ ID NO: 120295

SEQ ID NO: 128462 - DNA, 930 bp, Homo sapiens; identical to SEQ ID NO: 116844

SEQ ID NO: 128463 - DNA, 1533 bp, Homo sapiens
atggttcagcccctaggagagggcagcatctcccatacagtggctcctcacgtgctcctggctgtgcatcggcccccctggtttccagagctccaggcctgggcagaaatccatggggccaaaaggaagaaaagactgtcccaggttggcaaaggatcaaaggcgaatacgccccccgcgaccatccctctagaccgaaaccgagcctgcgccttcaccgaaagacgccggcaagtgggcccctgttccaccctgggtgtggaggcagccatcaacctcccggttcctggctcagccctggcgcataagaggggcaagcgcttgtggaataagtgggtgaaaggatgcccatgggtctcctttgtcctggctgcagcccctctttgcatcagtgccttctcggcagactcttcagctgaagccatagcccaggcaaaggacctcctcagccaggaggacttaaaagctgctatgagtgctgtgtccatgggatcaagggagtggtatttggagggggaaccactgcgacgaagggaggaaaatcaccatgggctggtggtctcgctggcttcaggagtgaagccgcagaccttcgcggtgagtgttacagttcttaaggcggcgcgtctggagttgttcattcctccccgtgggctcgtggtctctctggcttcaggagtgaagctgcagaccttcgcggtgagtgttacagctcataaaagcagcgtggacccaaagaactcaggagcccagctggcttcacctagtggatcccgcaccagggcagcaggtggagctgcctgccagtgccacgctgtgcgctcgcactcctcagcccttgggtggtcgatgggactgggtgccgtggagcagggggtggtgctcgtcggggaggctcgggccgcacaggagcccatggagtgggtgggaggctcaggcatggcgggctgcatgtcccgagccctgccccatggaaaggcagctaaggcctggcgagaaatcgagcacagcgccggtgggccggcactgctgggggacctagtacaccctctgcagccgctggcccgggtgccaagtccctcactgccttgtgcgagcagggctggccggctgctccgagtgcaggcccgccaaacccacgcccacccggaactccagctggcccccaagcgtgcacgcagccccggttcccgctcgcgcctctccctccacacatccctgcaagctgagggagccagctgtggccttggccagcacagaaaggggctcccacagtgcagcggtgggctgaagggctcctcaagtgccgccaaagtgggagcccaggcagaggaggcactgagagcgagcgagggctgtgaggactgccagcacgctgtcacctctcaactcagtctcccacatggcgtggccacccttgtgtctgttaaactctttctctacaaaaatgccatggtctttctttgtgcagtggtcaggaaaaaccccttgggcagatacaaaagttctttcaggcatctgtttccagaatag

SEQ ID NO: 128464 - DNA, 654 bp, Homo sapiens
tcacctctttctgacacagtccaaagagactttgatagctttttgagtttctgatttgaccagatatcgaagcacatcttgtacatttccgttcccagtctgagagccaagcatttctttaagaagatctgatttcagttgaagggaaatgatagactgccagagatgcttgttgctgctggattggttcttgtttctagggccagactcaggagcccagctggcttcacctagtggaccccacactggggctgcaggtggagctgcctgccagtcctgtgccgtgtgcttgcactcctcagcccttgggtggtcgatgggactgggcgtcgtggagcagggggtggtgctcgtcggggaggctcgggccgcacaggagccctttgagtgggtgggaggctcaggcatggcgggctgcaggtcccgagccctgctcctcatctgtacccagtggacttttttggcagcctcccccatcttctcgtgtggctccatatctttatatcttctgtggcagacgtagcctgctgcctccccaaactctatcgtcctcttctccttcaaccatggaaacttgattttgtctgtggcatccatgtgcctctttgaaacactcacctcctcagactgccttgaatccaggcgtggccacat

SEQ ID NO: 128465 - DNA, 801 bp, Homo sapiens; identical to SEQ ID NO: 120330

SEQ ID NO: 128466 - DNA, 2234 bp, Homo sapiens; identical to SEQ ID NO: 128149

SEQ ID NO: 128467 - DNA, 1218 bp, Homo sapiens
atgcagtatgccaagttgtcctatcggacccacctgtgcagccccattaattggctgttaccactcaacactgcagatttcatccgagttatccttgacttctctttctctttctcttacaccccacgtgctctccaccagccaatcctgttggcgctatattcaaagtctatccagaaactgaccatttctcagcatctcagcattaccaatgccatctgtgacatctctgaatggggagaggccacatctgcagccttgctttcttcatctctgcctgaccgtaaagcctcctccgcttgtcagtggatgtgggttgatctgaatcccgatttggtaaaggaaatcagtgcagcccggccactgagaggaagcgggtccatccacagctcccgcgcagatcccaattcgaggcataaggcaaggatggttaaacatccccgcttgctggcaattgctccaggcttgggcccatcagcaccaggcccttgccaggtgattgtactagttactagtccagcatcaaagcagaaggtccctagagaggctacgccaaccctgaagccaagctctgggaagaagtgtggcaagaaatcctgtgagctgtcgcagccactgagaagctctggacatgaagagactaccgttggtggccaaggggaagagagcccttgggtggttgatgggactgggcaccgtggagcagggggtggcgctcgtcggggaggctccggccgcaaggagcccatggagggcatggggggctcaggcatggcaggctgcaggtcccgagccctgcccagcgggaaggcagctaaggcccgccactcagtctatggtgttttgctactgcagaccaagctgactagtacaattttgcaggcacttcaaacaaaatgtccgggaaggagctatcatccttctgaattccccgtcctgatctgtggcagccccagccacacagatctgcagacaaccggaaaaaaacagccaatagcaacagatcaagaggcaagccagatcttggaattaacagacaagtcctataaaataactatgataaatacagtaaagaatttagagaagcatagagatataatggcagacaagtactctatattccacgatggctgggaccattctctgctcatcattgtccctccggcatctagcgcagaacatgccacagcagtaactcagtcagtgtttgtggagtga

SEQ ID NO: 128468 - DNA, 642 bp, Homo sapiens
atgaatggaaaaggcttgaaggaaagcctgccagccgctcagattgactttgcaagggggatcaccacaggtgggactacaggcacatgccactgtgtccggagttggtgggttcttggtctgactgacttgaagaacgaagccgcggaccctcatgactcaggagcccagctggcttcacccagtggatcccgcactggggctgcaggtggagctgcctgccagtcctgcgccgtgcgctcgcactcctcagcccttgggtggtcaatgggactggccgccctggagcagggggtggtgctcgtccgggaggctcgggcggcacaggagcccatggagtggcgttatgaacagaactttattttttccaacctaaaccaatcatcctgcattgggatggatggattgagggaaagatcatggtaccagatctgcaggcagctggggacagaagtcttcacttgcatggggccagtggcgctggccggccactccgagtgtggggccacacccacctggaactcgcgctggcccgtgatcgtctcccacgcctctccctccacatcttcctgcaagcagagggagccggctccgacctcggccagcccagagaggggctcccacagtgcggcggcgggctga

SEQ ID NO: 128469 - DNA, 807 bp, Homo sapiens; identical to SEQ ID NO: 120531

SEQ ID NO: 128470 - DNA, 1449 bp, Homo sapiens; identical to SEQ ID NO: 122677

SEQ ID NO: 128471 - DNA, 1083 bp, Homo sapiens; identical to SEQ ID NO: 120300

SEQ ID NO: 128472 - DNA, 3411 bp, Homo sapiens
atgagtgaagcccccagattcttcgttggaccagaagatacagaaataaatcctggaaattatcgacatttcttccaccatgcagatgaagacgatgaggaggaagatgattctccaccagaaaggcagattgtggttggaatatgttccatggcaaagaaatccaaatccaaaccaatgaaggaaattcttgaacggatctccttatttaaatatatcacagtagtagtatttgaagaggaggttattttgaatgaaccagtggaaaactggcctttatgtgattgtcttatttctttccattctaaaggatttccactggacaaagcggttgcctatgcaaaactcaggaatccatttgtaatcaatgacttgaatatgcagtatctcatacaagataggagagaagtatatagtattcttcaagctgaaggtattttacttcctcgttatgctattttgaaccgtgacccaaataatcccaaaggagtgaagctgcagaccttcgcggtgagtgttacagctcttaaggtagcgcgtctggagttgttcgttcctcccggtgggctcttggtcttgctgggctcaggtgtgaagctgcagatcttcgcgggctgcaggtggagctgcctgccagtcacgcgccgtgtgctcgcactcctcagcccttgggtggtcgatgggactgggcgccgtggagcagggggtggtgctcgttggggaggctcgggccgcacaggagcccatggagtggaatgtaatctgattgaaggggaagatcatgtagaagtaaatggggaagtttttcaaaagccatttgtagaaaagccagtcagtgcagaagatcacaatgtttacatttattacccaacttctgctggtggtggaagtcaaagactctttagaaagattggcagtagaagtagtgtttattctccagaaagcaatgtacgaaaaacaggctcatatatatatgaagagtttatgcccacagatggtactgatgttaaggtttatacagtgggtccagattatgcccatgctgaagctcgaaaatctccagcacttgatggcaaggtggaacgagacagtgaaggaaaagaagtaagataccctgttattctcaatgcacgagagaaattaattgcttggaaagtctgccttgcttttaagcaaacagtttgtggctttgatttgttacgggccaatggacagtcctatgtctgtgatgtcaatggcttcagttttgtgaaaaattccatgaagtattatgatgactgtgcaaaaatacttggaaatattgtaatgcgagaacttgctccacaatttcatattccatggtcaatacccttagaagctgaagatatcccaattgtaccaactacatctggaactatgatggaacttagatgtgtcatagctgttatacgtcatggggatcgaacaccaaaacaaaaaatgaaaatggaagaagtgctagatattgcacgacagcttcttatggagctagggcaaaataatgattctgaaattgaagaaaacaagccaaaacttgaacaacttaagactgtattagagatgtatggtcatttttctggaataaatcgtaaggttcagttgacctatctccctcatggttgtcctaaaacatctagtgaagaggaggacagccgaagagaagaaccatctttacttttggttctaaaatggggaggtgaattaactcctgcaggcagggtccaggctgaagaacttggaagagccttcaggtgtatgtatcctggaggtcaaggagattatgcaggatttcctggttgtggtttacttagattacatagcacctacagacatgacctcaaaatatatgcctctgatgaaggacgagtccagatgactgcagctgcttttgcaaaggggcttttagctttggaaggagagcttacacccattcttgttcaaatggtgaaaagtgcaaatatgaacggtcttttggatagtgatagtgactctctgagcagttgtcagcaacgtgtgaaggcaaggcttcatgaaatacttcagaaagacagagattttactgctgaagattatgaaaagcttactccatctggaagcatttctcttatcaaatcaatgcatttaattaaaaaccctgtgaagacctgtgataaagtttattccttaattcagagtttgacttctcaaatcagacatcgaatggaagatcctaaatcatcagatattcagctttaccatagtgaaacattggagcttatgctacgtagatggtccaagttagagaaagactttaaaacaaagaatggaagatatgatattagtaaaatccctgacatatatgactgtataaaatatgatgtccagcataatggttccttgaaattagaaaacacaatggaattatataggctttcgaaggcattagcagatattgttatccctcaggaatatggtataactaaagctgaaaaactggagattgccaaaggctactgtactcctctggttagaaaaattcgctcagaccttcagaggacacaagatgatgacactgtaaataaacttcatcctgtgtattctagaggtgttctgtctcctgaacgtcatgttcgtactagattatattttaccagtgaaagtcatgtacattctttgctgtctattcttcgctatggtgccttatgcaatgaatcaaaggatgaacagtggaaacgagctatggattatttaaacgttgtcaatgagctcaactacatgactcagattgttatcatgctttatgaggatcctaataaggatctttcctcagaagaacgctttcatgttgaattacactttagtccgggagccaaaggttgtgaagaagacaaaaatttgccatctggctatggatatagaccagcttccagagagaatgaaggcaggagaccttttaaaattgataatgatgatgaaccacatacttctaaaagagatgaagttgatcgagctgtgatattgtttaaaccaatggtatcagagccaattcatatacacaggaagtctccacttccaagatctaggaagacggctacaaatgatgttgtatctgaaaatgctaattacctgagaacaccaagaactcttgtggaacagaagcagaatcctactgtagcctctacagctttacgttccagtccaataatgagaaaaaaagtatctttaaatacgtatacacctgcaaagatcctcccaacaccaccagctaccttaaagagcactaaagcaagcagcaaaccagctacaagtggaccttctagtgcagttgttcctaatacctcatctcggaaaaagaatataactagcaaaacagaaacgcatgaacacaaaaaaaacactgggaaaaagaaatga

SEQ ID NO: 128473 - DNA, 972 bp, Homo sapiens
ttatactaggatcttcccctgtataagggattgttttctcttatcttggtctcctcgttcctcatcgattgttgttcctgcagcaattaccgagcagcgaaaatgcagtggaatggccactttacaggagggaagccgtttccaatactcacgaagtacaactcctaacctggtgggcttgggcatctggccaaaggctctgagatgagggaaggagaagctgtcacattctaaggcctgggctccaaaatcccagaacagcaattcctctgcttcatcttggtccaaccagtcacaggcccagcctagattcaaaggggaagacataagtcccatctcttgatgggcagagaggccttgagctagatacagagtgccgattggtgtatttacaatccttgagctagacataaaggttctccacgtcctcaccagagcagctagatacagagtgtcgattggtgcattcacaaaccttgtgctaaacacagggtgctgattggtgtatttacaaaccttgagtggggctgcaggtggagctgcctgccagtcctgcaccctgtgctcgcattcctcagcccttgggtggtcaatgggactgggcgccatggagcagggggtggtgctcgtcggggaggctcgggctgcacaggagcccatggagtgggtgggaggctcaggcatggcaggctgcaggtcccgagccctgccccgtgggaaggcagctgctcccttccctctcccataggtcccccctttaaaagggcccactctgtgctccaaaagggaagcagtacccttatggtaggaacctgtgcttcttccccaaaggtagttccattccatttgcttagcttctagcactgtcgcgcatagaggtgggcacttaataaatgctgccaaccatgtcaaggtaatgagagcagttaaatgagcagctgaactccatttattcagaagtgcttgttgcat

SEQ ID NO: 128474 - DNA, 1513 bp, Homo sapiens; identical to SEQ ID NO: 122680

SEQ ID NO: 128475 - DNA, 1608 bp, Homo sapiens; identical to SEQ ID NO: 120299

SEQ ID NO: 128476 - DNA, 1830 bp, Homo sapiens
atgaagccgcagaccctcgcggtgagtgttacagctcttaaggtggcgcgtctggagtctgtcccttctgatgttcggatgtgttcagagtttcttccttctggagtgaagctgcagatcttcacggtgagtgttacagctcttaaggcggcgcgtctggagttgttcgttcctcctggtgggctcgtggtctcgctggcttcaggagtgaagctgcagaccttcgcggtgagtgttacagctcttaaggtggcgcgtctggagtttgttccttctgatgtccagatgtgttctgagtttcttccttctggagtgaagctgcagaccttcgcggtgagtgttacagctcttaagacagcgtctggagttgttcattcctcccggtgggctcgtggtcttgctgggttcaggagtgaagctgcagatcttcgtgactcaggagcgcagctggcttcacctagtggatcccgcatgggggctgcaggtggagctgcctgccagtcccgcgccctgcgctcgcactcctcagcccttgggttgtcaatgggactgggccccatggagcagggggtagtgctcctccgggaggctccggccgcacaggagcccttggagttggtgggaggctcaggcatggtggactgcaggtcccgagccctgccccgcaggaaggcagctaaggcccggcaagaaatcgagcacagcgctgacagatcagtgagacagaaagttaacaaggatatccaggaattgaactcagctctgcaccaagtggacctaatagacatctatctccaccccaaatcaacagaatatacattcttctcagcaccacaccacacttatttgaaaattgaccacatagttggaagtaaagcactcctcagcaaatgtaaaagaacagaaattataacaaactatctctcagaccacagtgcaatcaaactagaactcaggattaagaatctcactcaaaaccgctcaactacatggaaactgaacaacctgctcctgaatgactactgggtacataacaaaatgaaggcagaaataaagatgttctttgaaaccaatgagaacaaagacacaacacaccagaatctctggggcacattcaaagcagtgtgtagagggaaatttacagcactaaataaccacaagagaaagcaggaaggatctaaaattgacaccctaacctcacaattaaaagaactagagaagcaagagcaaacacattcaaaagctagcagaaggcaacaaataactaagatcagagcagaactgaaggaaatagagacacaaaaaacccttcaaaaaatcaatgaaaccaggagctggttttttgaaaagaccaacaaagttgatagaccgctagcaacactaataaagaagaaaagagagaagaatcaaatagatgcaataaaaaatgataagggggatatcaccactgattccacagaaatacaaactaccatcagagaatactataaacacccctacgcaaataaattagaaaatctagaagaaatggataaattcctcgacacatacaccctcccaagactaaaccaggaagaagctgaatctctgaatagaccaataacaggctctgaaattgaggcaatcattaatagcttaccaaccaaaaaaagtccgggaccagatggattcacagctgaattccaccagaggtacaaggaggagctggtactattccttctgaaactattccaatcaatagaaaaagagggaatcctccctaactcattttatgaagccagcatcatcctgataccaaagcctggcagagacacaacaaaaaaacaatga

SEQ ID NO: 128477 - DNA, 574 bp, Homo sapiens
caaaatgtggctggaatcaggagaccggagagaccaatgaggggaacaggacgattgtatttaggtggccaccagctcagcagattaatacccagaggctgagcaatgagcaaagaaagggcttgacttttattcatgtgaccaaagggtgttggccgggccttagctgccttcccgcggggcagggctcgggacctgcagcccgccatgcctgagcctcccacccactccatgggctcctgtgcggtccgagcctccccgacgagcaccaccccctgctccacggtgcccagtcccatcaaccacccaagggctgaggaatgcgagcgcatggcacgggactggcaggcagctccacctgcagccccagtgcgggatccactaggtgaagccagctgggctcctgagttctttgggtccatgctgcctttatgagctgtaacatttatcgcgaagatctgcagcttcactcctgagcccagcgagaccacaagcccaccaggaggaacgaacaactccagacacgctgctttaagagctgtaacactaaccgcgaaggtctgcagcttcactc

SEQ ID NO: 128478 - DNA, 566 bp, Homo sapiens
tcagcttgcagggaggtgtggagggagaggcatgagcgggaaccggggctgcgtggggcgcttgcgggccagctggagttccgggtgggtgtgggcttggtgcgccctgcactcggaggagccggccagcccggcgctgcgctcgatttctcgccgggccttagctgccttcccgtggggcaaggctcgggacctgcagcccgccatgcgtgagcctcccacccgctccgtgggctcctgtgcggcccgagcctcctcgacgagcgccaccccctgctccacagcgcccagtcccatcgaccacccaagggctgaggagtgcgggcgcacggcgcgggactggcaggcatgatgaactgatagttgcattgccattcatgatgatcccctggcattcgtccattcagccattcaccattcacccattcaactggaattttggttgaatgccggaattgtgtccacaaattgtggatggatagttggttggctggctggatggctggctggatggctggctggatggatggtgaatggctggcggcggttcggttgctttgaagcat

SEQ ID NO: 128479 - DNA, 601 bp, Homo sapiens
gagtgaagctgcagacctttgcagtgagtgttacagctcttaaggcagagcgtctggagttgttcattcctcccggtgggctcgtgatatcgctgggctcaggagtgaagctgcagaccttcacagtgagtgttacagctcttaaggcagagcatctggagtcgttccttactcccggtgggctcgtgatctcgctgggctcaggagtgaagctgctgcagatcttcgaggtgactgttatagctcataaaagcaacgtggacccaaaaaactcaggagcccagctggcttcacctagtggatcccgcaccagggctgcaggtggagctgcctgccagtcctgcgccgtgcgctcgcgttcctcagcccttgggtggtcgatgggactgggtgccgtggagcagggggtggtgctcgtcggggaggctcgggccacacaggagcccatggagtgagtgggagactcaggcatggcgggcttcaggtcccgagccatgggctggttgtctcttctaccccagatcctatatgtcatcttcttgcccactccacaccatccactctgacctctttgctgttcttcaaggacgcacaaagtcat

SEQ ID NO: 128480 - DNA, 924 bp, Homo sapiens; identical to SEQ ID NO: 128145

SEQ ID NO: 128481 - DNA, 691 bp, Homo sapiens
gtggcatgggagacttcctggggctcatgatggggagggcatcaatcatcaaatcagatgaaaattcctgaaggcattgacctttagtgaattctaggtctggtatcaatggctgcctcttcctcgagttgctggagtccagtggctgcaatccttgagctagatacagagtgccaattggtgtatttacaatccctgaactagacataaaggttctccaaggccccaccagagtagctagatacagagtgtccattggtgcattcacaaaccctgagctagacacagggtgctgattggtgtatttacaatccctgagctggacataaaggttctccacgtccccaccagactcagaaacccagctggcttcacccactggattctgcaccgggactgcaggtgcagctgcatgccagtcctgcgccatgcgcccgcactcctcagcccttgggtggtcaatgggactggccgcagtagagcaggggacagcactcatcggggaggctcgggctagtggatcccgcaccagggctgcaggtggagctgcctgccagtcccacgccgtgcgctcgcattcctcagcccttgggtggtcgatgggactgggcgccatggagcagggggtggtgcttgtcggggaggctcgggccacacaggagcccttggagtgggtgggaggctcaggcat

SEQ ID NO: 128482 - DNA, 1085 bp, Homo sapiens
actggtgcactcacaaaccttgagctaaacacagggtgctgattggtgtgtttacaaaccttgagctagatacagagtgccgattggtgtatttacaatccttgagctagacacagagtgctgattggtgtatttacaatccttgagctagacataaagactctccacgccctcaccagagcagctagatacagagtgttgactggtgcactcacaaaccttgagctaaacacagggtgctgattggtgtatttacaatccctgagctagatataaagactctccacgtccccaccagactcaggagcccagctggcttcacctagtggatcccgcaccggggctgcaggtggagctgcctgccagtcctgtgccgtgtgctcgcattcctcagcccttgggtggtcgatgggactgggcgctgtggagcagggggtggtgctcatcggggaggctcgggccgcacaggagcccatggagtgggtgggaggctcaggcatggcgggctgcaggtcccgaaccctgccacgagggaaggcagctcttccgcagtagtccctgggcctagagggaggcaacttgtatggttttagcagcagagcattagtagtgaaacaaatccgatcccagtgggatgccaaatgacggagattcatatctctggccttcagaataccatgattttggtttccttggccccttttagtcaaggcaggagcacctgggatgcatggcaccaagtcccaggtgggccctgaacctggcccaggaaaccgttgtttcctcctaggcctctgggcctgtgatgggaggggatgctgcaaaggtctctgacatgccctggcgacattttccccattatcttggtgattagcatttggctccttgtaacttatgcaaatttcggcagctggctttaatttctccccagaaaatgggttttccctttctttattccagttcccaacaagttcctcatcttcatctgaggccacctcaacctgaactttattgtctataccactatcagcattttggtcaaagccattcaagaagtctctagaaagtgtcaaactttcccacat

SEQ ID NO: 128483 - DNA, 1182 bp, Homo sapiens
gagtgaagctgcagaccttcacggtgagtgttacagctcttaaggcggcgcttctggagttgttggttcctcctggtgggctcgtggtctcgctggcttcaggagtgaagctgcagaccttcgcagtgagtgttacagctcataaaagcagtgtggaccccaagaactcaggagcccagctggcttcccccagtgaatcccgcacgagagctgcaggtggagctgcctgccagtcccgcgccgtgcgcccgcactcctcagctcttgggtggtcgatgggactgggcgccgtggagcagggggtggcgctcgttcggggaggctcgggctgcacagaagcccatggagggggtgggaggctcaggcatggcgggctgcaggtcccgagccctgccccacgggaaggcagctaaggcccggcgagcaatcgagcacagcaccggtgggctggcactgctgggggacccagtacactctccgcagccactggcccgggtgctaagtccctcattgcccagggccagcagggctggctggctgctccgagtgcggggcccgccaagcccacgcccacccggaactccagctggccggcaagcgccgcacgcagccccggttcccgctcgtgcctctccctccacacctccctgcgagctgagagagtgggctccagccctggccagcccagaaaggggctcccacagtgcaggggggaggctgaagggctcctcaaatgccaccaaagtgggagcccaggcaggggagaagaattgtggcattcacgatagaagtgggggtgttgagggaagatctgttttgaatggtgatcctactttgaacattttgggtgtagagcagtacgaggccatcaggtatccaggtggagatggcatactgctgagccagcaggaaaaggcaacaggacgaggggcaggatttgccactggaatgtcagcaggccatacctcaggcgttcagctccatggagcaaagacagtagtgatcacgttccttgacaacagtgctagtgtgcggggagcttttagttttccttttctctgctccttgaaccaagaatccagcatcagcatcagcatcagcatcagcatcagcatctgctcagctgtaggccatgattgtctgtactgtttaccagcagctcatgtaatatgcttgatgtaa

SEQ ID NO: 128484 - DNA, 1686 bp, Homo sapiens
atggtcgtcacgcctggaatcccagcactttggggggccgaggcgggtggatcgcctgagacagccacaaccaaagtcccggagatccgtgatgtaacaaggattgagcgaatcggtgcccactcccacatccggggactggggctggacgatgccttggagcctcggcaggtagagcagaggaggctggggtgtgagggcctctccatgaaggtcttgggtaccgccctgccgggctatttttacgcgcggacaccggacaccggacaccgggctggggcggcggcggcggcggcgcaggcggccgaggcggggccgcaccggggccgggcgtcggggccacacgtcggttcgcgggtcgccggggctgcgcgcgccatggagccgcggtgcccgccgccgtgcggctgctgcgagcggctggtgctcaacgtggccgggctgcgcttcgagacgcgggcgcgcacgctgggccgcttcccggacactctgctaggggacccagcgcgccgcggccgcttctacgacgacgcgcgccgcgagtatttcttcgaccggcaccggcccagcttcgacgccgtgctctactactaccagtccggtgggcggctgcggcggccggcgcacgtgccgctcgacgtcttcctggaagaggtggccttctacgggctgggcgcggcggccctggcacgcctgcgcgaggacgagggctgcccggtgccgcccgagcgccccctgccccgccgcgccttcgcccgccagctgtggctgcttttcgagtttcccgagagctctcaggccgcgcgcgtgctcgccgtagtctccgtgctggtcatcctcgtctccatcgtcgtcttctgcctcgagacgctgcctgacttccgcgacgaccgcgacggcacggggcttgctgctgcagccgcagccggcccgttccccgctccgctgaatggctccagccaaatgcctggaaatccaccccgcctgcccttcaatgacccgttcttcgtggtggagacgctgtgtatttgttggttctcctttgagctgctggtacgcctcctggtctgtccaagcaaggctatcttcttcaagaacgtgatgaacctcatcgattttgtggctatccttccctactttgtggcactgggcaccgagctggcccggcagcgaggggtgggccagcaggccatgtcactggccatcctgagagtcatccgattggtgcgtgtcttccgcatcttcaagctgtcccggcactcaaagggcctgcaaatcttgggccagacgcttcgggcctccatgcgtgagctgggcctcctcatctttttcctcttcatcggtgtggtcctcttttccagcgccgtctactttgccgaagttgaccgggtggactcccatttcactagcatccctgagtccttctggtgggcggtagtcaccatgactacagttggctatggagacatggcacccgtcactgtgggtggcaagatagtgggctctctgtgtgccattgcgggcgtgctgactatttccctgccagtgcccgtcattgtctccaatttcagctacttttatcaccgggagacagagggcgaagaggctgggatgttcagccatgtggacatgcagccttgtggcccactggagggcaaggccaatggggggctggtggacggggag

SEQ ID NO: 128485 - DNA, 763 bp, Homo sapiens
caccacctccccttcgatgatctccgtctcctccgtgatgcgaacgccgatggaaccgccggaaaggcctgcgtcagcgcctcggtcttgctacatctgcgggaaaaagtatttcccgtgccgccgatgacatgtaatgggcgtgtcaaggacccagggcctggcgccatgcccatggcgatggccgtcttcccccgtgcccggctggccagcaataaggactgcccgaccggcaatcttcccttcccggatcatctccagcaccacgccatgccgcccgccgtgccgccagctgacccaccatgccttgcgaagcctgccgaggctccaaggcatcgtccagccccagtctccggatgtgggagtgggcaccgattcgctcaatccttgttacatcacggatctccgggactttggttgtggctgtaacggttgccatgatgctcaccaactgccagagtcctagcggaaacggaaacgcgcgaggagcgagatgttctggctcctctaggctagctggttcttcaaagatctcgatggttcctcataaatatgtaaatattgtgggggcgtggcgggactttatgccccgccctcccaccgaggctgcgctggaagacgggcgtccggaactcctgggtccattcccaatgtctcctggctcctcctccttttgctcagccccaccaccgccccgctcaggccgattgcaaaattcttagctgttctttgagtaaccacacgtcctccacgccctcgtgcc

SEQ ID NO: 128486 - DNA, 1216 bp, Homo sapiens
tttttttttttttttttttgagatttcccaggactggctttaatttgaaaaatctgattggggtctcttcccgtatcaaagaaggaacagcccaagctatgaccccagggccagggaattcagtccccaccagaccctgtcattccatcactaggggggtaattcaagggctccccccttgccgagccctgaaacgaggaggcacggatgtgaagttgcccaggaactagattctgtctctccaaaagtggcccaagccctgttctctgtactagggaagccagctgtgtcttttcgaggacagttggtccagccagcaggctcagttcagataccagacaaccattccagcacgagggctcagcggccttgggccccggcggtcgctcccagttgcctgtgtgcccaccagcacatccatgaggtagtccaattcggcctcgtccaagctccggagcttcctcctttgcccgggcccatccttcagggcctggtttgaggccctccagaggctggtgcccaaaagttcattgtcatacatagaggtgtcaatatcctcaaacaggccctcaagcccatcgtccagtagacagccagtggctgggcccagcaggtccaaggcacccaggctgggcgctgctcccccgatgctactggcctgtgggcccctcgtctgccaagggttggggagcctgactcaggccctcaatgtggctgaggtcctccaggaggctggccatggaggctgaaagggcagcgtccgagcttgccagtaagttagtcagccacactgggggctgcaggtgggctaggcacaggtggcaaggccacccccgggttcaaaggaccccctgaatgccccgcagagtgttcacgactcagactcaggtgccgcaaggtccggcttcactctgctgcaggcttgtggtggagcttgagcactgagaggtcaaagagggagcttagaggccacggccgggggtgcctgtgccaccgctgcgtggccaggatctagccaccaggagtcgactgccagaggttccttctcctcctcctcctcccgtttccgcttcagacccttgctcagcatcttgctcactagcggccaatcagaacgaagaggtagccacccacaaccaatcaggaaacggcggcggcagcatcgcttgttggctgtcctccggaaacccgcgcctgggtcgcgcccacgcgtccg

SEQ ID NO: 128487 - DNA, 1177 bp, Homo sapiens
gtatctttggacaccatagtttaatttggtttacatgtcgcacgtctctgatgagggagccctttctgaatccgcatcagccacagcagcttcttggcctcctcatggctttttgcagcattttgttccagggagaccacaggtgccaatttgtttataccttctagggcaaaagactggatgacatatggctccactcttaaggcaggtaacaggatcgcctataccaccaaaaacacctggaagaggcatcaggaatatgaagaggaacgagaagaggagatacaagaccctcatggctgatggctgggagcttcaccaggagctgagtctggggaggacatcaagccttccaccttataaaggtcctggtccctggtcaccaggcttccagaaggttagcaaaggtgctaatccagtggaaatcaagagaggtgtgatgttagctgttgatgctgtaattgctgaacttaaaaagcagtctaaacctgtgaccaaacctgaagaaattgcacaggttgctacaatttctgcaaatggagacaaagaaattggtaacatcatctctgatgcaatgaaaaagtgtggaagaaagggcatcatcacaaaaatttctagtgtccagtccattgtaactgctcttgaaattgccaatgcttactgtaagcctttggtcataattgctggagacattgatggagaagctctaactacactcatcctgaataggctaaaggttggtcttcaggttgtggcagtcaaagctccagggtttggtgacaatagaaagaaccagcttaaagatacggttattgctactggtggagaagttggagaggtcactgtgatcaaagattatgccatgctcttaaaaggaaaaggtaacaagtctcaaattgaaaaatgtgttcaagaaatcattgaccagtcagatgtcacaactagtgaatacgaaaaggaaaaactgagtggagaaactttcagatggagtagctgtgctgaagagtcatccttggagcttctgcacaaagatttaccccctgacctgagcaccaggacaggaaccataggtgctcagatagcaaactgggaggagagaagcacaaaacaaaagtgtgcccatggacattgcaataaagtataccaggaagttcttggaattcttcagagagtttag

SEQ ID NO: 128488 - DNA, 764 bp, Homo sapiens
ctaccactgctactgtactggcacgctctatagccaaggaaggcttcgagaagattagcaaaggtgctaatccagtggaaatcaggagaggtgtgatgttagctgttgatgctgtaattgctgaacttaaaaagcagtctaaacctgtgaccacccctgaagaaattgcacaggttgctacgatttctgcaaacggagacaaagaaattggcaatatcatctctgatgcaatgaaaaaagttggaagaaagggtgtcatcacagtaaaggatggaaaaacactgaatgatgaattagaaattattgaaggcatgaagtttgatcgagggttatatttctcatccttttattaatacatcaaaaggtcagaaatgtggaatttccagggatgcctatgttctgttgagtgaaaagaaaatttcttagtatccagtccattgtacctgctccttgaaattgcccatgctcaccgtaagcctttggtcataatcgctgaagatgttgatggagaagctctaagtacactcgtcttgaataggctaaaggttggtcttcaggttgtggcagtcaaggcttccagggtttggtgacaatagaaagaaccagcttaaagatatggctattgctactggtggtgcagtgtttggagaagagggattgaccctgaatcttgaagacgttcagcctcatgacttaggaaaagttggagaggtcattgtgaccaaagacgatgccatgctcttaaaaggaaaaggtgacaaggg

SEQ ID NO: 128489 - DNA, 3288 bp, Homo sapiens
atgaaactcatggaaacacttaaccagtgcataaacgctggtcatgaaatgacgaaggctatcgccattgcacagtttaatgatgacagcccggaagcgaggaaaataacccggcgctggagaataggtgaagcagcggatttagttggggtttcttctcaggctatcagagatgccgagaaagcagggcgactaccgcacccggatatggaaattcgaggacgggttgagcaacgtgttggttatacaattgaacaaattaatcatatgcgtgatgtgtttggtacgcgattgcgacgtgctgaagacgtatttccaccggtgatcggggttgctgcccataaaggtggcgtttacaaaacctcagtttctgttcatcttgctcaggatctggctctgaaggggctacgtgttttgctcgtggaaggtaacgacccccagggaacagcctcaatgtatcacggatgggtaccagatcttcatattcatgcagaagacactctcctgcctttctatcttggggaaaaggacgatgtcacttatgcaataaagcccacttgctggccggggcttgacattattccttcctgtctggctctgcaccgtattgaaactgagttaatgggcaaatttgatgaaggtaaactgcccaccgatccacacctgatgctccgactggccattgaaactgttgctcatgactatgatgtcatagttattgacagcgcgcctaacctgggtatcggcacgattaatgtcgtatgtgctgctgatgtgctgattgttcccacgcctgctgagttgtttgactacacctccgcactgcagtttttcgatatgcttcgtgatctgctcaagaacgttgatcttaaagggttcgagcctgatgtacgtattttgcttaccaaatacagcaatagtaatggctctcagtccccgtggatggaggagcaaattcgggatgcctggggaagcatggttctaaaaaatgttgtacgtgaaacggatgaagttggtaaaggtcagatccggatgagaactgtttttgaacaggccattgatcaacgctcttcaactgctgccccgatggtggattcgttaattgcgcgcgtaggagtaatggctcgcggtaatgccattactttgcctgtatgtggtcgggatgtgaagtttactcttgaagtgctccggggtgatagtgttgagaagacctctcgggtatggtcaggtaatgaacgtgaccaggagctgcttactgaggacgcactggatgatctcatcccttcttttctactgactggtcaacagacaccggcgttcggtcgaagagtatctggtgtcatagaaattgccgatgggagtcgccgtcgtaaagctgctgcacttaccgaaagtgattatcgtgttctggttggcgagctggatgatgagcagatggctgcattatccagattgggtaacgattatcgcccaacaagtgcttatgaacgtggtcagcgttatgcaagccgattgcagaatgaatttgctggaaatatttctgcgctggctgatgcggaaaatatttcacaacggagtaacctcggtgtgcggttgtatgcctgctgtggattgctgctgtgtcctgcttatccacaacattttgcgcacggttatgtggacaaaatacctggttacccaggccgtgccggcacgttaaccgggctgcatccgatgcaagtgtgtcgctgtcgacgagctcgcgagctcggacatgagtccttggatagctggggcacctctgaagacgctgacgctccttctaagcgacactcaacctctgacctctcagatgcgaccttcagcaatatcaggagagaagactggttgtattataagcagattctcaccaagaaggggaagaaagcgggcagcggcctgcgccagtggaagcgggtgtatgccgcgctgctggcgcgctcgctctcgctgagcaaggagcagcgggagcccgggccggcggcggcgggggctgtgggggccggcgcaggtgaggacaaggcggcgcccgtctgcatcggctcctgcctcgtggacatctacagcgagaccaagaggaggcacgtgttccggctgaccaccgctgacttctgtgaatatctctttcaggctgaggaccgggatgacatgctggggggatcagagcgatccgggagaacagcagggccgagggcgaggtttcggtgtgacaagggtgcaagggcagggctcatggaggacctggcgtcctcgggtgcggggaccagcagtcaccatcctgaccctaatgatgacagggattattgtgactgtgaccccggctgtgccaaccaagctctgatcagcaagaagcttaatgattatcgcaaagtgagccatagctctgggcccaaagctgattcctcccccaaaggctctcgcggcctggggggcctcaagtctgagttcctcaagcagagtgcggcacgtggcctcaggactcaggacctgcccgcagggagcaaagatgacagtgctgcagcccccaaaaccccctggggcatcaacatcatcaagaaaaataagaaggctgtcccaagggcatttggggtcaggctggaggactgccagccagccacggagaaccagcatgtccccttaatcgtggctgcatgctgtcacattgtggaggcacgagggctggagtccacaggcttttaccgagtgcctggcaacaatgcagtggtgtccagcctacaggagcagctcaaccgtgggcctggtgacatcaaccagcaggatgagcgctggcaagacctcaatgtgatcaacagcctgctcaagtccttcttccaaaagctgcccgagcctcttttcactgatgacaaatacaacgacttcattgaggccaactgcattgaggacgcgcgggagtggatgaggacgctgcggaagctgatccgggatctcccaggacactactatgaaacactcaaattccttgtgggccatctcaagaccatcgctgaccactctgagaaaaacaagatggaaccccggaacctggccctggtctttgggcggacactggtgaggacgtctgaggacaacatgacagacatggtgacccacatgcctgacctctacaagatcgtggagacactgatccagcacgcccctgtgggcagcaaggagcctcaggcagtgcccaacattgagtacctcctgcccaacattggcaggacagtgccccctggtgacccggggtcagcggacctgttggagatttaa

SEQ ID NO: 128490 - DNA, 422 bp, Homo sapiens
ccatagctctgggcccaaagctgattcctcccccaaaggctctcgcggcctggggggcctcaagtctgagttcctcaagcagagtgcggcacgtggcctcaggactcaggacctgcccgcagggagcaaagatgacagtgctgcagcccccaaaaccccctggggcatcaacatcatcaagaaaaataagaaggctgtcccaagggcatttggggtcaggctggaggactgccagccagccacggagaaccagcgcgtccccttaatcgtggctgcatgctgtcgcattgtggaggcacgagggctggagtccacaggcatttaccgagtgcccggcaacaatgcagtggtgtccagcctacaggagcagctcaaccgcgggcctggtgacatcaacctgcaggatgagcgctggcaagacc

SEQ ID NO: 128491 - DNA, 2484 bp, Homo sapiens
  misc_feature (1)...(2484): n = a,t,c or g
atgtctgtgacaggaggagccaatcccattgcccttgtccagaaagcgggcagcggcctgcgccagtggaagcgggtgtacgccgcgctgcgggcgcgctcgctnctcgctgagcaaggagcggcgggagcccgggccggcggcggcgggggctgcggcggccggcgcaggtttcggggtgaggagggtgcacaggcagggctcacgggggacctggcgtcctcaggtgcggggaccggcagtcaccatcctgaccctaatgatgacagggatgattgtgactgtgttaggatcgccttgagcaggctccggtgtggagtggaccccggctgtgccaaccaagctctgatcagcaagaagcttaatgattatcgcaaagtgagcctgagcgacagagaccctatctctaaagaaacaaagttctatggcttccgccttgtagttttggcccacgagccacacggaagtccttgcattgctctgggcctctcctttgggatgacagtgctgcagcccccaaaacccccntggggcatcaacatcatcaagaaaaataagaaggccgctccgagggcgtttggggtcaggctggaggagtgccagccagccacggagaaccagcgctggcaagacctcaatgtgatcagcagcctgctcaagtccttcttccgaaagctgcccgagcctcttttcactgatgaagaacttccattggctccctctttctgtcctgaggaagagaatggaggccgtggaggaggaccctccccccggtaccgcctggagcccatggacaccatctttgtcaagaatgtgaaggaagacggccctgcccatagggcggggcttcgcacaggagaccggctggtaaaggtgaatggggaaagcgtcattgggaagacctactctcaggtcatagctctgatccagaatagtgatgacactctggagctgtctatcatgcccaaggacgaggacatcctccagctgccagccgagagagagtcgggtggggaggcctccgagccacccagggttgtacggccggaacccagcacccgggccctggagcctcctgcggaggatcgcggcgatgaggtggtcctgaggcagaagcccccgacgggccgcaaggttcagctgacccccgcaagacagatgaaccttggatttggtgacgagtccccagagccagaggccagtgggcgaggggaacgcctgggcaggaaggtggcccctttggccaccaccgaagactctctggcttccatcccctttattgatatttgtgtcaggccctgtgcatggctccatgctctcctggactggatggcccagcagagggtgttggacatgcagggacaatccattgggatgggcgtgtcgtgggacagggagcttgaggagaagggctcagagaagggctatgatgagcccaccagccccagcattgacctccaagccaagcacgtccctgcctctgctgtggtctccagtgccatgaactcagcccctgtcctgggcaccagcccatcttccccgaccttcactttcaccctcggacgccattactcgcaggactgcagcaccagtgctcatttgaatatatttgctggaatatttgatatctccaatgaccatctccaggtttctacattggaatccaacttcacaagaatccacttgacccactatactggaggaaacttccctgcatggctagcctgggatgctgtgcccttctcttctgacctgctgaaccttggtgtccatgtcctggagacgggggcagggaccccttttctgggatcagcatgcagctcagatggtattgcctcccaaatgaacacagctgggctaccccagatccgggatctcccaggacactactatgaaacgctcaaattccttgtgggccatcctcaagaccatcgctgaccattctgagaaaaacaagatggaaccccggaacctgggccctggtctttgggccgacactggtgaggacgtctgaggacaacatgacagacatggtgaccccacatgcctgaccgcttacaagatcgtgggagacactgatccaagcacttcagactggttcttcagtgacgaagaggtacaagggaaaagagaacccctgtgggctgacaaggagcctcaggcagtgcccaacattgagtaccttcctgcccaacatttggcaggacagtgccccctggcgacccggggtcagcggacctgttggagatttaaaggattctaccacctgtagttcagccaagtccaagggttcgtgggcccccaagaaggagccgtacgcccgggagatgctggcgatctccttcatctcggccgtcaaaccgcaagcgcaagaagcggcgggagacgcgggggctgggcagcagcaccgacgacgactcggagcaggaggcgcacagagcctggggcgggggccacagcgccggggacatcaggagcggtcgc

SEQ ID NO: 128492 - DNA, 1533 bp, Homo sapiens; identical to SEQ ID NO: 128463

SEQ ID NO: 128493 - DNA, 756 bp, Homo sapiens
ctaagtacctgataaatggggttggtgtttattcatgagcaggtacttggagacggcgattagaacagccgcctgcgctgcctcgccaaggtacttaaatccgggcaggtgcagcgcggcgcgcggccccagctcacaaagcccgcggccgccgtggagcgggcacaagaagcgaacggcatcaccaggctggggtggacagagcgcggcctcccctatgccgccctcaagatcatggccggcctcggtagggggccccgaatttaggctctcagagacaccttccaggccatttactctttcagggatgaagtaggggtggcaagtgcactcctgggcacccgcactcttctgctctgtgatgtctttctctccagacacatgctgcttatgcaaataggcccattcacagccctgttccccatcccccagcacggtgatacttctgcgagagacttcttctaactgggattggcagccagaggatttgggagctcctaaagcctctgccagcccgccccccagcaccacaaggatcaccagattaaggagctcagagctacagctgaggcggctaaacccttcagactcttgccaccggggcttctgcttctcttttcgctgtcttctgactccagagcatgtcctgccaaaaactgtactcaggatccaacctgggtgcaaggtagcatgagaaccagggtaaaattctagccttcgtgctctgaacagcatctgatttcttctgggatgcat

SEQ ID NO: 128494 - DNA, 757 bp, Homo sapiens
tcttggctcccagtttccttctgggcagacattgcccctctgccctgaggacctgcttgtttgggggaagaggcctttagaggcaccagggtcatgccaggtgttggacatggtgaactgggaagtgctctccatctggccacagcgcagaagtatcaccgtgctgggggatggggaacagggctgtgaatgggcctatttgcataagcagcatgtgtctggagagaaagacatcacagagcagaagagtgcgggtgcccaggagtgcacttgccacccctacttcatccctgaaagagtaaatggcctggaaggtgtctctgagaggacggaaggtggccggaagagccccgtcccagctcagatgggcttccccgccatcttccggacaaagtgtcaagagcctcctcctcccgccggcgcggcgcctgtgccctggtcccggtgtccccgctcggtgccaccgaaggatctaggggctcgggccggggagggggtggaggggggagtggaggcgcgatacgaacccgtgggagcctccccaaccccgcagtcccagcggcaaactgtgcttggtcggacggatgcccgcgcggagctccacggcggccgcgggctttgtgagctggggccgcgcgccgcgctgcacctgcccggatttaagtaccttggcgaggcagcgcaggcggctgttctaatcgccgtctccaagtacctgctcatgaataaacaccaaccccatttatcaggtacttag

SEQ ID NO: 128495 - DNA, 534 bp, Homo sapiens
cggcacgaggaccattctgagccaacttttttgatctcgccatctttgctttgcttcctcttgccttcggcacccccgctgcctcggctgacgcctatcctctgcagcattacttgtacccgctgttcaaaggatggagccagttctgtttctccccgctccaggggccgccgcttgtcgggtctggcacccagcgttgcctcctcctcggcaggcagcagtatcatcgagtaggccttgctatctcttgtgtagcgaggtcggctcctgccggcagggtcagggctgctggtgtccccctcagccccaccaagctcctcaccacggctgggacgggttggcggccgcagtaggtcgccaaatgtagtttttcgggttcggggagctgccccagggctggtctctagatcagtccgtggaccccgcgttgaacgaggcttcttgaaggcaaagagggtgcccagcttctttcgcagtgtacgggggacaggagtggcgcccccctcagtggccgggtcctcctcgggggcccag

SEQ ID NO: 128496 - DNA, 2143 bp, Homo sapiens
  misc_feature (1)...(2143): n = a,t,c or g
ggaaaggagtgaccatttggtgccgcaaggggaaagtgagtagggaaggctgctccccagggccggacaaaccaagaaagccaggtcttcctcctgcctccatgggtcaggtccagcccttcaccagggctcccccaggtgcctttcccactctaggctcctggaagcaggctggtaggactggatgtgcataaggggcacctctggctggcaggcaggcaggcctggactctcagcaagagagtgggctcaagcagcttggttttggccctctccacagcttgtggggcaaaggcttatgtcccaaaggtgagctgcccaactgggacagagagcccctctggagaggaacagagtaaacaacttggaactcagctgaaaacagtgaagataaggcaacagaaaaatggggaggtggcccatgggtaaccaagtgcgancccaggcagacacccaaccccatgcagcaacacagctgtccccggaagcctcctgggccctcctcaagccactcccacaacctaagctcaggcacccgtccctcatcccctgacacaccccctgaaaggtagcaagcttcctcaagatactgcctggaagggcaacatcagccctggaaccctcatggggtttatctgcccattcggtttcaggactaaatagtgttgcccaaacccacagggataagggatagtcccggctctgctactaatttgctatgtgactttagccaagtcacttaatctcctgggcctgtttccttatttgtagcaagagaggaatgggggagatgttcactgaaccccattccagctgcaaaagcctgtggttttaatccaatcctgctaggctatgatcatttaaacagcctgatgtctccaacttctgggtttgggagctaggtagccccaggctgtcacaagagatgaatttcctttacagacaggacgcctcctaacaggccatggtctatgggtctgccagccccaaggaccaagaaaaagcagcagctataggatcatttcccaaggcagaattctgacagcacagggcccagggccactggccccatcaccagcagttggtccaattcaaacatttttcttgttgcccagctgtgggcccagtgaggcctggtgagcaatgggtatctcaggccacaccaaccattcccatgtccaccaatatggagcaggagcttgcaaagcccagattcaggcagtggactgaaagttcaacttccggccttgccatggctgaccttactctttgcatgggcggcttgtgcactcccctcgcaatgtgaagcacatatgcaaattccagccgtcctgctgctcctctgtgtagacttcctccctttcctcctccagggcagccagtcctctccacaggtgggccaccccaagtccggcaaccatctcagtctttcctttcctgattccccaatggtagcgggacacttttactctgccagctgtaaggatctatctgaaacagctgaagcatcctttctctcagagctgtgcagagatggtgaagatctaggcaggaagaaagcagcccctgtactcaagggcctctgtcctgggaatggagtcttctttccagcagcctgacacacagaagctctcaggacgaaggcagtctctggtctgtccagtctcaagagctaaggattacactccgggatggaggtcctggaccatcctgttgccccaaccacggctccgagctccgcattcgactgctgccccagtgtcttccagttggcagactcagcccctggctccctgggccaggtctgcaggaaggctctgtagggagaaagtgtcagccaagacctggtcaggcattggcgataggtccctcaactcacttgcttcctcttgccttcggcacccccgctgcctcggctacgcctatcctctgcagcattacttgtacccgctgttcaaaggatggagcagttctgtttctccccgctccaggggccgccgctagggacagagatgccgagttggagacagtccgcgccctgggtcccagaagcgccttcaccacccccatcagcaagcctcaccttgtcgggtctggcacccagcgttgcctcccctcggcaggcagcagtatcatcgagtag

SEQ ID NO: 128497 - DNA, 4207 bp, Homo sapiens
ttctgtgagaaagtgccattcagaaagctcgccagcgagaagagagctccacgtcagccctcagaagaaagacgtcaacgaccttactggggagagaaagaaaaggaacgggagctgagagggacagggtctcaccatgtcgcccaggcttgtcttgaactcctggcttaagtgatcctccagcctcagcctctcaaagtactgggattacaggcatgagccaccatgcctggcccagcctcttccctgagaactagcagctgatcacctgcctttccagaccggagacgggcggcaagtttgaagtcgacacccagaggccagtttgtcccccttcccgcgcgcgggcggcccgagcctcggcggcggcggtagcggcggcggcgacgctgacacctcccaccatggacagcttcgacttagccctgctccaggaatgggacctcgagtcactgtgtgtctatgaaccagatagaaatgcattacggaggaaagaacgagaaagaagaaatcaagaaactcaacaggatgatggcacgtttaattctagttactctctcttcagtgagccctacaagactaacaagggggatgaactctccaaccggatccagaacactttaggcaattatgatgaaatgaaagactttttaactgatagaaccaatcagagtcatctcgttggagttcccaaacctggggttcctcagactcctgtgaacaagatcgatgaacattttgttgcagattcaagagcccagaaccagccctcgtctatctgtagcactacaacttccacaccagcagctgtccccgtgcagcagagtaaaagaggcactatgggctggcagaaggctgggcacccaccctctgacggccaacagagagcaacacaacagggctctctcaggaccttgcttggagatggtgttggcagacagcagcctcgggccaaacaagtgtgcaatgtggaggtgggccttcagacccaggagaggccacctgccatggcggccaagcacagcagcagcggacactgtgttcagaactttcctccatccctagcttcaaaacccagcctggtccagcagaaaccgaccgcgtatgtgaggccaatggacggccaagatcaggcccctgatgagtctcctaagctgaagtcgtcttcggaaaccagcgtgcactgcacatcatacaggggagtccctgccagcaagccggagcctgccagagccaaggccaagctctccaagttcagcatccccaagcagggggaggagagtagatctggagaaaccaacagctgtgttgaagaaataatccgggagatgacctggcttccaccactttctgctattcaagcacctggcaaagtggaaccaaccaaatttccatttccaaataaggactctcagcttgtatcctctggacacaataatccaaagaaaggtgatgcagagccagagagtccagacaatggcacatcgaatacatcaatgctggaagatgaccttaagctaagcagtgatgaagaggagaatgaacagcaggcagctcagagaacggctctccgcgctctctctgacagcgccgtggtccagcagcccaactgcagaacctcggtgccttccagcaagggcagcagcagcagcagcagcagcggcacgagcagctcctccagcgactcagagagcagctccggatctgactcggagaccgagagcagctccagcgagagtgagggcagcaagcccccccacttctccagccccgaggctgaaccggcatcctctaacaagtggcagctggataaatggctaaacaaagttaatccccacaagcctcctattctgatccaaaatgaaagccacgggtcagagagcaatcagtactacaacccggtgaaagaggacgtccaggactgtgggaaagtccccgacgtttgccagcccagcctgagagagaaggagatcaagagcacttgcaaggaggagcaaaggccaaggacagccaacaaggcccctgggagtaaaggcgtgaagcagaagtccccgcccgcggccgtggccgtggcggtgagcgcagccgccccgccacccgcagtgccctgtgcgcccgcggagaacgcgcccgcgcctgcccggaggtccgcgggcaagaagcccaccaggcgcaccgagaggacctcagccggggacggcgccaactgccaccggcccgaggagcccgcggccgcggacgcgctggggacgagcgtggtggtccccccggagcccaccaaaaccaggccctgtggcaacaacagagcgagccaccgcaaggagctgcgctcctccgtgacctgcgagaagcgccgcacgcgggggctaagcaggatcgtccccaaatccaaggagttcattgagacagagtcgtcatcttcatcctcctcctcggactccgacctggagtccgagcaggaggagtaccctctgtccaaagcacagaccgtggctgcctctgcctcctccgggaatgatcagaggctgaaggaggccgctgccaacgggggcagtggtcctagggcccctgtaggctccatcaacgccaggaccaccagtgacatcgccaaggagctggaggagcagttctacacactggtcccctttggccggaacgaacttctctcccctctaaaggacagtgatgagatcaggtctctctgggtcaaaatcgacctgaccctcctgtccaggatcccagaacacctgccccaggagccaggggtattgagcgcccctgccaccaaggactctgagagcgcaccgcccagccacacctcggacacacctgcagaaaaggctttgccaaaatccaagaggaaacgcaagtgtgacaacgaagacgactacagggagatcaagaagtcccagggagagaaagacagctcttcaagactggccacctccaccagtaatactttgtctgcaaaccactgcaacatgaacatcaacagtgtggcaataccaataaataaaaatgaaaaaatgcttcggtcgcccatctcacccctctctgatgcatctaaacacaaatacaccagcgaggacttaacttcttccagccgacctaatggcaacagtttgtttacttcagcctcttccagcaaaaagcctaaggccgacagccagctgcagcctcacggcggagacctcacgaaagcagctcacaacaattctgaaaacattcccctccacaagtcacggccgcagacgaagccgtggtctccaggctccaacggccacagggactgcaagaggcagaaacttgtcttcgatgatatgcctcgcagtgccgattattttatgcaagaagctaaacgaatgaagcataaagcagatgcaatggtggaaaagtttggaaaggctttgaactatgctgaagcagcattgtcgtttatcgagtgtggaaatgcaatggaacaaggccccatggaatccaaatctccttattacctgatgtattcagaaacagtagagctcatcaggtatgctatgagactaaaaacccactcaggccccaatgccacaccagaagacaaacaactggctgcattatgttaccgatgcctggccctcctgtactggcggatgtttcgactcaaaagggaccacgctgtaaagtattcaaaagcactaatcgactatttcaagaactcatctaaagccgcccaagccccatctccgtggggggccagtggaaagagcactggaaccccatcccccatttctcccaacccctttcccggcagctccgtggggtctcagggcagcctctccaacgccagcgccctgtccccgtcgaccatcgtcagcatcccacagcgcatccaccagatggcggccaaccacgtcagcatcaccaacagcatcctgcacagctacgactactgggagatggccgacaacctggccaaggaaaaccgagaattcttcaacgacctggatctgctcatggggccggtcaccctgcacagcagcatggagcacctggtccagtactcccaacagggcctgcactggctgcggaacagcgcccacctgtcatagggacctcaccctggggccagagtgggctctggtctccacagatggctcaacgtttttggacactgtgctactgaaactcccagccacagcatttatagactgcggtgaacatttcctca

SEQ ID NO: 128498 - DNA, 1326 bp, Homo sapiens
atgggtccttgttccttctcaattgcttctcctggggctaagggacaagaaaaggaaacagtcctgttggagcaaggaggcagagttgtggacctgcttataattggaggcctggccccaagcctctcccattggctgaactcaaccagaagtcctgccagcacaatgcattttgcagagggcagcctactactggggcacacaccgaacagagcagaggaagggagagaagtgatctgggtggggagcaagcagacagcaaccaatgcaaagtccttccaagaagagctcaccctggagctgaagcagaagtatggaggaaaacgcgcgggcggcccgagcctcggcggcggcggtagcggcggcggcgacgctgacacctcccaccatggacagcttcgacttagccctgctccaggaatgggacctcgagtcactgtgaagaaagctacaccaggaaaggagaagagtccagatacacccagacacatcacttctgtaaaaagctttgcagtttatgacctgctttggcagcaaccgtgcccctgtgggaggatgggtattgactgggctttccatgttacagctgaggaaactgaagctccaggatgtcacaacttgcttgagcgtgtcaagccgctggccatggcagggatgtctgcatggggcagatggtggcaggcaggctcctctgagtcttcccaggcagctcaggggcagcgaggacctcatacaaatgcacagtggccagacacagcccagagagaacaagaagtgcaaggaacagaagcttcagaaccacttaattcttcagcccaaggatcccatcatggacgaaattctctgcatctggccactttgccttccagcacattgattcttcttctgaggcccctcaggaagaaatttagaacaaacaacggtggtcagagtttagtccgcagtttcctcttatctgaggtctataggccagcagatccatttgaactgtcagagacaaaaactgacagagacaaagaacacccaatccagccttctcatgttgcaaaggaagacgttgaggctagagacaaggagcgcctcactccagggccccagaaaggtctccaactccctaggacagtggacaggctggggggaggggcacaagtactgaagttcttcgccagaggatactgtcagagagcccaaggcggagatggtccctatgccccatgtttccatggaaacataggaggagtgatgacagtcagcacagccacaccatctgctcgggacctggtgaatgatgaaaaaatacagaaagaaaggcacctcgaatcctag

SEQ ID NO: 128499 - DNA, 710 bp, Homo sapiens
ctgcagcgcggcagggggcagctcgcaaacctgtggcggtgacgtgagccccgccaacccggaaacggcggcggcggcggcaccggaggctccgaggctcctgcgctcccgcgccgcgctcccctcgcccgcccgggccgccaggcccagtcccagggcgcaaggctacttgcgtcagcagcgtgccgaagcaagatagcggaatcaggaagagagccggccggaagacacctgccctggccggaagatacgtacccctgaagatcgagaaagaggccatccggggttccaaccgatacaaaaactttacattgaagacatcagggtcagctgatggtggctttgtaaggtgtattaaagggacttgcgtcccagtctgtaggccgtgggagccagcggaggatttgtgtactagaaacggtggggccgggcgcgatggctcacgactgtaatcccagcactttgggaagccgaggcaggtggatcacttgaggccaggagtttgagaccagcctggccaacatggtgaaaccccatctcttctcaaaatacaaaaattaactgggcgaggtggcgcctgcctgtggaatcccagctacttaggaggctgaggcaggagaatcgcttgaacctaggaggtggaggttgcagtgagccaggatcgtgccactgccctccagcctgggcgacggagcgagactcagtctcat

SEQ ID NO: 128500 - DNA, 411 bp, Homo sapiens
cccgtgcggtggaattcgaggagggaaggagatgaacgagattaagacccaattcaccacccgggaaggtctgtacaagctgctgccgcactcggagtacagccggcccaaccgggtgcccttcaactcgcagggatccaaccctgtccgcgtctccttcgtaaacctcaacgaccagtctggcaacggcgaccgcctctgcttcaatgtgggccgggagctgtacttctatatctacaagggggtccgcaagggctcattgtcatccccaagccaggccagttctccaggtggaactgtagtgtagcgacctcactgctgcgcgcacagtctcccgggacttggactcgagggagtgacgaggaggagctccgagctgcgcctgagccgtgccagccggcggacctcagg

SEQ ID NO: 128501 - DNA, 477 bp, Homo sapiens; identical to SEQ ID NO: 116548
  misc_feature (1)...(477): n = a,t,c or g

SEQ ID NO: 128502 - DNA, 401 bp, Homo sapiens
  misc_feature (1)...(401): n = a,t,c or g
ccctctgcctggccaccaccaagtctgggaggtgtacccaacagctcattgagaacgggccatgatgacaatggcggttttgtggaatagaaaggggggaaaggtggggaaaagattgagaaatcggatggttgccgtgtctgtgtggaaagaagtagatatgggagacttttcattttgttctgtactaagaaaaattcttctgccttgggatcctgttgatctgtgaccttacccccaaacctgtgctctctgaaacatgtgctgtgtccactcagggttaaatggattaagggcggtgcaagatgtgctttgttaaacagatgcttgaaggcagcatgctccttgtttctttgttcacttgtttatctgctgaccttccctcnactattgctcgtgcc

SEQ ID NO: 128503 - DNA, 220 bp, Homo sapiens
tctttgggtccacgctgcttttatgagctgtaatactcactgcgaagatctgcagcttcactcctgagcccagcaagaccacgagcccaccgggaggaacaaacaactccagacgtgctaccttaagagctgtaacactcaccgtgaaggtctgcagcttcactccgtgagggtctgcggcttcattcttgaagtcagtgagaccaagaacccaccaatt

SEQ ID NO: 128504 - DNA, 1050 bp, Homo sapiens
ttagaagtccccatgatctgctgtctgaaagctggacaccccaaacagccactggcatagctcaaaggccaaagagccaatggggtagatcccagtttgggtctgaagccctgagaaccagaaacaaggatagacccactgtcttggaattccagccagctgccagtagcagcattgcatctccctgggatgagctccgtgggggcagggcaggcgatctgcaatctttgctgtttgggtgaccttgtcagtccttccagccttccggctttggaaaggacaggcccacctccctggaacagaggtcccaaagggagaggcaggctgccatctttgctgtttcacagccttcactggtgatacctccaggtactggaaaatctgaggtgaatgcagacaggagcaggcccccagcatactgcagcaacctaggcagatactccgggcctgggcctccttcactggtgatacctccaggtactggaaaatctgaggtgaatgcagacaggagcgggcccccagcatactgcagcaaccatttcccctctgcattgccctagtagaggtcctccatgaggtctctgtccctgcagcagacttctgcctggacatgcaggcatttccatacatcctttgaaatccaggtggaggttcccaaatcttaactcttgccttttgtgcacctgcaggcccaacaccacgtggaagccatgtcttggggcttgcaccctctgaagcactgacctgagctgtacctttgcctcttctcaccacagcaggagtttttgggtccacactgcttttatgagctgtaacactcaccgcgaaggtctgcagcttcactcctgaagccagcgagaccacgagcccaccgggaggaaagaacaactccagacgctctgccttaagagctgtaacactcaccgggaaggtctgcagcttcactccagaaggaagaaactccgaacacatctgaacatcagaagggacagactccagacgcgccaccttaagagctgtaacactcaccgcgagggtccgcagcttcat

SEQ ID NO: 128505 - DNA, 942 bp, Homo sapiens
ttagtatttgttaaggttttgcatgtcagaacgtcgatattgcccaagacgtctgggtaaaaacttcttcagggtccttagtgctgattttttgtcacaagatgttaaatttctcatcagttgtttaggctggccaccacagtcctgtcttttcgggaagatctgcagcttcactcctgaagccagcgagaccacgagtccaccgggaggaacgaacaactccagacgtgctgccttaagagctgtaacactcaccgcgaaggtctgcagtttcactctctttgggtccaggctgcttttatgagctgtaacactcaccgggaagatctgcagcttcactcctgaagccagcgagaccacgagtccaccgggaggaacgaacaactccagacgtgctgccttaagagctgtaacactcaccgcgaaggtctgcagtttcactctgatatttatcccagcaaatccctccagtttttggagttttctcctcacatctggggctgcctgagccacaaatgccaaattaagagcacggctattttcaggggacgctgggtcaaaaggggtgtaaatccggtaagcctcctggaggcactctaaaaacgctcctagtgactcttcgggaacctggacgacttcagtcgccttagacaagtttatgggtttccgagaggctcccttaatacccatgaggagataccggtgaaaattgtccaaagctgtccttccacttgaggaatttgggtcccagttaggccgggtagagggaaaggcctcctcaaggaggtctctaccttcctcctcaggcctaccggctgatgcaaggaagtgctttctggcctcttttcggatacgctccctctcctcagaggtaaagagagttaaaaggagctgttggcagtcttgccaggtgggccgatgggtccggagtacggactccat

SEQ ID NO: 128506 - DNA, 3414 bp, Homo sapiens
tcatttctttttcccagtgttttttttgtgttcatgcgtttctgttttgctagttatattctttttccgagatgaggtattaggaacaactgcactagaaggtccacttgtagctggtttgctgcttgctttagtgctctttaaggtagctggtggtgttgggaggatctttgcaggtgtatacgtatttaaagatactttttttctcattattggactggaacgtaaagctgtagaggcatctatgcagccagaagaggtcagctttttacgatgagtacgagcataatcctgtaggttaggtgcgcttgaagaacccccgagcaccgaggtgctaaacaggcccgcacagtgagaccctacagtaggattctgcttctgttccacaagagttcttggtgttctcaggtaattagcattttcagatacaacctgttgccatgagccaaaaatactggatgtgaaagccaatgatttgggggagacaggggaagaagtgatttgttcccctgatctgcgtcttcgacgcccagtacccacaccactggtataatgcagccaggtaccagtaccctctgggctagacacactcagggggctctcttcatcatttgtagccgtcttcctagatcttggaagtggagacttcctgtgtatatgaattggctctgataccattggtttaaacaatatcacagctcgatcaacttcatctcttttagaagtatgtggttcatcatcattatcaattttaaaaggtctcctgccttcattctctctggaagctggtctatatccatagccagatggcaaatttttgtcttcttcacaacctttggctcccggactaaagtgtaattcaacatgaaagcgttcttctgaggaaagatccttattaggatcctcataaagcatgataacaatctgagtcatgtagttgagctcattgacaacgtttaaataatccatagctcgtttccactgttcatcctttgattccatctccttcaccattcctccatcttcattctgagaatcattggtattgcataaggcaccatagcgaagaatagacagcaaagaatgtacatgactttcactggtaaaatataatctagtacgaacatgacgttcaggagacagaacacctctagaatacacaggatgaagtttatttacagtgtcatcatcttgtgtcctctgaaggtctgagcgaatttttctaaccagaggagtacagtagcctttggcaatctccagtttttcagctttagttataccatattcctgagggataacaatatctgctaatgccttcgaaagcctatataattccattgtgttttctaatttcaaggaaccattatgctggacatcatattttatacagtcatatatgtcagggattttactaatatcatatcttccattctttgttttaaagtctttctctaacttggaccatctacgtagcataagctccaatgtttcactatggtaaagctgaatatctgatgatttaggatcttccattcgatgtctgatttgagaagtcaaactctgaattaaggaataaactttatcacaggtcttcacagggtttttaattaaatgcattgatttgataagagaaatgcttccagatggagtaagcttttcataatcttcagcagtaaaatctctgtctttctgaagtatttcatgaagccttgccttcacacgttgctgacaactgctcagagagtcactatcactatccaaaagaccgttcatatttgcacttttcaccatttgaacaagaatgggtgtaagctctccttccaaagctaaaagcccctttgcaaaagcagctgcagtcatctggactcgtccttcatcagaggcatatattttgaggtcatgtctgtaggtgctatgtaatctaagtaaaccacaaccaggaaatcctgcataatctccttgacctccaggatacatacacctgaaggctcttccaagttcttcagcctggaccctgcctgcaggagttaattcacctccccattttagaaccaaaagtaaagatggttcttctcttcggctgtcctcctcttcactagatgttttaggacaaccatgagggagataggtcaactgaaccttacgatttattccagaaaaatgaccatacatctctaatacagtcttaagttgttcaagttttggcttgttttcttcaatttcagaatcattattttgccctagctccataagaagctgtcgtgcaatatctagcacttcttccattttcattttttgttttggtgttcgatccccatgacgtataacagctatgacacatctaagttccatcatagttccagatgtagttggtacaattgggatatcttcagcttctaagggtattgaccatggaatatgaaattgtggagcaagttctcgcattacaatatttccaagtatttttgcacagtcatcataatacttcatggaatttttcacaaaactgaagccattgacatcacagacataggactgtccattggcccgtaacaaatcaaagccacaaactgtttgcttaaaagcaaggcagactttccaagcaattaatttctctcgtgcattgagaataacagggtatcttacttcttttccttcactgtctcgttccaccttgccatcaagtgctggagattttcgagcttcagcatgggcataatctggacccactgtataaaccttaacatcagtaccatctgtgggcataaactcttcatatatatatgagcctgtttttcgtacattgctttctggagaataaacactacttctactgccaatctttctaaagagtctttgacttccaccaccagcagaagttgggtaataaatgtaaacattgtgatcttctgcactgactggcttttctacaaatggcttttgaaaaacttccccatttacttctacatgatcttccccttcaatcagattacattccactccatgggctcctgtgcggcccgagcctccccaacgagcaccaccccctgctccacggcgcccagtcccatcgaccacccaagggctgaggagtgcgagcacacggcgcgtgactggcaggcagctccacctgcagcccgcgaagatctgcagcttcactcccgagcccagcaagaccacgagcccaccgggaggaacgaacaactccagacgcgctaccttaagagctgtaacactcaccgcgaaggtctgcagcttcactccaattccggacacgctagtatccgtatcgttaccaaagccagggacctggaagtcatttttgactcccattgcctctccccagctcaattcatgaccatttctagctattccatctccaacatacatttcaaagccatgcacttcttccat

SEQ ID NO: 128507 - DNA, 1338 bp, Homo sapiens
atggcgcctgaactgagtagtaaggaacaacctgggtcagagtggaagaaggcatgccagatggaggggaccgtgtgtgcaaaggcacaaagagacttgttggatggctttgaccaaaatgccgatgatgatatggacaatgaaatccaggccgaaatggtctcagatggagatgaggaacttgttgggaactggagcaaagaacccaccaccctgggcgctgccacaatggggctgggcacagagaagcagttgggcatggggtgggcaggcagaaaggggcccattgaggacctggagcccctgccccaggctgcctgcaagctccatgcagtggctcatactacatgggaggaggcagtgcagtgtgggagtctgcccaggagaaacagtaacttgctgctggagcagggtgtcctagaggagaccaggaatttgttacaagaacatggtggagaaattgatcttgaaaagaagaggtggctgggcacggtggctcacacttgtaatgccagcactttgggaggccgaggagtgaagctgcagaccttcacggtgagtattacagctcctaaggcagcacgtctggagttgttcgttcctcccggtgggctcgtggtcttgctggcttcaggagtgaagctgcaaatcttcgcggtgagtgttacagctcataaaagcagtgtggacccaaagacccttgggtggtcgatgggactgggcgccgtggagcaggaggtggtgctcgtcggggaggctccggccgcacaggaaccaatggagtgggtgggaggctcaggcatgggggctgcaggtcccggagccctgccccgcgggaaggcagctaaggcccggcgagaaatcgagcacagcgccggtctgtacaagctgctgccgcactcggagtacagccggcccaaccgggtgcccttcaactcgcagggatccaaccctgtccgcgtctccttcgtaaacctcaacgaccagtctggcaacggcgaccgcctctgcttcaatgtgggccgggagctgtacttctatatctacaagggggtccgcaagcctggtccatcaggctctgacatggccagggagcgggcctgcgagtccccggaagagagacaggatctcatcctgttgcctaggctggagtgcggtggcgtgctcatcgttcactacagcctcaaactcctgggctcaaatgatcttcccacttcagccttcctagtggctggaactacagacacagcaaccatccgatttctcaatcttttccccacctttccccgctttctattccacaaaaccaccattgtcatcatggcccgttctcaatga

SEQ ID NO: 128508 - DNA, 1115 bp, Homo sapiens
atgatttccttctgttttctgaaattctcccggcaagtcagtctgcatctgcaattctgcctgctctacctgccagtcaccgatgtccctgctgtctggacgtccctctgccaccggaggtgcctgggccggctcggctcccagtggctgctgcgtctgtgtggcgtccggttcagcatctctccctcttggggagatgggcagggccaacctgagacaggacagagtctagggaaaccaacgcagaagtggaagctgaccttccacctctctatgcacacgggcgacttgagccgactgctgggccctcaggggcaagtgctgtcctgtccacctccagtgagtactgcccagggccacatcccaagatgggccacagaagagtcactagctgtctctccacctgccagtcataaaggagtgaagctggagaccttcgcggtgagtgttacagctcttaaggcggcgcacctggagttgttcattgcgcgcctggagttgttcgttcctcccagtgggcttgtggtctcgctggcttcaggagtgaagctgcagacctttgcggtgagtgttatagctcataaaagcagtgtggacccaaagagtgaacagtagcaagatttattgcaaagagtgaaagaacaaagcttccacagtgtggaaggggaccccactagatacaaaggttctccacgtccccaccagactcaggagcccagctggcttcacctagtggatcccgcaccagagctgcaggtggagctgcctgccagtcctggtgccgtgcgcctgcactcctcagcccttgggtggtcgatgggactgggcgccgtggagcagggggtggcggtcgtcggggaggctcgggccgcacaggagcccatggagtgggtgggaggctcaggcatggcgggctgcaggtcccgagccctgccccgcgggaaggcagctaaggcccggccaacaccctttggtcacatgaataaaagtcaagccctttctttgctcattgctcagcctctgggtattaatctgctgagctggtggccacctaaatacaatcgtcctgttcccctcattggtctctccggtctcctgattccagccacattttg

SEQ ID NO: 128509 - DNA, 850 bp, Homo sapiens
gttttttgtttgtttgtttttttttttttattgattattcttgggtgtttctcgcagagggggatttggcagggtcataggacaataatggagggaaggtcagcagataaacaagtgaacaaaggtctctggttttcctaggcagaggaccctgcggccttcccacagtgtttgcgtccctgggtacttgagatcaagggagtggtgatgactctcaaccagcatgctgccttcaagcatctgtttaacaaagcacatcttgcaccgcccttaatccatttaaccctgagtggacacagcacatgtttcagagagcacagggttggggataaggtcatagatcaacaggaatcccaaggcagaagaatttttcttagtgcaagaacaaaatgaaaaagtctcccatgtctacttctttctacacaagacacagcaaccatccgatttctcaatcttttccccacctttcccccttttctattccacaagtaccgccattgtcatcatggcccattctcaatgagctgttgggtacactcacttctcagatgcggcggctgccgggcggaggggcttctcacttatcagacggggtggctgccaggcagaggcgccccatcacctcccggacggggcggctggccgggcggggagctgaccccccaacctccctcccggacagggcggctggccgggcggggtgctgatccccccacctccctcccggacggggcggctggccgggcggggggctgaccccaccacctccctcccggacggggcggctggcccggcagaggggctcctcacttcccagtaggggtggctgggcagaggtgcccctcacctc

SEQ ID NO: 128510 - DNA, 712 bp, Homo sapiens; identical to SEQ ID NO: 114549

SEQ ID NO: 128511 - DNA, 513 bp, Homo sapiens
  misc_feature (1)...(513): n = a,t,c or g
gaacttgtctttcttctaaagaacaacaatctttaggtcatgcagacctccctgatggcatccagaagtttcaccgaggggtgcagacagtgttgatcattggggatgtcacctcccggatacccacctcactcatgaaagcccccagttatgtgagagttcaagtcagtcggttgtgagagttcaggtctcccgccttcttgctttggccaaattgaatgtatctttctctgctcctaagcgctgatgtgtcaatgtttgccttactgtgaatcgggtacacggacctaaatactggggttctacaatgctgagacctgccgccacctgcttcttaaagcaggttgatccagcactgtattagggggttatgggcaacattatttgaattttttatggtacataaaagncaatatggtttagggtggggttccggtcctggttttttgaccttatataacactggtgganttctaaaagagagaggaataaaagaaggctgaatggaaagaa

SEQ ID NO: 128512 - DNA, 1338 bp, Homo sapiens; identical to SEQ ID NO: 114554

SEQ ID NO: 128513 - DNA, 578 bp, Homo sapiens
cagaaagatggcttagagaagccagcagtctgcaagtctggggaggatggagagtggtttggggttttgggtcggggtctaaggtgatcagatgcagaagcattacaccgtggcctggtttctttactcagcccctggggtagatcccagccccccgcgtaggtccttttgctggaaaaggaagatggagtggtgggacgaatctgaggagtcgttggaggaggagccacggaaggtgctcgcccctgagcctgaggagatctgggtggcggagatgctgtgtggcctcaagatgaagctgaagcgacggcgagtgtcgctcgtgctccctgagcaccacgaggccttcaacaggctgcttggtaggaggacaccccagagagcacctccaatcctgttctttccaaaaacaggaaacttccaataaccacacttttccaatgggaataataggccccagtgggtgagctctccacgtgggaggaatgtgaagtgatcactcatgagggacacttaggagatgataaaggattaggtcaacttgataaaggtcagcgcttgggataagaaagcttggt

SEQ ID NO: 128514 - DNA, 808 bp, Homo sapiens
cggacgcgtggataaaatgcagagtgtgcatgaagctatctgttacaatttgtggcactgatatttcacaaaagaattctgtcccaatctgagcccctgcattgtgccttcaaatcctcctggactgcaagtccgtaagaaacaggacctccaggttccgccccagggaggttggaattcagcaatataaaaagggtggtggtgccgcaggaaagggtggaactggaaacgctcctggtttcttacttttctccaaggactcctagaaggaccccacccccctccccccacccctgctcctatgaggacaacgcgatcactgaattcagctccatcaagaatgagccaggttcttctagatgatctgcacaaatgggttcctctccttctgcctggtgtctgccattagcattgggaataaagttcctgctgaaaatccacatctccccttgggttccggtgttcttggaagcgagagagacaatgtcacacttcaaggaggcagctctctagacaggaaagttattcacgtcccatgtcaattgagaaatgcaattttatctgctgcctttcattctataccctgcttctgaaccatcgtgttcaactgtgaaactcacactttggtgaccacgactccaaaactcacttaatacacccaaggtcagccccagtgatctgcttcatagcaaggactttgggtgggtctgcccagggagtagggcaccctcagagaatgtggctttggactttatcacagctggggccttttgtgtcacttaagatctaaacttgtaaccatgctaga

SEQ ID NO: 128515 - DNA, 1305 bp, Homo sapiens
atgcgcgcgcgactcggggagacgctacagcccggcagctcccgagacacagctgttttggaaaatgctgcctgccttcaacgcctgtttctgactcttgcggtttcccgcatggctcccagcgagacgatccgtccgggatcccatccggctcccatccggaggcgatcccgtgaaaggatcgctgtccagaagaaggccatggacagaacggagactaggttccgtaagaggggacagattaagggaaagatcacgaccagccgtcaacctcacccccagaatgagcagagtccccagcggaccacctcggggtactccctccaggaggtggtggatgatgaagtgttgggatcatcagcccctggggtagatcccagccccccatgtaggtcccttggctggaaaaggaagaaggagtggtcagatgaatctgaggaggagccggagaaggagctcgcccctgagcctgaggagacctgggtagtggagatgctgtgtgggctcaagatgaagctgaagcaacagcgagtgtcacccatcctccctgagcaccacaaggacttcaacagtcagcttgcccctggggtagatcccagccccccgcataggtccttttgctggaaaaggaagagggagtggtgggacgaatctgaggagtcgttggaggaggagccacggaaggtgctcgcccctgagcctgaggagatctgggtggcggagatgctgtgtggcctcaagatgaagctgaagcgacggcgagtgtcgctcgtgctccctgagcaccacgaggccttcaacaggctgcttgaggatcctgtcattaaaagattcctggcctgggacaaagatctgagggtgtcggacaagtatctcctggctatggtcatagcgtatttcagccgggccggcctcccctcctggcaataccaacgcattcatttcttcctggctctctacctggccaatgacatggaggaggacgacgaggaccccaaacaaaacatcttctacttcctgtatgggaagacccgctctcgcatacccttggtccgtaaccgtcggttccagttatgccgttgcttgaacccgagggccaggaagaaccgctctcagatagccctgttccagaaacttcggttccagttcttctgttccatgagcggcagggcttgggtttcccgggaggagttggaggagaacaccggacccaggggagatgtggattttcagcaggaactttattccaatgctaatggcagacaacaggaaagaggagaggaaccatttgtgcagatcatctag

SEQ ID NO: 128516 - DNA, 1564 bp, Homo sapiens
  misc_feature (1)...(1564): n = a,t,c or g
atggacagaacggagactaggttccgtaagaggggacagattacgggaaagatcacgaccagccgtcaaccgcaccgccagaatgagcagagtccccagcggagcacctcggggtaccccctccaggaggtggtggatgatgaagtgttgggaccatcagcccctggggtagatcccagccccccatgtaggtcccttggctggaaaaggaagagggagtggtcagatgaatctgaggaggagccggagaaggagctcgcccctgagcctgaggagacctgggtagtggagacgctgtgtgggctcaagatgaagctgaagcaacagcgagtgtcacccatcctccttgagcaccacaaggacttcaacagtcagcttgcccctggggtagatcccagccccccgcataggtccttttgctggaaaaggaagatggagtggtgggacaaatctgaggagtcggaggaggagccacggaaggtgctcgcccctgagcctgaggagatctgggtggcggagatgctgtgtggcctcaagatgaagctgaagcgacggcgagtgtcgctcgtgctccctgagcaccacgaggccttcaacaggctgcttgaggatcctgtcattaaaagattcctggcctgggacaaagatctgagggtgtcggacaagtatctccttgctatggtcatagcgtatttcagccgagccggcttcccctcctggcaataccaacgccttcatttcttcctggctctctacctggccaatgacatggaggaggacgacgaggactccaaacaaaacatcttccacttcctgtatgggaagaaccgctctcgcatacccttgctccgtaagcgtcggttccagttataccgttccatgaacccgagggccaggaagaaccgctctcacatacccttggtccgtaagcgtcggttccagttacgccgttgcatgaacccgagggccaggaagaaccgctctcagatagtcctgttccagaaacgtcggttccacttcttctgttccatgagctgcagggcttgggtttccccagaggagttggaggagaacaccggacccaggggagatgtggattttcagcaggaactttattccaatgctaatggcagacaccaggaaggaggagaggaaccatttgtgcagatcatctagaagaacctggaccattcttgacagagctgaatacagtgatcacgttgtcctccaaggagcaggggtggggtgggggtacttctaggagtcagttctgcaggctgtacaggaagcatggctggggaggcctcaggaaactgacaatcacggcagaaggcgaaggggaagcaggcacgtttctggccatggtggagcaggagagacagagagagtgaagcaggaggtgctgcatgcttctaaacaaccagatcccatgagcgctcactcacttcttaatattcctttgaaattccttatggcgcacaagtaggcgttaaaaaatacctggtttacgctgactggtggtcctctggtggtatagtggggctnttttctctataaatatttt

SEQ ID NO: 128517 - DNA, 1812 bp, Homo sapiens
ctccctgaagatgcttttggacaatggtctgaggttgggacagtggcaggagataccattcacccaggatctccaggacaagagatcagcctggcagttacatgtgttttttttcaaactggttgccaggttggcatgaacgatgacatcagagattccgaccttcctgattggagggaccggactccgtggtgcctggagatcagttggacaacagtatcttctcagagctgttctctactcctgacttctcctaggcttgagaattgataacatactcttctggatcctagaagtgtccagaagaaggccatggacagaacggagactaggttccgtaagaggggacagattacgggaaagatcacgaccagccgtcaaccgcacccccagaatgagcagagtccccagcggagcacctcggggtaccccctccaggaggtggtggatgatgaagtgttgggaccatcagatgaggggactggtggaagaagaggtgggataggattgactaagacgaaggaagggggccgggagctcgcccctgagcctgaggagacctgggtagtggagacgctgtgtgggctcaagatgaagctgaagcaacagcgagtgtcacccatcctccctgagcaccacaaggacttcaacagtcagcttgcccctggggtagatcccagccccccgcataggtccttttgctggaaaaggaagatggagtggtgggacaaatctgaggagtcgttggaggaggagccacggaaggtgctcgcccctgagcctgaggagatctgggtggcggagatgctgtgtggcctcaagatgaagctgaagcgacggcgagtgtcgctcgtgctccctgagcaccacgaggccttcaacaggctgcttgaggatcctgtcattaaaagattcctggcctgggacaaaggtctgagggtgtcggacaagatcccatcggagcccaccatcctgggagcatcacccaaaacccttcctctggcttctcggatttgcatccgaccttcgaatacccctccatcccgcaatttccaaatgagtacagtcaccccaacactgagctacctggccaatgacatggaggaggacgacgaggaccccaaacaaaacatcttctacttcctgtatgggaagacccgctctcgcatacccttgctccgtaagcgtcggttccagttatgccgttgcatgaacccgagggccaggaagaaccgctctcagatagtcctgttccagaaacttcggttccagttcttctgttccatgagctgcagggcttgggtttccccggaggagttggaggagaacaccggacccaggggagatgtggattttcagcaggaactttattccaatgctaatggcagacaccaggaagaaggagaggaaccatttgtgcagatcatctagaagaacctggaccattcttgacagagctgaatacagtgatcacgttgtcctccaaggagcaggggtggggtggggtacttctaggagtcagttctgcaggcttttaaagggtataaaattttatagcatgaaagatgatattttagtcatacattaatggcccaaaaataatgtcccatctttttactcatcatccctactgtggactaagaattaagtacaagtgggtattatatccaggaaaaatgtcaaaaagcaacctcatcataatcttctaattcacacacaaaggcaacagccagaacaagaattacgctaagtatctgaaacttggtggagccaaagcctctgaagcacaaaacagtcccgtgcttttctgag

SEQ ID NO: 128518 - DNA, 1314 bp, Homo sapiens
  misc_feature (1)...(1314): n = a,t,c or g
tgggggaggattatggattaggcttctggactcgtggttcgtgatgttgtcacgttagaaacagatctagcacggttacaagtttagatctgaagtgacacaaaaggccccagctgtgatgaagtccaaagccacattctctgaagggtgccctactccctgggaagacccacccaaagtccttgctatgaagcagatcactggggctgaccttgggtgtattaagtgagttttggagtcgtggtcaccaaaatgtgagtttcacagttgaacacgatggttcagaagcagggtatagaatgaaaggcagcagataaaattgtatttctcaattgctctgaactctagctagacttgacatgggacgtgaataaccttcctgtctagagagctgtctccttgaggtgtgacattgtctctctcacttccagaacaccggacccaggggagatgtggattttcagcaggaactttattccagtgctaatggcagacatcaggaaggaggagaggagccatttgtgcagatcatctagaagaacctggaccattcttgacaagagctgaatacagggatcacgcttgtcctccaaggagcaggggtggggttggggtacttctaggaaatncaaattttgcagggctgtacaggaagcatggctggnggaggcctcaggaaactgacaatcacggcagaaggcgaaggggaagcaaggcacgtttcttcttaatattcctttgaaattccttatggcgcacaggtagcgtagaaaataactgcttcacgctgactgtggtccctctggggtggggggtagggggttttctgggatgattttcccatcgtgatccaacaccagtcagagtcccaacccttcgctgatacacgggaggtagaaatggtgacatcactcagtgcacaaagtgaggctcagagcttccccccgaaaagccaaagtttcaacccgagttaggtcggcaaactctcgaatcttagatgtgtgatgtttcagagctgaaagagattaaggccttcgaagttttcttcttctaccccacatccattgcctgaaacttcaatgagatccactccatagtccttaagctttagatcaatattagtgggcaccagcatccagactgttttctacaatcttcttcaccgcagtgcttagactcagtactaccggcccagagcaaatctgatggactgacttccgatcaataggtttgatggccttagcaggttctgtactccagctctcagctcgctccaaggatgcaacaccggatccgcctcgggaactggaaaag

SEQ ID NO: 128519 - DNA, 1553 bp, Homo sapiens
atggcgatggtctggatgtgtgcaggacccacgctgcaccaactggaggacctacctggatttctgcaaatcacgctgaaaaaaggggctttatttcctctttggacacacaacgtaaggatgaaagaacaacaatctttaggtcatgcagacctccctgatggcatccagaagtttcaccgaggggtgcagacagtgttgatcattggggatgtcacctcccggatacccacctcactcatgaaagcccccagttatgtgagagttcaagtcagtcggtttgtccagaagaaggccatggacagaacggagactaggttccgtaagaggggacagattacgggaaagatcacgaccagccgtcaactgcacccccagaatgagcagagtccccagcggagcacctcggggtaccccctccaggaggtggtggatgatgaagtgttgggaccatcagcccctggggtagatcccagccccccatgtaggtcccttggctggaaaaggaagaaggagtggtcagatgaatctgaggaggagccggagaaggaagctcgcccctaagcctgaggagacctgggtagaggagatgctgtgtgggctcaagatgaagctgaagcaaccgcgagtgtcatccatcctccctgagcaaccacaaggacctaaacagtcagcttgcccctggggtagatcccagccccccgcataggtccttttgctggaaaaggaagatggagtggtgggacgaatctgaggagtcgttggaggaggagccacggaaggtgctcgcccctgagcctgaggagatctgggtggcggagatgctgtgtggcctcaagatgaagctgaagcgacggcgagtgtcgctcgtgctccctgagcaccacgaggccttcaacaggctgcttgaggatcctgtcattaaaagattcttggcctgggacaaagatctgagggtgtcggacaagtatctcctggctatggtcatagcgtatttcagccgggccggcttcccctcctggcaataccaacgcattcatttcttcctggctctctacctggccaatgacatggaggaggacgacgaggactccaaacaaaacatcttccacttcctgtataggaagaaccgctctcgcatacccttgctccgtaagcgttggttccagttaggccattccatgaacccgagggccaggaagaaccgctctcgcatacccttgctccgtaagcgtcggttccagttataccgttccacgaacccgagggccaggaagaaccgctctcgcatacccttgctctgtaagcgtcggttccagttataccgttccatgaactcgagggccaggaagaaccgctctcagatagtcctgttccagaaacgacggttccacttcttctgttccatgagctgcagggcttgggtttccccagaggagttggaggagaacaccggacccaggggagatgtggattttcagcaggaactttattccaatgctaatggcagacaccaggcaggaggagaggaaccatttgtgcagatcatctag

SEQ ID NO: 128520 - DNA, 507 bp, Homo sapiens
tttttttccatccataaatgttttattgaaatagtaaatgcataacccaagtctgattagaattggatttccagaagcccaatccagtggtcactctacaataacacagggtcttttttttccaaactccaaaccatggtgtgcctgccggggccacacctgtcaggctacacaagcagcagggaccccctgagacctgaacatcagatgtctggctggaggcttcagcaggtcttcaacgccatggccggcagttcctcaaagctaaagctggtgcgtgaatgagctgatcatgatgacagctttataacatgcacctgacagatggcacgttgacagtgaggggagcttctctgggctgggacagagaatggcaaatcaaccatcaccggagcaaggctcttccagcagagctgtgaggcactggttagaaagctgatgaccggctgtaatcttgaacagttacattaattaaaagctgcatctttatcaagcaacacttcccag

SEQ ID NO: 128521 - DNA, 2061 bp, Homo sapiens
atgtgggtacctaacgcgtacagtcaagccgtagtcggggagatcagtgtttacttgatgaggcggcgggcggcgcgtcggcgcagtaggacggagtataatgatgtggtagctaacgcgtacagagtagcagaagtccggcagctcagtgtttacttcatgaggcgcatggcgtccatcatcactgattatatcggaattggtgaggtggggtctttatctctattctcccctcgtgggccggtctacccgcgcatggggccagtagcttgggcgcggcaggcgcttgcggtaagtgccagcttccagcttcacccctaccccacctcccacctctgccctctttcaacccccacagaagaagcctggactacccacagctgcaaattcctgaattccctaattcgaggcaaggacctggtgtcttattcaaatgaatctgtttggcaaaagacccagctctcaaaaccagcctacttacaacagtctagaggggcctgccctggcgagagaatgtctcagggctccactgaagtacagaagagcagtagccaggcctcccagagggtcctgcatgtggggaaggaaaacctttctcagtaccgccttcgactttgccctggtgctgctcagtgtggtttcacccgtgccttccggggactggagatttttgagaatgaagggcagacggtgatcacagatcttgcagggacggcaggcctaaacctggactgtccaggggcgctggcccgtggccaccctgctgctggggtgatacggtccttagtgcgtggctacagacgtgccgcagtcctaccgggaaagatgccagctcatgtcctcaatgagcagctgcagaattgccgccgtctgaaggataaggatgcccaccaacatacgcagtcgcacccttgccgcagtccgcacagtaaagacgctcaccaggtcctccgcagccaaccgcagggtagtgtcacccaggtagctctcagtgccggcttcagcagcaccaggcaatccgcagggctaaggacgcctgccggggtcctccacagctatctgcaggccgtccgcagaggacgacaccagctaggtctcagtgcgcagctgcggcattcctgctatgcacaaagtaatgacgcccacccagcaccgcacacgggactgcgagaggagtgccgcaatattcagggtattgacgcccacccgggtccacagcagcctagagcagggaactgcggaaagagtgcaacaatcctcagggtattgacgcccacaccagtccaccgaagcattccgccgaggcgatacgccgctaggtctcagtgcgcagcttcagcatccctacaatccgcaggggtactgacggtcacccaggtcttctactgctgtatgcagggtcgggacacccagctacgtctcggttcgcgacttcagccgcaacatgatccgcgtagtaaggacgcctgcccgcccaggtcttccatgtaccgctgcggctctggcgcagactgcagcgtaaacacccctggtcggctgtgctcgcaccggatccgaagcggactctgcattcaggctcacgcgctctggaagggaagggcgctggagatgagggtggccgtgcgtctgcgagctgtgaagcctgtgtttgtgactgtaatctcactcacgggtgacagggccctgaggatgactccgtgtcctagactgcgggtattaacatggggcctcttccgtgcctttccgaggcgaaagcctggggtttgccagccgtggccacacctgtcaggctacacaagcagcaaggaccccctgagacctgaacatcagatgtctggctggaggcttcagcaggtcttcaacgccatggccggcagttcctcaaagctaaagctgcagagctcctgcaagcactgcctgctcgggctggctctacttcttgccaccgtcagcctgccatcctcctactcctctgaaatgactctttccaatctcaaagccagtggtcaacatcctggccttgtcttcctgacgttctcagcagctgtcatttgctcctaa

SEQ ID NO: 128522 - DNA, 1417 bp, Homo sapiens
cttcgactgatgttgcttaatgttgatcataacaaggctgttctagtaggaattttcttttccacacttcaacgtttggatgtctatgtgaacaacttattggtctgtccaaaaactacaatatggaatgcccagcagaaacactgtgaacttaataaccatctgtacaaagaccaattccttcctaacctggattccactgtccttggtgaaaactactttgatggaacctaccagatgctttatcttttggttaaaggaactatacctgttgaaattcacactgccacagtgatatttgtttctttccaattatctgttgcaacagaagatgacttttatacctctcacaatctggttaaaaatcttgccttgttcctaaagataccaagtgacaaaatccgtatcagcaaaataagagggaagagtctgaggaggaagagatccatgggattcataattgaaatagagattggagaccctcctattcagttcataagcaatggcaccacaggtcagatgcagttatctgaactccaggaaattgctggttctcttggacaagctgtaattttaggaaacatcagtagtatccttggatttaacatttcatccatgtctattactaatcccctccccagcccaagtgactctgggtggattaaggtgactgcccagccagttgaaaggtctgcatttcctgttcatcacgtggccttcgtgtcctcactcttagtgatcactcagccggtggcagcacagccagaacagccatttcctcagcagccttcggtaaaggcaacagattctgacggtaactgtgtatcagttggaattactgcactaactttgagggccatactcaaggactccaataataaacaagtcaatggccttagtggaaatacaacaattccgtttagcagctgttgggccaactacacagaccttactccccttagaacaggaaaaaattataagattgaatttatactggataatgttgttggggtagaatccagaactttcagcctgctggcagagtctgtctctagcagtggcagcagcagcagcagcaacagcaaagcatcaactgtgggtacatatgcccagataatgactgtagtaattagctgtctggttggaagaatgtggctcttggaaatatttatggctgcagtttcaactttgaatataactttaaagaagctactaaagtgctgttccgaagaacaggctgaaaacaaaaatataagaattattagctactttgttgggcaataggcaaaagtctatagcattttcatgaaaatatactaaaaatatttttatgatatataaaatgtactaattagctttaaacactaaaatcagatttcttcaaaatataaatttgttttgattctttaaaaaaaaa

SEQ ID NO: 128523 - DNA, 406 bp, Homo sapiens
aatttctgattatgaggaagaagaagaatatgaggaggagggttcatctctctggacacaggttcgcaccacaaatctcatccagggggttcttagcacgctctgggatgggtgcgcccccacactctgaactcaccaacccagccaacaacctggcaactgtggcaatcctgcctgggagtgctgaggtccccatggtggccttcacgctggagctgcagcacgccctgcaggccatcgcatccaaaagttccggctgtcagggtggctggcccagcaggaggatgcacaccgtatcgtactctaccagacggacgcctcgctgacgccctggaccgtgcgctgcctgcgacaggccgactgcatcctcattgtgggcctaggggaccaggagcctaccctcggc

SEQ ID NO: 128524 - DNA, 4141 bp, Homo sapiens
tcaggcatctgtggctgagccgggcggctcctggggcagacagcgtcgttgccggagaatcgacttctcctcctccatctcggaggcagtgctgggacttgcgccctcgggggaccccccttcatccctcgagcagtcgggtccggcgtcctcctcatactctgtcagacaatctgactcctctccgtcagcacagccatcagagacatagctcgtggggggctcaatccgggacacaatctctgccaagtcagtgaagccagagcttgggaaggcaagcacgtctgcacggcggctctcattaaggtctgtagaccgccggtctgtgagcattttctcaatgacgttgccacggctccagcctccaaacaccgccttcccgtactggtagcccacatcatagatctggtcgaacttcccaaagtccatggtcttgaagcagtcgatgggcgggcgcaggtactcgcagtaggagctggacttgacaacctctagctgccgcacacaggacacgtaggccaggcgggactggatttcagccatgtctggaacctttaccttgtcagcccagggattcagccgcttccacagcagccaccagccggacaggctgtccccgtaggtgctgaggtccgtctcatcctggctccccacgtcaatggcgatgaccgttttggcacccatgctgcgggcgatgtccgctggcagattgttgatgtagccgccatccatgagtaggtgcccgtccttggggtcgcacagcgggggcaggtagcccgacagcgtcatgctggcgcgcacgtaccgccacagggagccatctttgtggactcgcatggctgaggcggtgatatctgtggtcacgttgaagtaaggcagccacaggtcctcaatctgcttatcctggaagacccgatggatgctgcggttaaaggcagacccagtgaacatggaggtgactgggtacgtgaggtccaacacaggttccagcaccgaagtcatgctcttggcccactcccgggcccgctgcttcgtgcggctggcgctgcgctcctccgcgtacaacgctccgatgaaagagccaatggacgtgccgcccaccaggtccacggggacccccgcctcctctaatgcctttagtactccgatgtgcgagcagcccctggccccgcccccgcctagcacaagggcaatggtgttccccgtgagcaccctcgccaagcgggagaagtcgctgtgccggtccgcgcgcctggagaaaaccttctcgtagagctcatgcagcttggcagggctgcggcgcgaaaagaggcggcgcggacagcgcaggtgcaggtgccccgagcaccagctgcgcatatttagccactccacggtgcgcgtggggcccgcaccctcctctcggtggagcaggactagctgcttaagggcgcgcacagccgtgttctccagcatctgctccagctggccgagggtaggctcctggtcccccaggcccacaatgaggatgcagtcggcctgtcgcaggcagcgcacggtccagggcgtcagcgaggcgtccgtctggtagagtacgatacggtgtgcatcctcctgctgggccagccaccctgacagccggaactcttggatgctatccagtgcggaggcccccaggcgtgcccggatgatgtcactgttaaggagtagcgtcggaccgatggcctgcagggcgtgctgcagctccagcgtgaaggccaccatggggacctcagcacacacaggcaggattgccacagttgccaggttgctggctgggttggtgagttccgagtgtgggggcacacccaacccagagcctgctgggaagggtccttgcagctgctgcaaattccctagaattttctggctcagtaggtggataaggcgggtcacgacctgcgggtaccggcgtttgatgtgacccaaggtgccctcgggaagcttggctagctccgtgtcgcgcaccgcgtgcaccgtcgtggctcgcggctgccgggtcagtgcctccaccacgccgatgaggtcgccgcggccgtactcgcccaccagctccttcttgccactgcctcgctggatcacgctacgcagccgcccattgagcacgatgtaagtgcagtcggagcggtcgccctgcctgtacagcgcgcgtcccgcctccactgcagtccagtcgatggcgaagtccatctggcgcacgaagggcgacatcctggctgccaccgtgtgcgccgcactcagcaccacactgggctgtgcgcgcatgatctcatagaagtcggacttggagatccgcaggaaggtgcagtcgcgttgggctcgcagtgtgaagatgagaggttcgccagtgagcaccgccagctgccccaccagttccccgggctgcgctacgaacaggcacacgtcctccgccttgtcgatcatgcgctggtacacgtgcaggcagccccagagcacgaagtgcaggctcacgtcctggtctccctggcgggcaatgatggtgccagctttggcgtggtgcagcaagactctgctgttcaggagggaggggtcctcaatccgcatcagcttggccagctcctgctttgctgcctcgaagatgctgctggtctggcggccctggtagggcccgaaagggcagccaccagtggccgactcatcctcacagtagctgtattcacaggcgcctgccggctgctcacgaggctcctgagtgggggtccgagcgggggctgccagggaccccccggaggcctcttcctgcagggacacggagatccggccacgctcataggccatgtcgaagtcggagcgggggccaccctgcaagcctgagatgtcccctggcatggagacgcagcggctcagcagaggggccgagggggtttccagggatgtgggcttcacagggtcccctgtaggtccaggcagcggggccccggtgggatcgggtggccgccctggggtctccctgggctcgtctgtagctgaggtgctgaccattctcttggagccccgcacagggctggtgcgagttgggaggccggggctggggaacagacgcaggggctggatctcgtggctgaagagctcattggtcagacccaggtagttgtgcagtgccaggaaggtgactcgctgcagccgcaccatgatgatctgcacgacccgcaccaagctctccgggtacttggtgaagaccgcggagaatgcttccaccggcaggcgcagcaccgtggagtcccgggccgcccgggcagacacggtccgctggggatgctggtgaccggtgatgacatccaggatgctgagaaggctgttgacgctgtccccaggaaccacttccttcaccacacactccttcccgtcaggccctggcagacagagctccagcagcccgtcctgcaccacgtagatgctggcatctggctggcccggccggaagacgtagtcaccctggcccagccgctggaagaccatgtggcggcagagctccaggaagagtggcttctcgaagtggcccagcacccggacgttcttgagcatataaagcacttcagagggcagatgggagttagccaggtcgccctcggtcaggtcagcttctagcactgcgggcgggggctccttccgctgcagcgtgggcgtctctttctggatgcgcaggatcttcttggcaatgttgagcatcttcagtttcttcctcatgcgtggccgggaggtggcggagacagaggtatccacgagggaggaggtggattgtgacaccttccgcataatcttccggccatagaagagcactttgtccctcttccggaaccgataccgggggccatccggggctggggtttttggcactcgcagcctccgcaccaccaggaggatgagcacggccgtgaccaccaccgccactccggccccgatcatcacgccaagcaccattccagtttgcagcggagcctccatcggttgattccagctggacggccgatctggtagcccggagtctgtcagcagcctgcaggcaggtccccacagggcacggtcctctgcacctggtgacttcctcccgggtcactgccctgtttcagaagagtcctgggatgcttggggtggcgtgggg

SEQ ID NO: 128525 - DNA, 972 bp, Homo sapiens
atgattgtgccactcactccagcctgggtgacagagcgggaccttctcgacaaagaacgagggacggacgacacgggacgtgtacgacgggcggggaccacgtgtgggacgttgtggtacgtgtgtgtacgtgcggtacgtacacgaccgaccgcacgcaccaccgcacgaaagagcacgacgaaacgatggcaacacgcagagaacaggaaacgcgcgaccgggcacggcaatgcctacagcgaccaccgaccaacccaagggcagaagcacacgacacaaagagacaaagagaggaaggactgcgaggaacgggaaacaacagaacaatccgagaaaacaccacgaaaagacaagcgcaaacaaggcagcgcaggcgagggggaacgcggcgcggggggcaaggagaaagggcaaccaagggacaccgaggcaaaaggagaccggcggacggactttcctccgcccaacggccacttaaggccaatccaaaaggggggccaatattggggggtggtttcccccgccccggttgggaacgccaaaccccccccttccgggcccccaaagcgcccaggtttccggcccgtaaacccctcaaatgtggatgccaactggaacggggtgctgcgggggttcacagtgccggaagtcccccaccatggtgtgttagcccgtgacccgttgcggaagccctgtttcactcgagcacactgccccaaggcaccccagccccccaagttcttcgccaaagcactcgcaccaaccaagcacaccgcccccctagataagccttggccaagggccttgccggccgccgaaaagaaggccggcgccggaccagccgcaggtgccaaggtgccccgagcccagctgcgcatatttagccactccacggcccacaatgaggatgcagtcggcctgtcgcggcagcgcacggtccagggcgtcagcgaggcgtccgtctggtag

SEQ ID NO: 128526 - DNA, 3128 bp, Homo sapiens
gaatgtgtgaaggagaaattgaatctcttgcacgaatttctgcaaacagaaataaagaatcagttatgtgacttggaaaccaaattacgtaaagaagaattatccgaggagggctacctggctaaagtcaaatcccttttaaataaagatttgtccttggagaacggtgctcatgcttacaaccgggaagtgaatggacgtctagaaaacgggaaccaagcaagaagtgaagcccgtagagtgggaatggcagatgccaacagcccccccaaacccctttccaaacctcgcacgcccaggaggagcaagtccgatggagaggctaagcctgaaccttcacctagccccaggattacaaggaaaagcaccaggcaaaccaccatcacatctcattttgcaaagggccctgccaaacggaaacctcaggaagagtctgaaagagccaaatcggatgagtccatcaaggaagaagacaaagaccaggatgagaagagacgtagagttacatccagagaacgaacaagcagtcctaacgggctagttcaaccaccaccttccaaagaaggaacctggggcaagatcgaaatccctcacctaacacccaaacagaaactgaaggaggagccggacagagaagccagggcaggcgtgcaggctgacgaggacgaagatggagacgagaaagatgagaagaagcacagaagtcaacccaaagatctagctgccaaacggaggcccgaagaaaaagaacctgaaaaagtaaatccacagatttctgatgaaaaagacgaggatgaaaagacccaccctcccaagtgcattcagtgcgggcagtacctggacgaccctgacctcaaatatgggcagcacccaccagacgcggtggatgagccacagatgctgacaaatgagaagctgtccatctttgatgccaacgagtctggctttgagagttatgaggcgcttccccagcacaaactgacctgcttcagtgtgtactgtaagcacggtcacctgtgtcccatcgacaccggcctcatcgagaagaatatcgaactcttcttttctggttcagcaaaaccaatctatgatgatgacccatctcttgaaggtggtgttaatggcaaaaatcttggccccataaatgaatggtggatcactggctttgatggaggtgaaaaggccctcatcggcttcagcacctcatttgccgaatacattctgatggatcccagtcccgagtatgcgcccatatttgggctgatgcaggagaagatctacatcagcaagattgtggtggagttcctgcagagcaattccgactcgacctatgaggacctgatcaacaagatcgagaccacggttcctccttctggcctcaacttgaaccgcttcacagaggactccctcctgcgacacgcgcagtttgtggtggagcaggtggagagttatgacgaggccggggacagtgatgagcagcccatcttcctgacaccctgcatgcgggacctgatcaagctggctggggtcacgctgggacagaggcgagcccaggcgaggcggcagaccatcaggcattctaccagggagaaggacaggggacccacgaaagccaccaccaccaagctggtctaccagatcttcgatactttcttcgcagagcaaattgaaaaggatgacagagaagacaaggagaacgcctttaagcgccggcgatgtggcgtctgtgaggtgtgtcagcagcctgagtgtgggaaatgtaaagcctgcaaggacatggttaaatttggtggcagtggacggagcaagcaggcttgccaagagcggaggtgtcccaatatggccatgaaggaggcagatgacgatgaggaagtcgatgataacatcccagagatgccgtcacccaaaaaaatgcaccaggggaagaagaagaaacagaacaagaatcgcatctcttgggtcggagaagccgtcaagactgatgggaagaagagttactataagaaggtgtgcattgatgcggaaaccctggaagtgggggactgtgtctctgttattccagatgattcctcaaaaccgctgtatctagcaagggtcacggcgctgtgggaggacagcagcaacgggcagatgtttcacgcccactggttctgcgctgggacagacacagtcctcggggccacgtcggaccctctggagctgttcttggtggatgaatgtgaggacatgcagctttcatatatccacagcaaagtgaaagtcatctacaaagccccctccgaaaactgggccatggagggaggcatggatcccgagtccctgctggagggggacgacgggaagacctacttctaccagctgtggtatgatcaagactacgcgagattcgagtcccctccaaaaacccagccaacagaggacaacaagttcaaattctgtgtgagctgtgcccgtctggctgagatgaggcaaaaagaaatccccagggtcctggagcagctcgaggacctggatagccgggtcctctactactcagccaccaagaacggcatcctgtaccgagttggtgatggtgtgtacctgccccctgaggccttcacgttcaacatcaagctgtccagtcccgtgaaacgcccacggaaggagcccgtggatgaggacctgtacccagagcactaccggaaatactccgactacatcaaaggcagcaacctggatgcccctgagccctaccgaattggccggatcaaagagatcttctgtcccaagaagagcaacggcaggcccaatgagactgacatcaaaatccgggtcaacaagttctacaggcctgagaacacccacaagtccactccagcgagctaccacgcagacatcaacctgctctactggagcgacgaggaggccgtggtggacttcaaggctgtgcagggccgctgcaccgtggagtatggggaggacctgcccgagtgcgtccaggtgtactccatgggcggccccaaccgcttctacttcctcgaggtggtgcccctgcttgctagagggaaggcttcggggtcaaagttggccagaaggagtctgatgtcgggttatacacaaggcggcttggctgcagggtttcagctttt

SEQ ID NO: 128527 - DNA, 5794 bp, Homo sapiens
  misc_feature (1)...(5794): n = a,t,c or g
cgtccgcgtggggggggtgtgtgcccgccttgcgcatgcgtgttccctgggcatggccggctccgttccatccttctgcacagggtatcgcctctctccgtttggtacatcccctcctcccccacgcccggactggggtggtagacgccgcctccgctcatcgcccctccccatcggtttccgcgcgaaaagccggggcgcctgcgctgccgccgccgcgtctgctgaagcctccgagatgccggcgcgtaccgccccagcccgggtgcccacactggccgtcccggccatctcgctgcccgacgatgtccgcaggcggctcaaagatttggaaagagacagcttaacagaaaaggggatgtgtgaaggagaagtttaatctcttgcacgaatttctgcaaacataaataaagaatcagttatgtcacttgtaaaccaaattacttaaagaagaattatccgaagagggctacctggctaaagtcaaatcccttttaaataaagaatttgtccttggagaacggtgctcatgcttacaaccgggaagtgaatggacgtctagaaaacgggaaccaagcaagaagtgaagcccgtagagtgggaatggcagatgccaacaggcccccccaaaccccttttcaaaacctggcacgcccaggaggagcaagtccgatggagaggttaagcctgaaccttcacctagccccaggattacaaggaaaagcaccaggcaaacccccatcacatttcattttgcaaagggcccctgccaaacggaaaacctcaggaagagtctgaaagagccaaatcggatgagtccatcaaggaagaagacaaagaccaggatgagaagagacgtagagttacatccagagaacgagttgctagaccgcttcctgcagaagaacctgaaagagcaaaatcaggaacgcgcactgaaaaggaagaagaaagagatgaaaaagaagaaaagagactccgaagtcaaaccaaagaaccaacacccaaacagaaactgaaggaggagccggacagagaagccagggcaggcgtgcaggctgacgaggacgaagatggagacgagaaagatgagaagaagcacagaagtcaacccaaagatctagctgccaaacggaggcccgaagaaaaagaacctgaaaaagtaaatccacagatttctgatgaaaaagacgaggatgaaaaggaggagaagagacgcaaaacgacccccaaagaaccaacggagaaaaaaatggctcgcgccaaaacagtcatgaactccaagacccaccctcccaagtgcattcagtgcgggcagtacctggacgaccctgacctcaaatatgggcagcacccaccagacgcggtggatgagccacagatgctgacaaatgagaagctgtccatctttgatgccaacgagtctggctttgagagttatgaggcgcttccccagcacaaactgacctgcttcagtgtgtactgtaagcacggtcacctgtgtcccatcgacaccggcctcatcgagaagaatatcgaactcttcttttctggttcagcaaaaccaatctatgatgatgacccgtctcttgaaggtggtgttaatggcaaaaatcttggccccataaatgaatggtggatcactggctttgatggaggtgaaaaggccctcatcggcttcagcacctcatttgccgaatacattctgatggatcccagtcccgagtatgcgcccatatttgggctgatgcaggagaagatctacatcagcaagattgtggtggagttcctgcagagcaattccgactcgacctatgaggacctgatcaacaagatcgagaccacggttcctccttctggcctcaacttgaaccgcttcacagaggactccctcctgcgacacgcgcagtttgtggtggagcaggtggagagttatgacgaggccggggacagtgatgagcagcccatcttcctgacgccctgcatgcgggacctgatcaagctggctggggtcacgctgggacagaggcgagcccaggcgaggcggcagaccatcaggcattctaccagggagaaggacaggggacccacgaaagccaccaccaccaagctggtctaccagatcttcgatactttcttcgcagagcaaattgaaaaggatgacagagaagacaaggagaacgcctttaagcgccggcgatgtggcgtctgtgaggtgtgtcagcagcctgagtgtgggaaatgtaaagcctgcaaggacatggttaaatttggtggcagtggacggagcaagcaggcttgccaagagcggaggtgtcccaatatggccatgaaggaggcagatgacgatgaggaagtcgatgataacatcccagagatgccgtcacccaaaaaaatgcaccaggggaagaagaagaaacagaacaagaatcgcatctcttgggtcggagaagccgtcaagactgatgggaagaagagttactataagaaggtgtgcattgatgcggaaaccctggaagtgggggactgtgtctctgttattccagatgattcctcaaaaccgctgtatctagcaagggtcacggcgctgtgggaggacagcagcaacgggcagatgtttcacgcccactggttctgcgctgggacagacacagtcctcggggccacgtcggaccctctggagctgttcttggtggatgaatgtgaggacatgcagctttcatatatccacagcaaagtgaaagtcatctacaaagccccctccgaaaactgggccatggagggaggcatggatcccgagtccctgctggagggggacgacgggaagacctacttctaccagctgtggtatgatcaagactacgcgagattcgagtcccctccaaaaacccagccaacagaggacaacaagttcaaattctgtgtgagctgtgcccgtctggctgagatgaggcaaaaagaaatccccagggtcctgggagcagctcgaggaccctgaatagccgggtcctcttactacttcagcaccaaggacggccacctgtaccgaggtggtgatggtgtgtacctgccccctgaggccttcacgttcaacatcaagctgtccagtcccgtgaaacgcccacggaaggagcccgtgggatgaggacctgttacccagagcattaccggaattattccgattacatcaaagggcagcaacctggatgcccctgagccctaccgaattgttcggatcaaagagatcttctgtcccaagaagagcgacggcaggcccaatgagactgacatcaaaatccgggtcaacaagttctacaggcctgagaacacccacaagtccactccagcgagctaccacgcagacatcaacctgctctactggagcgacgaggaggccgtggtggacttcaaggctgtgcagggccgctgcaccgtggagtatggggaggacctgcccgagtgcgtccaggtgtactccatgggcggccccaaccgcttctacttcctcgaggcctataatgcaaagagcaaaagctttgaagatcctcccaaccatgcccgtagccctggaaacaaagggaagggcaagggaaaagggaagggcaagcccaatgtcccaagcctgtgagccgagcgagccagagatagagatcaagctgcccaagctgcggaccctgggatgtgttttctggctgcggggggttgtcggagggattccaccaagcaggcatctctgacacgctgtgggccatcgagatgtgggaccctgcggcccaggcgttccggctgaacaaccccggctccacagtgttcacagaggacttgcaacatcctgctgaagctggtcatggctggggagaccaccaacttcccgcggccagcggctgccccaaaagggaaaccgggaagatgctgtgcggcgggccgccctgccagggcttcagcggcatgaaccgcttcaattcgcgcacctactccaagttcaaaaactctctggtggtttccttcctcagctactgcgactactaccggccccggttcttcctcctggagaatgtcaggaactttgtctccttcaagcgctccatggtcctgaagctcaccctccgctgcctggtccgcatgggctatcagtgcaccttcggcgtgctgcaggccggtcagtatcggcgtggcccagactaggaggcgggccatcatcctgggccgcggcccctgggatagaagctccctctgttcccggagccactgcacgtgtttgctccccggggcctgccagctgagcgtggtggtggatgacaagaagtttgtgagcaacataaccaggttgagctcgggtcctttccggaccatcacggtgcgagacacgatgtccgaccctgccggagggtgcgggaatggagcctcggcactggagatctcctacagnacggggagcctcagtcctggttccagaggcagctccggggcgcacagtaccagcccatcctcagggaccacatctgtaaggacatgagtgcattggtggctgcccgcatgcggcacattccccttggcccccagggtcaagactgggcgcgatctgcccaacatcgaggtgcggctctcaaacgggcaccaatgggcaaggaagcttgcggtatacccaccatgacaggaagaacggccgcagcagctctgggggccctccgtggggtcttgcttcctgcgtgggaagccggcaaagcttggcgaccccgcagccaggcagtttcaacaccctcatcccctggtgcctgccccacaccgggaaccggcacaaccactgggctggcctctatggaaggctcgagtgggacggcttcttcagcacaaccgtcaccaaactccgagncccatggtcaagaagggccngcgtgctccacccagagcaagcaccgtgtggtgagcgtgcgggagtgtgcccgctcccagggcttcccctgaacaccaaccggctctctggcaaacaccctggacaagccaccggcaggtggggcaatgccgtgcccacccgcccctggcacaaagccattggcttggagcatcaagctttgtatgttgggcccaaagccccgagagagtgccctcagcctaaaataaaggaggaggaagcctgcctaagggacctagtcctgccccctccccgtcacccccctgtttcctggcacccccagaatccccccaacatgcacctgatgttgtgtttttaaccatgtcaatcctgtcccgttccacatgtgtggtacatggtgtttgtggccttggctgacatgaagtctgttgtgtgaggttcgcttatcaactaattgatttagtgatcaaatttgtgcagtactttgtgcattctggattttaaaagttttttattatgcattatatcaaatctaccactgtatgagtggaaattaagactttatgtagtttttatatgttgtaatatttcttcaaataaatctctcctataaaccaccctgggtgggtattcgtgatttgcacgggacttctggctgaggtcagacaggaacaagctcttccatgctgaaggcgacccacgtggagtttgaagctagcacgtttgaagctagacactccgtgtgtctgtctgtgtttgttcagaactgagtcacgtgagttgatccccatgacatgcaaatggaacttgctagtgtagcttccaggaaagccttttaaaggaagtcttggctggccttccccgtggctggtaggctttctttggtctgaagtgggttgtgatgcctggcagtggagcagc

SEQ ID NO: 128528 - DNA, 781 bp, Homo sapiens
atgagagcagcggatctcccagcacagcgcttgagctctgctaagggacagactgcctcctcaattgggtccctgaccactttgcctcctgactgggagatacctcccagcaaggggcgacagacaccttatgcaacaggagagctccggctggcatctgatgggtgcccgtctgggacgaagcttccagaggaaggtacagacagcaatctttgctgtttggcagcctccgctggtgatacccaggcaaacagggtctggagaggacctccagcagacctgcaccggaggggcctgactgttagaaggaaaactaacaaacagaaaggaatggcatcaacatcaacaaaaaaggacatccatgcaaaaaccccatctgaagagcactggcgtcaaagaccaaaggcctgccttacaagagcttctgaaggaagcactaaatatggaaaggaacaaccggtagcagccactgcaaaaacataccagattgtaaagaccatcgaccctatgaagaaactgcatcgactaacgggcaaaataaccagctagcatcataatgacaggatcaatttcacacataacaatattaaccttaagggtaaacagactaaatgcctccattaaaagacacagactcacagactggcaaattcgttaaagagtcaagacctatcagtgtgctatattcaggagacccatttcacgtgcaaagacccccataagctcaaaataaaggggtggaggaagatttaccaagtaaattgaaagcaaaaaaaaaaaa

SEQ ID NO: 128529 - DNA, 1548 bp, Homo sapiens
tttcgtccgggggctgctgcacccgccaccggtctgttctccagccgggggccccctgtagtcgccgcagtcccggtgagcacggacaacccctacccatgaggccctgatggaaaacacaaaggatctgagtcggaagagacattagaggtcatccaaagcagccgtcccctctgcagcctctctgacaagtgactgaacattcttcacgatctgaaaggaaaagaagagattctttcgggatgtttgacggttatgatagctgcagtgaggacacaagcagcagctccagctccgaagagagtgaggaagaagtcgctcctttaccttctaatctcccgattatcaaaaacaatgggcaagtctacacatacccagatggtaaatctggcatggctacctgtgagatgtgtgggatggttggcgtccgagatgctttttactctaaaacaaagcgtttctgtagcgtttcatgttcaagaagttactcgtcaaactccaagaaggcaagcattttggccagacttcagggtaagcctccaacaaagaaagcaaaagttcttcagaaacaacctttagttgctaagctagccgcatatgctcagtatcaagctaccttgcaaaatcaagcaaagacaaaagcagtcatgtggaggttgtcatacatttgtgttggggacccctcagcatttggatttggccatgtcctgcaggacctgatgacagcttaccttgcagggaaggagagtcgctcccagatagccctcacgagtggccctggagcaggaagtggttacaatgcccttttaagatatgaaggatttgaaaatgactctggtctggacttctggtgcaatatatgtggttctgatatccatccagttggttggtgtgcagccagcggaaaacctcttgttcctcctagaactattcagcataaatatacaaactggaaagcttttctagtgaaacgacttactggtgccaaaacactgcctcctgatttctcccaaaaggtttcagagagtatgcagtatcctttcaaaccttgcatgagagtagaagtggttgacaagaggcatttgtgtcgaacacgagtagcagtggtggaaagtgtaattggaggaagattaagactagtgtatgaagaaagcgaagatagaacagatgacttctggtgccatatgcacagcccattaatacatcatattggttggtctcgaagcataggtcatcgattcaaaagatctgatattacaaagaaacaggatggacattttgatacaccaccacatttatttgctaaggtaagaagtttttataagaaccctcatttgtaaattaggtttgaaagagggttgtgggttttttcctaaaattacggaaatcacaattacatatgttcacttaaaagaattaagaccttgtaaattcataggtgtcacaactctttattataattattcttaaattctatttgtctgaattttctctaaaccttaatggaagtttgagttataatattaggtaggtaggagaaggcacctg

SEQ ID NO: 128530 - DNA, 2226 bp, Homo sapiens
ctattccatctccttctccaccttctcccccagtcccaagtcatcctcagagatggagttcagggctacctcctccttcaagaagccttccaggaaacgctccagcaagtggtcctgccctgctccctctgcttctccttcctcctcacccaaattcagcacgataatgcagatgtgcttccgcagctggcgcgtgttggagaacttccgacagcacttgctacactccaagctgcttggaggcaggctgttcccttcctccggagccagcgggctgtcctcagtcggactcacgatgttttctgccagctcctcttctgtgctggacttcttcgtggacgccttaggcctgcctctcttcctcttcatgaccaaaaactcatctccggttttgcttgagttggggggttcaggtgtactcagaggcctaaggggaataataatctcatcaacattaaccccttcttccatgtgcttctctgaaacgtgggagaggagttccgactgatttggtgagaagaggttacaacatttacacataaagatggccgtgttttctgggagaaaagcagagtgagaagtgggaagagcaggtgcaaccaagcacggagatggagtgggacacgccacgtctgcaatggagggtggagggtgaggcggcacgggaaccagaggccaggcagagcaggtgcttgtggccacctgtaggatttcagctttaactctgagtgtgaccagaagccacttctggaggtcagggacagaggagtgatctgagctatttgtcaaacagcagagagggttattctgtttcagaagcaaaagcgtctgcttaaccacagtcaccgtccctggtgccatggcaaccaccgaggcaagggcagtggcgtcatgggtctcggcgcccagctcaatgatctgctgcaggatgttcacagccgtggggtccagtcggtcgccactctcagaggtgtatctcaggtcctggagcgcggccaccgctgcctgtgtcccttgaacgtcttcttcggcctctgtgatgtggagatactgggtggagggctcctcaggagcttctgttgctgtctcccacttggggtctccatcaatttccaccaccttcaagccatgtttgttcttcaagtgcctattgaactcccatttggtgccatatacaaagctgcaaacaggacacttcaaaccaccttgctggatgagcacctccgctgccagctccccggtgcccacgttggcatactcctcattagggtgcttcctgttgtagtgccgcttcagagagccagatatgttgcaggagtaatggcaatgggcacagcggaaaggcactgcatctattaagacctcaaacactacctttactcctccactgtccaattcatcaatcttttcaccactgttgcccagaagagctaaaccagcaactgcaatgtcatctgcagtgtgaaggagtttgtgacttttcagtgtcccttttgatttgaatttcttgccacacatgtcacataggtgggttttctcagtgctgtgacgattcatatgagccttgaggttactcttgctacgagttgcatactcacacaaagaacacttgaagggcttcacaccttcatgagcccaaatatgacgctgaaggtgtgagccattcttcatgaaataaaagtcacaatatgggcatttcatggctctctttccaattagccctttcagctgaaccctcctcccgagaacctcagaaatggtgctcatggagacctcaggatggttggtcttgatatgtgactttatcaatcgatcctctgaaaaagacttttcacaaacaggacaagaataactccttttgtcgctatcaacagtcatcaccaccaccaccatcacatcaccatcatcaataccatcatcaccaccactagcactatcaacagtcatcaccaccatcactactaccaccatcatcaccatcatcatcaccaccaccagcacaccaccaccaccaacaccaccacaaccaacaccaccaccaccaacaacaacaccacgaccaccatcaccattaccaccaccaccaacaccaccaccaccagcactatcaacagtcatcaccaccaccacaaccagcactgccaccatcaccaccaccaccaccaccatcaacatcaccacgacccccctcaccatcatcaacactagcattctcatcagcaccat

SEQ ID NO: 128531 - DNA, 681 bp, Homo sapiens
gggggaaccggcggtcgagctacggtcgcggagcagtggaaccgagactgccccgcggagccgccggtatgagcgcccctcgccaccccgtgtcccaggcccggccttttctgacaagagctagacttcgggctccttgaggatattcagttttgtatgtttgaatatcctctcaccatgttcagcataaagtaccattcttaatgattatcctcaacaagacaggtgtgagagggttgctgttgtattgcaatcatggtgcagaaataccagtccccagtgagggtgtacaaatacccctttgaattaattatggctttgaggaaactgatacccgagatgttgtgtaacgtgctcttaaacggggggggcacagcaggttggattcagattcctggatcttcctctctctttgtgtactccctgatgtctctggagaacatcgtcaagcaacttttaaagaaaggcagccgggtgcagtggctcacgccttcaatcccaccactttggcctgataccccaacccaccgcccccaagccatggtcatcacctctgcacataaccaaaccccagacacttggccaaagagatccaggacccagaacaagaaaaaggagcaaatgaagaatgaggtgcacacacaagtgaaggatgagcacgacgaagaggagctttattga

SEQ ID NO: 128532 - DNA, 825 bp, Homo sapiens
atgcccaagaccacagcctgcaatgtgcacacagtcacctgggcatcttgtgaaaatgcggattctgattctacgggactgaggcaccatgactcctgcgaggacccagcatcccctggcagatcagacctatgccttgtcccacatcccaccagacctgcagtgagaggaggccgtccggcaggtggcagatgcccggcagtgcctgcagaaggtccctggagacatcttcagcaggcgcaggaagggctcaagaggctggcgggcggcttggagagacttctggagaatccggtgcgccgggctctacctcaaggagctcagggccatcgtgctgaaccaacagaggctcgtccgcacccagcgccagagcatcgacgagctggagcggcggctgaacgagctgagcgcctagaatcgcagcctgtgggagcatccgcagctgccgcaagcgcagcctccgcccggattccttacctcgtagccgtccccgctgccggccctcctaggcaccgctgccgccgccaccgccggggcccaggaacatcttcaggaccacggacagcgctcatccgcccggccactgcccgcgcccgagctggcatcgtttcagaaccacgaacagctcctggcgcaacccgagccagaccctggaggcagggctcacacaacccagtcgccccatcagcacccgggaacacttggggtcaaggccaacaaggagaagaaaggtcccccgggttgctgcgctgcccccggaaccccccttcagcaagaatctcccgcgccctcggcaagggagtcctgagcaggagacctgagtga

SEQ ID NO: 128533 - DNA, 834 bp, Homo sapiens
atgatcagatattttggagactactggacacaggctctgctgacattgattccaggggatccaaaacatcctcgtggtcctccagttaaagtaggggtttatggaggtcaggggtatattaactctctggctttgtgtcacaattttatttggagagaacttaatcgcttttcacttctgcaagatgtcccactggtccgttacattgacaacattatgctgattggatccataaaatttctaggggtccagtggtgtggggcctgtcgagatattccttctaaggacccagcagatccaatggtgctcgaggtgtcagtggcagatagggatgctgtttggagcatttggcaggctcttatagatgaatcacagcagaggcctctaggattttggagcaagtctctaccatcttctgcagataactactctccttttgagagacagctcttggcctattactgggctttggtggaaactgaacgttcaactatgggtcatcaagtcaccatgctacctgaactgcctgtcatgaactgggtgctttctgacccatctagccataaaccaatggtttggctggatggtcagggactgggaagaagcatgattggaaaattggtgacaaagaaatttggagaagaggtatgtggatggacctctctgagtggtcaaaaactgaagatatttgtgtcccatgtgagtgctcaccaacgagtgacctcagcagaggaggagtttaataatcaagtggataggatgacccgttctatggacaccactcagcctctttacccaaccacccctgtcatcgcccaatgggctcatgaataa

SEQ ID NO: 128534 - DNA, 3632 bp, Homo sapiens; identical to SEQ ID NO: 121813
  misc_feature (1)...(3632): n = a,t,c or g

SEQ ID NO: 128535 - DNA, 594 bp, Homo sapiens; identical to SEQ ID NO: 119164

SEQ ID NO: 128536 - DNA, 1275 bp, Homo sapiens; identical to SEQ ID NO: 121816

SEQ ID NO: 128537 - DNA, 2031 bp, Homo sapiens; identical to SEQ ID NO: 121817

SEQ ID NO: 128538 - DNA, 3384 bp, Homo sapiens
ttatgtctgatggcttttagcacattttgttttccctgtgacatcctcattcaggatattttctacaagcacattctgatatataactccactagattccactcctgaatgttttgcaaaaagagctctttcaaagtcaccttgccttgtgaattttgacaacctatacacggcccagttgttaagctgtttagaggtcattcctcttccattatctatcactgcaacagcaggttttccttgtgtttcatcaaaaagcatgatttcagccgaaccattcacgaaggggaattcaagtgttctaactttcccaataaaaagtggggtatcagtatcttcctcattagaacctttaatggtggctattatagtgccaaccaaatcaattccagtatggttgtcgtagtcatccgtgatactaagatgtagatctctgaccaaggtcctactggcaactgagcgaacatttgaaacagctggtgtaggtggtttaattttaggtactaacttcacaggttgattaggcaggacttcaactataacctcttttctataatgattggccgcatccagattatccaaaataatggtgtctcctaacagcataccaaatactgtttcacaatgttctacattatctggaaatgttaacaagtctcgagcaaagactggatctccaatgggtttaaaatacaattttccatttcggaaatgaggtagagatcttttccaatctggaagagtcttcttgtaaatagaatcaaggggcaacacctgctgacgaccttgggtttcatcatagatacgacgtgcagcgtcagtggttagggtgactacacagtccatgtcacttgccagatgccaagaaataaccatcgcagctctatcatcttcaatttgtgctagatgtgcaatctttcccaaaacatctccactgcctttagtatagtttggaagagtacacgatcttctaggttttttcttcagttcttcttgttctgatagctttcttttcagaagtgcttcaatgtgtggcacctgttgtgttgtaggaatgtcaatattatgtatttttagttcatttcgcaattgggcctcttttaatcttgcttcttcaacttgacatttcatttcattaagaagctgttggctggcttcaaataaacttttatacataacaatagactgagataattggtccttttcttttgtaagtgctgccatttgttgctgcttcttaacatctgcagtgtgcagtctagggacttggtgccctgttcccagccactccagccatggctgaaaggggccaacgtacagcttgggctgtggcttcagagggtggaagtcccacaccttggcagcttctgcgtggtgttgagccttgagacctctgacttgggagaaagatatcatttgttctgaagcaggagactccacccaccagaaacttgcaggtttaagaaacaaatggggatggcccctgagttgtttgcctattaaggggaggtgacagctcctttgtggaggaggggagggtaatgggtagccctccatcgacagctctttccactcctgtccatttaaaatccttgtaaaaagggtgttcttatctttcaattttagctcaagatccataaacgtcaatttatttgtgctgacctggaatttgtcattagtgaataatgcaccagatatcctattgtagcattcaattggtgcaagccctctcttcttaggaggagtacaccagtcaaagtcttcaactgatgtatatggtattaatcgtccattccaaaaacattcaaaaataggccttttccctctagctgctttctcaagtatgaaacaatcatcttcatcatcttcatcttttaattttgatggaaagcatggatcatcagggtaagtttctctatcatataagaatggatgataacggataatcccttccactacaccatctccttcaacatgagctttgaattcaaaactatcagctgctgtgtttacatacaacgtctgcatgtcgtcttgtatttcccttaggttgacaatcttaggtaccttccctttttcaaacatagaaatttcaatatcaatattgttgaaaggttcaacttcttttgatgttcgtatttcatttccttttgggccatgaatatagtagtgataaatatgcgctaactgtcgtgtccaaaggtggaaataatttttcaagtactgtatgtgttctggttgtacccctgtgataaccacagcagtaaagctatctttttccttctcctctatgataagatgatgtagaaatctttcatcatcatttgtaatgtgaacagaatcagagggctttctgtttctaatatatccactatatattgcctctttatttttctccttcttctcaaaatcttctttagaaagcacaagctcgtgaacatcttgggaatctgcaggtttgcttatcattctggctgattgtccaacaaagaagacagcttgcttgcccccaacaccaaaataggaaatatcactatttaaactgcgtggcactggtactggacgaacatatcgcaaaggattttgtccttcactggcataatattcatacatgccacttttaaccagtgtgtcatagtgaggtaagaagtcaattcgttctttcgtagctgtcagtagtaactgattgaccgactgtagcaggtataaggtgactccatctttaacagtttcatacgcgcgaaatcccgcgtagtccgagcgctccccgacctgcagaggccggtccccgagctcggactccttttcgcgccgatcaaacaagtacaccgtcctgtggccgacgcctccgccatcctcctcagtccccacagaggccccaccaggcccgccgccgtccgccgtgagccctctctggctgggtcgcgtggacgcggcggcgggaagcttcaggccggcggtactcgccgggcgcagagtccaccaaagcgagcacgtgggtccctctgccgagaaaataggcgctacgagagccggcgcccctttttcctcctcatttcttagtagtactgggtgggctccagcgtgggcccccgaggcaaagcgggtccgtgagaacgtcagaagggcgctctgtgacgtcacagcgtccccgccccccgcaccctctgggggccctggagcgccgacggcattcggggtacgggggtgactccagcgccctagttttaacgctgcctgcgcttcgcggtctcccacgtgcgtgtaaattattgtttggctggaagtgaggagaactgagcggtagatggtggaagataaaattggaaagacataaactgtggccaaatgccgttcatgttcatttctttttatgttcttcat

SEQ ID NO: 128539 - DNA, 227 bp, Homo sapiens; identical to SEQ ID NO: 118589

SEQ ID NO: 128540 - DNA, 266 bp, Homo sapiens; identical to SEQ ID NO: 117721

SEQ ID NO: 128541 - DNA, 564 bp, Homo sapiens
agacctctggccttttaccagggtaactcttcacaggggaaagagaaatgatcagacatttcagggactactggacactggctctgagctgatgttgattccagaggacacaaaacatcactgtggtcctccagttaaagtagaggcttatggaggtcaggtaattaatggagttttagctcagatccaacttacagtgggtccagtgggttcagggactcatcctgtggtcatttacccagtgccagaatgcataattggcataggcatacttagcagctggcagaatccccacattggctccctgactagtaggaagacagatggttcttggagaatgacagtgcattatcataagcttaaccaaatggtgactccaattgcagctgctataccagatgtggtttcattgcttgagcaagttaacacatctcctggtagctggtatgcagccattgacttggcaaatgcctttttcttcattcctgtccataaggcccaccagaagcaattcgccttcagctggcaaggccagcaatatacctttactgtcctacctcaggg

SEQ ID NO: 128542 - DNA, 503 bp, Homo sapiens
tttttttttttttttgcctattggattttggaggcaacacattcctcgtttgagtgtgttactccagcacatttattgagtgacctgaaacgctgccagttttgagtggggtccagaacaggagaaagctctatgacaggtccaggctgttgtgcaagttgctctgccacttgggccatatgacccagcagatccaatgttgcttgaggtgtcagtggcagataaggatgctggctgcacgcgtttgcgaggcccccataggtgaatcacagtggcggtctctaggctttcggagcaaggccctgcgatcttctgcagaaaactactcttcttttgagagacagctcttggcctgttactgggctttggtggaaactgaatgtttgactctgggtcatcaagtcaccatatgacctgaactgcctatcatgaactgggtgctttctgacccatctagccataaagttggtcatgaacagcagcattccatcatcaaatggaag

SEQ ID NO: 128543 - DNA, 469 bp, Homo sapiens; identical to SEQ ID NO: 121825

SEQ ID NO: 128544 - DNA, 636 bp, Homo sapiens; identical to SEQ ID NO: 120791

SEQ ID NO: 128545 - DNA, 942 bp, Homo sapiens; identical to SEQ ID NO: 121675
  misc_feature (1)...(942): n = a,t,c or g

SEQ ID NO: 128546 - DNA, 932 bp, Homo sapiens
aggaagggatccaaaggcttaaaaagattgggatggtggagtggattagtcactttagacctactcctctcagcatggaaggtccagaacatatactcttgaccaacaccttgttaaatagatatgtgaaggcagcacctgcatctttgaagagccctttaactgctcttctctttatgtcagatctaactgtgggaaccacattctctcaactacaaaatttaaatacaatgggaatatttgggtcctcatgtgacaggagccaagtggcagcactcaaccatcaaaggcaagtgccagaatgcaaaattgtcatagatatacttaacatctggcggattccccacattggctcactgactggtagggtgagggaaattatggtgggaaaggccaaatggaagccattagagcagcctccacctagaaaaatagtaattcaaaaacaatatcacatccctggagctattacagagattagtgccaccattgaggacttgaaagatgcaggggaggtgattccgattcccaccacattcccattaaactctcccatttggcctgtgcggaagacagatggatgttggagaatgacagtggattattgtgagcttaaccaagtggtgactccaactgcagctacagtaccagatgtggtttcattgcttgagcaaattaacacatctcctggtacctggtatgcagacattgacttggcaaatgccgttttctccattcctgtccataaggcccaccagaagcaatttgccttcagctggcaaggccagcaatatacctttactgtcctacctcagggagagaccttggttaatttttcccttcctcaagatatcacactgttccattacattgatgacattatgcagattggatccagtgaccaagaagtagcaaacacactggacttattg

SEQ ID NO: 128547 - DNA, 6914 bp, Homo sapiens; identical to SEQ ID NO: 121830

SEQ ID NO: 128548 - DNA, 2158 bp, Homo sapiens
atgaaactcatggaaacacttaaccagtgcataaacgctggtcatgaaatgacgaaggctatcgccattgcacagtttaatgatgacagcccggaagcgaggaaaataacccggcgctggagaataggtgaagcagcggatttagttggggtttcttctcaggctatcagagatgccgagaaagcagggcgactaccgcacccggatatggaaattcgaggacggcgacgtgctgaagacgtatttccaccggtgatcggggttgctgcccataaaggtggcgtttacaaaacctcagtttctgttcatcttgctcaggatctggctctgaaggggctacgtgttttgctcgtggaagaagacagatggatcttgagaatgacagtggactattgtaagcttaaccaagtggtgattccaattgcagctgctgtatcagatgtggtttcattgcttgagcaaattaacacatctcctggtacctggtatgcagccattgacttggcaaatgcctttttctccattcctgtccataaggcccagcagaagcaatttgccttcagctggcaaggccagcaatatacctttactgtcctacctcagtggtatatcaactctccagctttgtgtcataatcttattcggagagaccttgattgcttttcgcttccactagatatcacactggtccattacattgatgacattatgctgattggatccaagacagctcttggcctgttactggctttggtggaaactgaacatttgactataagtcatcaagtcaccatgcgacctgaactgcctatcatgaactgggtgctttttgacccatctagccataaagtgggttgtgcacagcagcattccatcatcaaatggaagtggtatgtacatgattgggctcgagcaggtcctgaaggcacaaccacccctgtcatttcccaatggccccatgaacaatgtggccatggtggcagggatggaggttatgcatgggctcagcaatgtagacttccactcactaaggctgacctgaatacagccaccgctaagcgcccaatttgccaacagcagagaccaacactgagccctcaatatggcaccattcctcagggtgatcaaccagctacctggtggtgggttgattatatgggatctcttccatcatggaaagggcagaggtttgtcctcactggaatagatacttactctggatatgggtttgcctatcctgcatgcaatgcttctgccaagactgccatttgtggactcacggaatgccttatccaccatcatgatatcccacacagcattgcctctgaccaaggcactcactttatggctaaagaagtgcggcagtgggctcatgatcatggaattcactggtcttaccatgtttcccatcatcctgaagcagctggattgatagaatggtggaatggccttttgaagtcacaattacagtgtcaactaggtgacaatacttggcagggctggggcaaagttctccagaaggtcgtgtatgctctgaatcagcatccaatatatggtactgtttctcccatagccaagattcacaggtccaggaatcaagggctagaagtggcaccactcaccatcacccctagggatccactagcaaaatttttgcttccttttcctgcaacattacagtctgctggcctagaggtcttagttccagaggaaggaacgctgccaccaggagacacaatgattccattaaactggaagttaagattgccacccagacactttgggctcctcctacctttaaatcaacaggctaagaagggagttacagtgttggctggggtgactgacctggactataaagatgaaatcactctcctactccataatggaggtaaggaagagtatgcatggaatacaggagatccattagggcttctcttaatattaccatgccctatgattaaggtcaatgggaaactacaacagctcaagccagaagccttggttccaaagggggtagtgtttccaccaggagacacaacaatgctttcactgagctggaagttaagactgccatctggccacgttggactcctcatgcctctgagtcaacaggtccagaaaggagttacggtgctggctggggtgattgatccag

SEQ ID NO: 128549 - DNA, 3193 bp, Homo sapiens
atggcagaaggcaaggaagagcaagtcctgtcttatacggatggcagcaggcaaagagagaatgaggaagatgcaaaagcggaaacccctgataaaaccatcagatctcatgagacttattcactaccacgagaatggtatgagggaaaccgcccccatgattcaattacctctcaatgggtccctcccacaacacgtgggaattatgggagtacaattcaagatgagatatgggtgggtgatcattcaggatatgttcgtccagtaccagtgccacgcagtttaaatagtgatatttcctattttggtgttgggggcaagcaagctgtcttctttgttggacaatcagccagaatgataagcaaacctgcagattcccaagatgttcacgagcttgtgctttctaaagaagattttgagaagaaggagaaaaataaagaggcaatatatagtggatatattagaaacagaaaggatgactacgacaaccatactggaattgatttggttggcactataatagccaccattaaaggctctaatgaggaagatactgataccccactttttattgggaaagttagaacacttgaattccccttcgtgaatggttcggctgaaatcatgctcatgccttcaaaccaacagcataaaacagatgagaaaggcagggctaatttgggagtattcagtgtttttgcccctaggggagagcatactcttcaggttaaagccatctataacaaaagtatcatagaaggacctataattaagttaatgattcttccagacccagaaaaacccgttcgtctcaatgttaaatatgacaaagatgcatccttcttagcagggggtcttttcactgctccaccactgccagcccagctcatgtcctcgctatcttgtgcctggattattgaatcagttcttaacagctggaggaagggatgcaacaaactcaggaaccagagagccctgcataagaaacaagacagagggaagcttccggaggatagagagcttcagcacactaagaaacagactaattgggcaggacttctgatccctgccatgaacaataacgtggatatgactgccagaaagctgcaaagagacctccagccttttaccagtgtgactgtgcattgcagaaagggaaatgaccagacatttgggggaccactggacgctggctctgagctgacattgattccaggggacccaaaacatcattgtggtcccccagttaaagtaggagcttatggaggccaagtaattaatggagttttagctcagccctcttatttggcttgtgcagaagacagacggatcttggagaatgtcagtggattactgtaggcttaaccaagtggtgactccaattgtagctgctgtaccagatgtggtttcactgcttgagcaaattaacacatctcctggtacctggtatgcagccactgacttggcaaatgcctttttctccattcttgtccataaggcccaccagaagcaatttgccttcagctggcaaggccagcaatatgcctttactgtcctacctcaggggtatatcaactctccagctttgtgtcataatcttatttggagagaccctgattgctttttgcttccacaagatatcacaccagttcattagttcattacattgatgacattatgctgattggatccagtgagcaagaagtagcaaaacacactgaacttattggtgagacatttgtgtgccagaggacgggaaataaatctgattaaaattcagggaacttctacctcagtaaaatttctagggttccagtggtgtggggcctgtcaagctattccttctaagatgagggataagttgctgcatttagtccctcctacaaccaagaaagaggcacaatgtctaacagctcttggcctgttactggctttggtggaaactgaacatttgactataagtcatcaagtcaccatgcgacctgaactgcctatcatgaactgggtgctttttgacccatctagccataaagtgggttgtgcacagcagcattccatcatcaaatggaagtggtatgtacatgattgggctcgagcaggtcctgaaggcacaaccacccctgtcatttcccaatggccccatgaacaatgtggccatggtggcagggatggaggttatgcatgggctcagcaatgtagacttccactcactaaggctgacctgaatacagccaccgctaagcgcccaatttgccaacagcagagaccaacactgagccctcaatatggcaccattcctcagggtgatcaaccagctacctggtggtgggttgattatatgggatctcttccatcatggaaagggcagaggtttgtcctcactggaatagatacttactctggatatgggtttgcctatcctgcatgcaatgcttctgccaagactgccatttgtggactcacggaatgccttatccaccatcatgatatcccacacagcattgcctctgaccaaggcactcactttatggctaaagaagtgcggcagtgggctcatgatcatggaattcactggtcttaccatgtttcccatcatcctgaagcagctggattgatagaatggtggaatggccttttgaagtcacaattacagtgtcaactaggtgacaatacttggcagggctggggcaaagttctccagaaggtcgtgtatgctctgaatcagcatccaatatatggtactgtttctcccatagccaagattcacaggtccaggaatcaagggctagaagtggcaccactcaccatcacccctagggatccactagcaaaatttttgcttccttttcctgcaacattacagtctgctggcctagaggtcttagttccagaggaaggaacgctgccaccaggagacacaatgattccattaaactggaagttaagattgccacccagacactttgggctcctcctacctttaaatcaacaggctaagaagggagttacagtgttggctggggtgactgacctggactataaagatgaaatcactctcctactccataatggaggtaaggaagagtatgcatggaatacaggagatccattagggcttctcttaatattaccatgccctatgattaaggtcaatgggaaactacaacagctcaagccagatcatcctagatga

SEQ ID NO: 128550 - DNA, 467 bp, Homo sapiens; identical to SEQ ID NO: 93156
  misc_feature (1)...(467): n = a,t,c or g

SEQ ID NO: 128551 - DNA, 1245 bp, Homo sapiens
tgaaggaaaccggggaagccaggactggccgtcacgttggtgacaaatatgtcccagggtcttgctctgttgcccaggctggactgcagtgggaggatcatagcttattgcaacctccacctcccagggtcaggcaatcctccctcctcagcctcccgggtagttgagactacaggcacccgcccacactcacgggactcggtgaccttcgcagacgtggctgtgaacttcaccaaagaggagtggaccctgctggacccagctcagaggaatctctacagagacgtgatgctggaaaattctaggaacttggcattcatagttgcccctgagaaagatgaatctcctgttagcatttgtgaagatcatgaaatgaggaaccactctaaacctacctgcaggcttgtgccttcacagggagattccataagacaatgtatcctaacacgtgactcaagtattttcaagtataatcctgtcttaaacgatagtcaaaaaacacatgaaaacaacgaagacgatggagtcttggggtggaacattcagtgggttccgtgtgggagaaaaacagagctgaaatcaagcacatggactggcagtcagaacactgtgcatcatatacgtgatgaaattgatacgggggccaacaggcaccagcggaatccatttggaaaagctttccgtgaagacggatcccttagggcacacaacactcatggtcgagagaaaatgtatgattttactcagtgcgagaacacctccagaaataactcaattcacgccatgcagatgcagttgtataccgcagagacaaacaagaaggattgtcaaactggggcaacctctgccaacgctccaaattccggttcacacaagagtcattgcactggagagaaaacccataaatgccccgaatgtgggagagcctttttttatcagtcattccttatgagacatatgaaaattcacactggagagaaaccgtatgaatgtgggaaatgtgggaaagcctttagatattccttacaccttaataaacatttaagaaagcatgttgtgcagaagaagccctacgaatgtgaagaatgtgggaaagtcattcgggagtcctcaaaatatacacatataaggagccacactggagagaaaccctataaatgtaagacatgtggaaaagactttgcaaagtcgtcaggacttaaaaaacatcttaagactcacaaagatgagaagccctgtgaatga

SEQ ID NO: 128552 - DNA, 1445 bp, Homo sapiens
atgctgcgtgcagcagctggcgggcagggccttgctgctgcagggatggggctctgcgctcgcccagcaggtggcagccagctccccagggagaggatgaagggcaacagagcttgcctcccactcccgccggctgtggccctcacaaagggacgagagaaacctgacgccgggcatcagggaaggagcacacagatgatgcgtgagagcgagagggggccgtgcacgcactggactgaggaaaggccaggcagacagctgaagatcctgttacagaaacagatgcggcagaacacactcatggctttccaagtctcttgggacggaaggaacaaggagattgggcgcaccttccctcatgccacagcgcctcacacacagcagctcatctttgccatgaagatcaagaggacaggagttacagtggagccctgggggctttttgaaacaggacagaggatcagacccattcaagctgccgggctataactcagctcctcctctactacctgtgtggccttggcacctctattaacgatgcatgtaaagagcttagccctgttaagcgctccaaaatgggagctttgagtaccatcacctccatcaccaccaccaggaggcagacccctgcagagagtcacttccctgcggctcgctttcaccttttggcaccccactctcccaccctccctccctgttgtcctggggaaccaagcgagtcagctgtgacagtgctttgctttgcaaaagggaagactgcacaggacgcagcagttctccactacatcgctgacagcagctgggcatttggccccacggtcttaatcctcttggagtcggatgcctgtgaaggttcgcagagccccagactcgctcccagaaacaagtgcacacgcactcccgctgacgcactgaagctggttaccgagtgccagctgggggccagcttcgcgtgctcttccgggatcagaatgggtgctaaagcctgtctggcagggatcactggccctgtttcacagatcacctcatctccaggaatccccaaaccctgggcccctgcaggcctgagggagcgctcaccctcaggcccttgggttttctgtcctgcaaatccctttgtcaaactcaccaacttcaccaatgacccctcccctgcccaggcccaagatatccaactcctcactgccaagccaactcctcaagccctcttcccaaacagatggaccaattcttccagtccagtccatgtcatcacctctgcagctcaacgcacggactcctcgagagtggccggcagtcagcttctacagaaccacggccaccacagccagtctgatccctcacttatgggctccaccccaggagaactgacagacttctccagcacaaaatggatcaacactgccctgcatgtcccaagcgactttccactttcccagccctag

SEQ ID NO: 128553 - DNA, 455 bp, Homo sapiens; identical to SEQ ID NO: 119190
  misc_feature (1)...(455): n = a,t,c or g

SEQ ID NO: 128554 - DNA, 478 bp, Homo sapiens; identical to SEQ ID NO: 117934
  misc_feature (1)...(478): n = a,t,c or g

SEQ ID NO: 128555 - DNA, 2448 bp, Homo sapiens; identical to SEQ ID NO: 121935

SEQ ID NO: 128556 - DNA, 2142 bp, Homo sapiens; identical to SEQ ID NO: 118316

SEQ ID NO: 128557 - DNA, 3819 bp, Homo sapiens; identical to SEQ ID NO: 118066

SEQ ID NO: 128558 - DNA, 2880 bp, Homo sapiens; identical to SEQ ID NO: 124330

SEQ ID NO: 128559 - DNA, 3441 bp, Homo sapiens; identical to SEQ ID NO: 118068

SEQ ID NO: 128560 - DNA, 2265 bp, Homo sapiens; identical to SEQ ID NO: 116371

SEQ ID NO: 128561 - DNA, 2835 bp, Homo sapiens; identical to SEQ ID NO: 121594

SEQ ID NO: 128562 - DNA, 2112 bp, Homo sapiens; identical to SEQ ID NO: 126817

SEQ ID NO: 128563 - DNA, 2760 bp, Homo sapiens; identical to SEQ ID NO: 121968

SEQ ID NO: 128564 - DNA, 2307 bp, Homo sapiens; identical to SEQ ID NO: 124320

SEQ ID NO: 128565 - DNA, 2685 bp, Homo sapiens; identical to SEQ ID NO: 121971

SEQ ID NO: 128566 - DNA, 2337 bp, Homo sapiens; identical to SEQ ID NO: 116373

SEQ ID NO: 128567 - DNA, 1544 bp, Homo sapiens
catataaacagagccaaagacaaaaaccacatgattatctcaatagatgcagaaaaggcctttgacaaaattcaacaacacttcatgctaaaaactctcaataaattaggtattgatgggacgtattttcgcaaatcaataaatgtaatccagcatataaacagagccaaagacaaaaaccacatgattatctcaatagatgcagaaaaggcctttgacaaaattcaacaacccttcatgctaaaaactctcaataaattagacaacatcatcgtatatctcgaaaaccccattgtctcagccccaaatctccttaagctgataagcaacttcagcaaagtctcaggatacaaaatcaatgtacaaaaatcacaagcattcttatacaccaacaacagccaaacagagagccaaatcatgagtgaactcccattcacaattgcttcaaagagaataaaatacctaggaatccaacttacaagggatgtgaaggacctcttcaaggagaactacaaaccactgctcaaggaaataaaagaggatacaaagaaatggaagaacattccatgctcatgggtaggaagaatcaatatcgtgaaaatggccatactgcgcaaggtaatttacagattcaatgccatccccatcaagctaccaatgactttcttcacagaattggaaaaaactactttaaagttcatatggaaccaaaaaagagcccccgtcgccaaggcaatcctaagccaaaagaacaaagctggaggcatcacactacctgacttcaaactatactacaaggctacagtaaccaaaacagcatggtactggtaccaaaacagagatataggtcaatggaacagaacagagccctcagaaataacaccgcatgtctacaactatctgatctttgacaaacctgagaaaaccaagcaatggggaaaggattccctatttaataaatggtgctgggaaaactggctagccatatgtagaaagctgaaactggatcccttccttacaccttatacaaaaatcaattcaagatggattaaagacttaaacgttagacctaaaaccataaaaaccctagaagaaaacctaggcattaccattcaggacataggcatgggcaaggacttcatgtctaaaacaccaaaagcaatggcaacaaaagacaaaattgacaaatgggatctaattaaactaaagagcttctgcacagcaaaagaaactaccatcagagtgaacaggcaacctacggaatgggagaaaacttttgcaacctactcatctgacaaagggctaatatccagaatctacaatgaactcaaactaatttacaagaaaaaaacaaacaaccccatcaaaaagtgggcgaaggacatgaacagacacttctcaaaagaagacatttatgcagccaaaaaacacatgaaaaaatgctcatcatcactggccatcagagaaatgcaaatcaaaaccacagtgagataccatctcacaccagttagaatggcgatcattaaaaagtcaggaaacaacag

SEQ ID NO: 128568 - DNA, 2168 bp, Homo sapiens; identical to SEQ ID NO: 124328

SEQ ID NO: 128569 - DNA, 3213 bp, Homo sapiens; identical to SEQ ID NO: 116408

SEQ ID NO: 128570 - DNA, 2823 bp, Homo sapiens; identical to SEQ ID NO: 120411

SEQ ID NO: 128571 - DNA, 2274 bp, Homo sapiens; identical to SEQ ID NO: 124201

SEQ ID NO: 128572 - DNA, 3192 bp, Homo sapiens; identical to SEQ ID NO: 118064

SEQ ID NO: 128573 - DNA, 2817 bp, Homo sapiens; identical to SEQ ID NO: 127171

SEQ ID NO: 128574 - DNA, 3147 bp, Homo sapiens; identical to SEQ ID NO: 124344

SEQ ID NO: 128575 - DNA, 2616 bp, Homo sapiens; identical to SEQ ID NO: 118718

SEQ ID NO: 128576 - DNA, 3027 bp, Homo sapiens; identical to SEQ ID NO: 121190

SEQ ID NO: 128577 - DNA, 1701 bp, Homo sapiens
atggatacattcctcgacacatacactctcccaagactaaaccaggaagaagttgaatctctgaatagaccaataacaggagctgaaattgtggcaataatcaatagtttaccaaccaaaaagagtccaggaccagatggattcacagccgaattctaccagaggtacaaggaggaactgggatgccctctcttaccgctcctattcaacatagtgttggaagttctggccagggcaatcaggcaggagaaggaaataaaaggtattcaattaggaaaagaggaagtcaaattgtccctgtttgcagacgacatgattgtttatctggaaaaccccatcgtctcagcccaaaatctccttaagctgataagcaacttcagcaaagtctcaggatacaaaatcaatgtacaaaaatcacaagcattcttatacaccaacaacagacaaacagagagccaaatcatgagtgaactcccattcacaattgcttcaaagagaataaaatacctaggaatccaacttacaagggatgtgaaggacctctttgaggagaactacaaaccactgctcaatgaaataaaagaggatacaaacaaatggaagaacattccatgctcatgggtaggaagaatcaatatcgtgaaaatggccatactgcccaaggtaatttacagattcaatgccatccccatcaagctaccaatgactttcttcacagaattggaaaaaactactttaaagttcatatggaaccaaaaaagagcccgcatcaccaagtcaatcctaagccaaaagaacaaagctggaggcatcacactacctgacttcaaactatactacaaggctacagtaaccaaaacagcatggtactggtaccaaaacagagatatagatcaatggaacagaacagagccctcagaaataatgccgcatacctacaactatctgatctttgacaaacctgagaaaaacaagcaatggggaaaggattccctatttaataaatggtgctgggaaaactggctagccatatgtagaaagctgaaactggatcccttccttacaccttatagaaaaatcaattcaagatggattaaagatttaaatgttagacctaaaaccataaaaaccctagaagaaaacctaggcattaccattcaggacataggcgtgggcaaggacttcatgtccaaaacaccaaaagcaatggcaacaaaagccaaaattgacaaatgggacctaattaaactaaagagcttctgcacagcaaaagaaagtaccatcagagtgaacaggcaacctacaacatgggagaaaattttcacaacctactcatctgacaaagggctaatatccagaatctacaaagaactcaaacaaatttacaagaaaaaaacaaacaaccccatcaaaaagtgggtgaaggacatgaacagacacttctcaaaagaagacatttatgcagccaaaaaacacatgaaaaaatgctcatcatcactggccatcagagaaatgcaaatcaaaaccactatgagatatcatctcacaccaacccagaaagaagagggcagcacacctcagggccagcaggaggaaggggagtcatccaggacatgtactctcaactggcggttgggaagaagacagaaagagatagacatgtgggtcgaagtctttactggggtccgtcgtgttacccaa

SEQ ID NO: 128578 - DNA, 4437 bp, Homo sapiens
atggataccctaacatcacaattaaaagaactagagaagcaagagcaaacacattcaaaagctagcagaaggcaagaaataactaagatcacagcagaactgaaggagatagagacacaaaaaacccttcaaaaaagcaatgaatccaggagctggttttttgaaaagatcaacaaaattgatagaccagtagcaagactaataaagaagaaaagagagaagaatcaaaaagatgtaataaaaaatgataaaggggatatcaccactgatcccacagaaatacaaactacaatcagagaatactataaacaactctacacaaataaactagaaaatctggaagaaatggataaattcctggacacatacaccctcccaagactgaaccaggaagaagttgaatctctgaatagaccaataacaggctctgaaattgaggcaataattaatagcttaccaaccaaaaaaagtccaggaccagatggattcacagccgaattctaccagaggtacaaggaggaactggtaccattccttctgaaactattccaatcaatagaaaaagagggaatcctccctaactcattttatgaggccagcatcattctgataccaaagcctggcagagacacaacaaaaaaagagaattttagaccaatatccctgatgaacattgatgcaaaaatcctcaataaaatactggcaaaccgaatccagcagcacatcaaaaagctcatccaccatgatcaagtgggcttcatccctgggatgcaaggctggttcaacatattgttggaagttctggccagggcaatcaggcaggagaaggaaataaagggtattcaattaggaaaagagaaagtcaaattgtccctgtttgcagatgacatgattgtgtatctagaaaaccccatcgtctcagccccaaatctcctcaagctgataagcaagttcagcaaagtctcaggatacaaaatcaatgtacaaaaatcacaagcattcttatacaccaataacagacaaacagagagccaaatcatgagtgaactcccattcacaactgcttcaaagagaataaaatacctaggaatccaacttacaagggatgtgaaggacctcttcaaggagaactacaaaccactgctcaatgaaattaaagaggatacaaagaaatggaagaacattccatgctcatgggtaggaagaatcaatatcgtgaaaatggccatactgcccaaggtaatttatagattcaatgccatccccatcaagctaccaatgactttcttcacagaattggaaaaaactactttaaagttcatatggaaccaaaaaagagcccgccttgccaagtcaatcctaagccaaaagaacaaagctggaggcatcacgctacctgacttcaaactatactacaaggctacagtaaccaaaacagcatggtaccggtaccaaaacagagatatagaccaatggaacagaacagagccctcagaattaatgccacatatctacaactatctgatctttgacaaacctgagaaaaacaagcaatggggaaaggattccctatttaagaactggtgctgggaaaactggctagccatatgtagaaagctgaaactggatcccttccttacaccttatacaaaaattaattcaagatggattaaagacttaaatgtgagacctaaaaccataaaaaccctagaagaaaacctaggcattaccattcaggacataggcatcggcaaggacttcatgtctaaaacaccaaaagcaatggcagcaaaagccaaaattgacaaatgggatctaattaaactaaagagcttctgcacagcaaaagaaactaccatcagagtgaacaggcaacctacaaaatgggagaaaagttttgcaatctactcatctgacaaagggctaatatccagaatctacaatgaacacaaacaaatttacaagaaaaaaacaaacaaccccatcaaaaagtgggcgaaggttatgaacagacacttctcaaaagaagacatttatgcagccaaaaaacacatgaaaaaatgctcatcatcactggccatcagagaaatgcaaatcaaaaccactatgagataccatctcacagcagttagaatggcaatcattaaaacatcaggaaacaacagagcacctgggggaaggggtggctgtgggtgcagctttggcagacttaaacgttcctgcgtgccagctctgaaaagagtagcagatctcccagcacaacgctcgagctctgctaagggagagactgcctcctcaagtgggtccctgaaccccgtgccccctgactgggagaaacctcccagcaggggtcgacagacacctcatactggagaactccggctagcatctgacgggtgcctctctgggatgaagcttccagaggaaggaataggcagcagtctttgctgttctgcagcctctgctggtgatacccaggcaaatggggtccggagtggactgccagcaaactccagcagacctgcagctgaggtcctgactgttagaaggaaaactaataaacagaaaggacatccacatcaaaaccccatctgtatgtcaccatcatcaaagaccaaagaaatacaaactaccatcagagaatactataaacacctctatgaaaataaactacaaaatctagaagaaatggataaattactggacacatacaccctcccaagactaaaccaggaagaagttgaatccctgaatagaccaataacaggctctgaaattgaggcaataatgaatagcctaccaaacaaaaaaagtccaggaccagatggattcacagccgaattctaccagaggtacaaagaggagctggtaccattccttctgaaactattccaatcgatagaaaaagagggaatcctccctaactcattttatgaggccagcatcattctgataccaaagcctggcataaaaacaacaaaaaaagagagttttagaccaatatccctgatgaacatcgatgcaaaaatcctcaataaaatactggcaaaccgaatccagcagcccatcaaaaagcttatccaccacgatcaagttggcctcatccctgggttgcaaggctggttcaacatacacatatcaatagacataatccatcatataaacagaaccaatgacaaaaaccacataattatctcaatagatgcagaaaagggctttgacaaaattcaacagcccttcatgctaaaaactctcaataaactagcccaaaatctccttaagctgataagcaacttcagcaaagtctcaggatacaaaattaatgtgcaaaaatcacaagcattcctatacactaataacagacaaacagagagccaaatcatgagtgaactcccattcacaattgcttcaaagagaataaaatacctaggaatccaacttacaagggatgtgaaggacctcttcaaggagaactacaaaccactgctcattggaataaaagaagacacaaataaatggaagaacattccatgctcatggataggaagaatcaatatcgtgaaaatggtcatactgcccaaggtaatttatagattcaatgccatccccatcaagctaccaatgactttcttcacagaattggaaaaaattactttaaagttcatatggaaccaaaaaagagcccacattgccaagacaatcctaagccaaaagaacaaagctggaggcatcacgctacctgacttcaaactatactacaaggctacagtaaccaaaacagcacggtactggtaccaaaacagagatatagaccaatggaacagaacagagccctcagaaataataccatacatctacaaccatctgatctttgacaaacctgacaaaaacaagaaatggggaaaggattccccatttaataaatggtgctgggaaaactggctagccttatgtagaaagctgaaactggatcccttccttataccttatacaaaaattaattcaagatggattaaagacttaaatgttagacctaaaaccataaaaaccctagaagaaaacctaggcaataccattcaggacataggcatgggcaaggacttcaggactaaaacaccaaaagcaatggcaacaaaagccaaaattgacaaatgggatctaattaaactaacgagcttctgcacagcaaaagaaactatcatcagagtgaacacgcaacctacagaatgggagaaaatttttgcaatctacgcatctgacaaagggctaatatccagaatctacaaagaacttaaacaaatttacaagaaaaaatcaaacaaccccatcaaaaagtgggcaaaggatatgaacagacacttctcaaaagaagatgtttatgcagccaaaagacacatgaaaaaatgctcatcatcactggccatcagaaaaatgtaa

SEQ ID NO: 128579 - DNA, 2913 bp, Homo sapiens
atgggaggcccggcagcactgtgcattgctgtggtccctggtgacttggtggtggctctttgtttagaggagggcctgggctctgggatcgccacgtgggcttgctcgccctggcggatttcacaggggactcatttgacctttcgatccagcctggctgtggcggccattccagagggtctgcccatcgtcgtcatggtgacgctggtcctgggagtgctgcggatggccaagaagcgggtcatcgtgaagaagttacccatcgtggagactttaggttgctgcagcgttctctgttctgacaagacggggactctgactgccaatgaaatgacagtgacccagcttgtaacgtcagatgggcttcgtgccgaggtcagcggagttgggtatgacggtcaagggactgtgtgtcttctaccatccaaggaagtcattaaggaattttccaatgtctcagtgggaaagttagtggaggcgggctgtgttgccaacaatgcggtcatcagaaagaacgccgtgatggggcagcccaccgagggtgcattgatggccctggcgttgaaggatcaggaagacatttacttcatgaaaggggccttggaagaggtgatccgctactgcaccatgtacaacaacgggggcatccccctgccgctgacgccccagcagagaggagccggcccaggtgacacagccctgcctagtgcagccagcgccttcgcccggatgtctgctgcggagcgtaatgacgcgttccagggacttgctccaggccttgcgggagagcgtaatgagaacgggtcagtggcggaggagcagctagggacttgttgcctgagccctctgcagaccgaggaggatctgggccatgtgctggccctggcttctgggcccgagctggggcggctgacgtttctaggtcttgtgggcatcattgaccccccgagagttggcgtgaaggaagcagtccaggttctctccgagtctggtgtgtctgtgaagatgataacgggggatgccctggagacggccttggccataggaagaaacatcggcctgtgcaacgggaagctgcaagccatgtccggggaggaggtggacagcgtggagaagggcgagctggccgaccgcgtggggaaggtgtccgtgttcttcaggaccagcccaaagcacaagctcaaaatcatcaaggttcgctgggcaaggcaggcacaggctctgcaggagtcaggggcgatcgtggccatgactggggatggggtgaacgacgcagtggccctgaagtctgcagacattgggatcgccatggggcagacagggacggacgtcagcaaagaggccgccaacatgatcctggtggatgatgacttctcagccatcatggcaatcaggcaggagaaggaaataaagggtattcaattaggaaaagaggaagtcaaattgtccctgtttgcagacgacatgattgtttatctagaaaaccccatggtctcagcccaaaatctccttaagctgataagcaacttcagcaaagtctcaggatacaaaatcaatgtacaaaaatcacaagcattcttatacaccaacaacagacaaacagagagccaaatcatgagtgaactcccattcacaattgcttcaaagagaataaaatacctaggaatccaacttacaagggatgtgaaggacctcttcaaggagaactacaaaccactgctcaaggaaataaaagaggacacaaacaaatggaagaacattccatgctcatgggtaggaagaatcaatatcgtgaaaatggccatactgcccaaggtaatttacagattcaatgccatccccatcaagctaccaatgactttcttcacagaattggaaaaaactactttaaagttcatatggaagcaaaaaagagcccgcatcgccaagtcaatcctaagccaaaagaacaaagccggaggcatcacactacctgacttcaaactatactacaagggctacagtaaccaaaacagcatggtactggtaccaaaacagagatatagatcaatggaacagaacagggccctcagaaataatgccacatatctacaactatctgatctttgacaaacctgagaaaaacaagcaatggggaaaagattccctatttaataaatggtgctgagaaaactggctagccatatgtacaaagctgaaacttgatcccttccttacaccttatacaaaaattaattcaagatggattaaagacttaaacgttagacctaaaaccataaaaaccctagaagaaaacctaggcattaccattcaggacataggcgtgggcaaggacttcatgtccaaaacaccaaaagcaatggcaacaaaagccaaaattgacaaatgggatctaattaaactaaagagcttctgcacagcaaaagaaactaccatcagagtgaacaggcaacctacaacatgggagaaaattttcgcaacctactcatctgacgaagggctaatatccagaatctacaatgaactcaaacaaatttacaagaaaaaaacaaacaaccccatcaaaaagtgggcgaaggacatgaacagacacttctcaaaagaagacatttatgcagccaaaaaacacatgaaaaaatgctcatcatcactggccatcagagaaatgcaaatcaaaaccactatgagatatcatctcacaccagttagaatggcaatcattaaaaagtcaggaaacaacaggtggaatatatcagaggacccaggtttggctctgtcctgtatcaaggaggcctccatcactgtgccaagcttgcgatgtgctgtgtccattatccagggcatattgagcaactgggtacaaaagatcacaggctcagggtctatgagagcctctgttttcagagaagcctg

SEQ ID NO: 128580 - DNA, 4502 bp, Homo sapiens
atgggagactttaacaccccactgtcaacattagacagatcaatgagacagaaagtcaaaaaggatacccaggaattgaactcagctctgcaccaagcagacctaatagacatctacagaactctccaccccaaatcaacagaatatacatttttttcagcaccacaccacacctattccaaaattgaccacatacttggaagtaaagctctcctcagcaaatgtaaaagaacagaaattataacaaactatctctcagacggcagtgcaatcaaactagaactcaggattaagaatctcactcaaaaccgctcaactacatggaaactgaacaacctgctcctgaatgactactgggtacctaacgaaatgaaggcagaaataaagatgttctttgaaaccaacgagaacaaagacacaacataccagaatctctgggacgcattcaaagcagtgtgtagagggaaatttatagcactaaatgcccacaagagaaagcaggaaagatccaaaattgacaccctaacatcacaattaaaagaactagaaaagcaagagcaaacacattcaaaagctagcagaaggcaagaaataactaaaatcagagcagaactgaaggaaatagagacacaaaaaacccttcaaaaaattaatgaatccaggagctggttttttgaaaggatcaacaaaatagatagaccgctagcaagactaataaagaaaaaaagagagaagaatcaaatagatacaataaaaaatgataaaggggatatcaccaccaatcccacagaaatacaaactaccatcagagaatactacaaacacctctacgccaataaactagaaaatctagaagaaatggataaattccttgacacatacactctcccaagactaaaccaggaagaagttgaatctctgaatagaccaataacaggatctgaaattgtggcaataatcaatagcttaccaaccaaaaagagtccaggaccagatggattcacagccaaattctaccagaggtacaaggaggaactgcatataaacagagccaaagacaaaaaccacatgattatctcaatagatgcagaaaaggcctttgacaaaattcaacaacgcttcatgctaaaaactctcaataaattagtgttggaagttctggccagggcaattaggcaggagaaggaaataaagggtattcaattaggaaaagaggaagtcaaattttccctgtttgcagacgacatgattgtatatctagaaaaccccattgtctcagcccaaaatctccttaagctgataagcaacttcagcaaagtctcaggatacaaaatcaatgtacaaaaatcacaagcattcttatacaccaacaacagacaaacagagagccaaatcatgagtgaactcccattcataattgcttcaaagagaataaaatacctaggaatccaacttacaagggatgtgaaggacctcttcaaggagaactacaaaccactgctcaaggaaataaaagaggatacaaacaaatgcaagaacattccatgctcatgggtaggaagaatcaatatcgtgaaaatggccatactgcccaaggtaatttacagattcaatgccatccccatcaagctaccaatgcctttcttcacagaattggaaaaaactactttaaagttcatatggaaccaaaaaagagcccgcatcgccaagtcaatccctaagccaaaagaacaaagctggaggcatcacactacctgacttcaaactatactacaaggctacagtaaccaaaacagcatggtactggtaccaaaacagagatatagatcaatggaacagaacagagccctcagaaataacgccgcatatctacaactatctgatctttgacaaacctgagaaaaacaagcaatggggaaaggattccctatttaataagtggtgctgggaaaactggctagccatatgtagaaagctgaaactggatcccttccttacaccttatacaaaaatcaattcaagatggattaaagacttaaacgttagacctaaaaccataaaaaccctagaagaaaacctaggcaataccattcagaacataggcatgggcaaggacttcatgtctaaaacaccaaaagcaatggcaacaaaagacaaaattgacaaatgggatctaattaaactaaagagcttctgtacagcaaaagaaactacaatcagagtgaacaggcaacctacaaaatgggagaaaatttttgcaacctactcatctgacaaagggctaatatccagaatctacaatgaactcaaacaaatttacaagaaaaaaacaaacaaccccatcaaaaagtggacaaaggacatgaacagatacttctcaaaagaagacatttatgcagccaaaaagcacatgaaaaaatgctcatcatcactagccatcagagaaatgcaaatcaaaaccacaatgagataccatctcacaccagttagaatggcaatcattaaaaagtcaggaaacaacaggtcacagcttcaaaatattgttcagagaacttgcagtgaaagcaacataaaaaggagagcagggatagaaaaaggaatccagtgggcaaaagatgccaactgttcccaagagagtccagtgcgaccatcgcaacaggtgggtgcccctctgggacgaagcttccagaggaaggatcaggcagcaatatttgctgttctgcagcctctgctggtgatacccaggcaaacaaggtctggagtggacctccagcacattccagcaggcctgcagcagaggggcctgactgttagaagaaaaactaacaaacagaaaggaatagcatcaacatcaacaaaagccacatccacacagaaaccccatccaaaagtcaccaacatcaaagaccaaagtattggaagttctggccagggcattcaggcaggagaaggaaataaagggtattcaagtaggaaaagaggaagtcaaattgtccctgtttgcagatgacatgattgtatatctagaaaaccccatcgtctcagcccaaaatctccttaagctgataagcaatttcagcaaagtctcaggatacaaaatcaatgtgcaaaaatcacaagcattcttatataccaataacagacaaacagagagccaaatcatgactgaactcccatttacaactgcttcaaagagaataaaatacctaggaatccaacttacaagggatgtgaaggacctcttcaaggagaactacaaaccactgctcaacgaaataaaagaggatacaaacaaatggaagaacattccatgctcatgggtaggaagaatcaatattgtgaaaatggccatactgcccaaggtaatttatagattcaatgccatccccatcaagctaccaatgactttcttcatagaattggaaaaaactactttaaagttcatatggaaccaaaaaagagcccgcatcgccaagtcaatcctaagccaaaagaacaaagctggaggcatcacgctacctgacttcaaactatactacaaggctacagtaaccaaaacagcatggtactggtaccaaaacagagatatagaccaatggaacagaacagagccctcagaaataatgctccatatctacaactatctgatctttgacaaacctgagaaaaacaagcaatggggaaaggattccctatttaatatatggtgctgggaaaactggctagccatatgtagaaagctgaaactggatcccttccttacaccttatacaaaaattaattcaagatggattaaagacttaaatgttagatctaaaaccataaaaaccctagaagaaaacctaggcaataccattcaggacataggcatgggcaaggacttcatgtctaaaacaccaaaagcaatggcaacaaaagccaaaattgacaaatgggatctaattaaactaaagagcttctgcacagcaaaagagactaccatcagcgtgaacaggcaacctacagaatgggagaaaatttttgcaatctactcatctgacaaagggctaatatccagaatctacaatgaactcaaacaaatttacaagaaaaaaacaaacaaccccatcaaaaagtgggtgaaggatacgaacagacacttctcaaaagaagacatttatgcagccaaaagacacatgacaaaatgctcatcatcactggctgttagagaaatgcaaatcaaaaccacaatgagataccatctcacaccagttgaagaggtgagggcgggtgagatggccaagacaagaagatgccaaaatgtcaaaggtgccagtgaggaaggcatcagagctcttgctttgtttctcattaacctcactgtccatatggagggcaaccacattgatggagacattgaaattcaaaccaatagaagtcccttgcaagcccctggagaaatctgtgagtcttttactgctttgatggcaatgcaactgctcagtaaattgttttggagttga

SEQ ID NO: 128581 - DNA, 4803 bp, Homo sapiens
atgggagactttaacaccccactgtcaacattagacagatcaacgagacagaaagtcaacaaggatacccaggaactgaactcagctctgcaccaagcggacctaatagacatctacagaacactccaccccaaatcaacagaatatacatttttttcagcaccacaccacacctattccaaaattgaccacatactgggaagtaaagctctcctcagcaaatgtaaaagagcagaaattataacaaactatctctcagaccacagtgcaatcaaactagaactcaggattaagaatctcactcaaagccgctcaactacatggaaactgaacaacctgctcctgaatgactactgggtaaataacgaaatgaaggcagaaataaagatgttctttgaaaccaaagagaacaaagacacaacataccagaatctctgggacgcattcaaagcagtgtgtagagggaaatttatagcactaaatgcgcacaagagaaagcaggaaagatctaaaattgacaccctaacatcacaattaaaagaactagaaaagcaagagcaaacacattcaaaagctagcagaaggcaagaaataactaaaatcagagcagaactgaaggaaatagagacacaaaaaacccttcaaaaaatcaatgaatccaggagctggttttttgaaaggatcaacaaaattgatagaccgctagcaagactaataaagaaaaaaagagagaagaatcaaatagacacaataaaaaatgataaaggggatatcaccactgatcccacagaaatacaaactaccatcagagaatactacaaacacctctacgcaaataaactagaaaatctagaacaaatggatgcattcctcgacacatacactctcccaagactaaaccaggaagaagttgagtctctgaatagaccaataacaggagctgaaattgtggcaataatcaatagtttaccaaccaaaaagagtccaggaccagatggattcacagccgaattctcccagaggtacaaggaggaactggtaccattccttctgaaactattccaatcaatagaaaaagagggaatcctccctaactcattttatgaggccagcatcattctgataccaaagccaggcagagacacaaccaaaaaagagaattttagaccaatatccttgatgaacatcgatgcaaaaatcctcaataaaatactggcaaaccgaatccagcagcacatcaaaaagcttatccaccatgatcaagtgggcgtcatccctgggatgcaaggctggttcagtatacgcaaatcaataaatgtaatccagcatataaacagagccaaagacaaaaaccatatgattatctcaatagatgcagaaaaagcctttgacaaaattcaacaacccttcatgctaaaaactctcaataaattagcccaaaatctccttaagctgataagcaacttcagcaaagtctcaggatacaaaatcaatgtacaaaaatcacaagcattcctatacaccaacaacagacaaacagagagccaaatcatgagtgaactcccattcacaattgcttcaaagagaataaaatacctaggaatccaacttacaagggatgtgaaggacctcttcaaggagaactacaaaccactgctcaaggaaataaaagaggatacaaacaaatggaagaacattccatgctcatgggtaggaagaatcaatatcgtgaaaatggccatactgccccaggtaatttacagattcaatgccatccccccttcaaggttacccaatgactttcttcacagaattggaaaaaactaccttttaaaggtcattatggaaccaaaaaaggagcccgcatcgccaaggcaatcctaagccaaaagaacaaagctggaggcatcacactacctgacttcaaactatactacaaggctacagtaaccaaaacagcatggtactggtaccaaaacagagatatagatcaatggaacagaacagagccctcagaaataacgccgcatatctacaactatctgatctttgacaaacctgagtaaaacaagcaatggggaaaggattccctatttaataaatggtgctgggaaaactggctagccatatgtagaaagctgaaagtggatcccttccttacaccttatacaaaaattaattcaagatggattaaacacttaaacgttagacctaaaaccataaaagccctagaagaaaacctaggcattaccattcaggacataggcatgggcaaagacttcatgtctaaaacaccaaaagcaatggcaacaaaagccaaaattgacaaatgggatctaattaaactaaagagcttcctgcacagcaaaagaaactaccatcagagtgaacaggcaacctacaaaatgggagaaaatttttggaacctactcatctgacaaagggctaatatccagaatctacaatgaactcaaacaaatttacaagaaaaaaacaaacaaccccatcaaaaagtgggcgaaggacatgaacagacacttctcaaaagaagacatttatgcagccaaaaaacacatgaagaaatgctcatcatcactggccatcagagaaatgcaaatcaaaaccactatgagatatcatctcacaccagttagaatggcaatcatgaaaaagtcaggaaacaacaggtgctggagaggatgtggagaaataggaacacttttacactgttggtgggactgtaaactagttcaaccattgtggaagtcagtgtggcgattcctcagggatctagaactagaaataccatttgacccagccatcccattactgggtatatacccaaaggactataaatcatgctgctataaagatacatgcacacctctcaagaaacacatcagctttcatctttatcagtatgacactgacatgataggaaatgctgggctggtgattcagcagccatccattttacagtcagaggacaagtcgtacaatggtggaggaataggttcttcaaataggatcatggacttcttggaggagccaatccctggtgtagggacctatgatgatttcaatacaattgattgggtgagagagaagtctcgagaccgggataggcaccgagagggagcctttgcctacatagtcaattatttcatgtacgtcctctgggctctcctatttgccttccttgccgtatctcttgtcaaggtgtttgcgccttatgcctgtggctctggaatccctgagataaaaactatcttgagtggtttcattattaggggctatttgggtaagtggactctggttatcaaaaccatcaccttggtgctggcagtgtcgtctggcttgagcctgggcaaagagggccctctagtgcacgtggcttgctgctgtgggaacatcctgtgccactgcttcaacaaatacaggaagaatgaagccaagcgcagagaggtcttgtcggctgcagcagcagctggtgtatctgtagcctttggagcacctataggtggagtattattcagccttgaagaggtcagctactattttcccctcaaaacattgtggcgttcattctttgctgccttggtggcagcattcactctacgctccatcaatccatttgggaacagccgcctggtactattttatgtggagtttcacaccccatggcatctctttgagctcgtgccattcattctgctgggcatatttggtggtctgtggggagcactgtttatccgcacaaacattgcctggtgtcggaagcgaaagaccacccagttgggcaagtatcctgttatagaggtactcgtcgtgacagccatcactgccatcctggctttccccaatgaatacactcggatgagcacaagtgagctcatttctgagctgtttaatgactgtggccttctggactcctccaagctctgtgattatgagaaccgtttcaacacaagcaaagggggtgaactgcctgacagaccggctggcgtgggagtctacagtgcaatgtggcagctggctttaacactcatactgaaaattgtcattactatattcacctttggcatgaagatcccttctggcctctttatccctagcatggctgttggtgctatagcaggtcgacttctaggagtaggaatggaacagctggcttattaccaccaggaatggaccgtcttcaatagctggtgtagtcagggagctgattgcatcacccccggcctttatgcaatggttggggctgcagcctgcttagccaaagaagagtttgctcataagaccctggcaatggatgtgatgaaaccccggagaaatgatcctttgttgactgtccttactcaggacagtatgactgtggaagatgtagagaccataatcagtgaaaccacttacagtggcttcccagtggtggtatcccgggagtcccaaagacttgtgggctttgtcctccgaagagatctcattatttcaattgaaaatgctcgaaagaaacaggatggggttgttagcacttccatcatttatttcacggagcattctcctccattgccaccatacactccacccactctaaagcttcggaacatcctcgatctcagccccttcactgtgactgaccttacacccatggagatcgtagtggatattttccgaaagctgggactgcggcagtgcctggttacacacaacgggcgattgcttggaatcattaccaaaaaggatgtgttaaagcatatagcacagatggcgaaccaagatcctgattccattctcttcaactag

SEQ ID NO: 128582 - DNA, 3769 bp, Homo sapiens
atgaatgctggcaagggtatggagaaaggggaacccttttacactgctgattcagagaagactctgagaaatgtttgtggggaatctggtgatgcagtgacacaagggctgagattccctgaatctgcacaacgagtatcgcacccactgcttcagctcaggtttgggggcaatgtgagcccagctgcacaagctgaccacctggtgctctgcccacaggatgtttccagattactattggcagaattgcccaggtttgcaggggcagaggggctctctgacaattcacttctcagcagtttgtcacattgttctgatagtatcagcagtgatgaggaggagctaaggactttgggaagcagtggtagcgaaagcagtactccagagaatgtcggacctcctttcctcatggatgagaacagttggttcaacaagtgtaagagagttaaacaaaagtatcagcttaccctggaacagaagggttaccttgaagaactcttacgacttcgagagaaccaactatctgaatctgtctcccagaataaaatactacttcaaaggattgaagattccgatctggctcataaactggagaaggaacaattagaatatataattgtggagcttcaagatcagctgaacagacctaaccagctagatttgttccaagctttctgtgctgaaattgcggggctgtcccaagtgttccaggccatggggctccctcaagcagaagggttgaacaccagctgtgctggggaagctaaactgctcccaggtcactggcaaaacactcaggcggggcagtgcaggctgtgctctgtgcaccctcttacaggaatggcgaggcagaacagtgaagacaaaagcactcaccatcttaatattcacaggactgtgctaaagaataatgatttaagatcgagacaagagttaactgcccatctcaccaaccagtggccttctccaggagctctggatgtcaatgctgttgccttggatacgttgctttaccgaaaacacaataaacagtggtatgagaaaagttatcaaagtcttgaccagttatcagcagaagttagcctttctcagacttcactagatccaggccagtcacaagaaggagatggaaaacaagacacattaaatgtaatgagtgaagcaccacaccacacctattccaaaattgaccacatagttggaagtaaagcactcctcagcaaatgtaaaagaacagaaactacaacaaactgtctctcagaccacagtgcaatcaaactagaactcaggactaagaaactcactcaaaaccgctcaactacatggaaactgaacaacctgctcctgagtgactactgggtacataacgaaatgaaggcagaaataaagatgttctttgaaaccaacgagaacaaagacccaacataccagaatctctgggacacattcaaagcagtgtgtagagggaaatttatagcactaaatgcccacaagagaaagcaggaaagatccaaaattgacaccctaacatcacaattaaaagaactagaaaagcaagagcaaacacattcaaaagctagcagaagaccaataacaggatctgaaattgtgacaataatcaatagcttaccaaccaaaaagagtccaggaccagatggattcacagctgaattctaccagaggtacaaggaggaactggtaccattccttctgaaactattccaatcaatagaaaaagagagaatcctccctaactcattttatgaggccagcatcatcctgataccaaagccgggcagagacacaaccaaaaaagagaattctagaccaatatccttgatgaacattgatgcaaaaatcctcaataaaatactagcaaaccgaatccagcagcacatcaaaaagcttatccaccatgatcaagtgggcttcatccctgggatgcaaggctggttcaacatacgcaaatcaataaatgtaatccagcatataaacagaaccaaagacaaaaaccacatgattatctcaatagatgcagaaaaggcctttgacaaaattcaacagcccttcatgctaaaaactctcaataaattagtgttggaagttctggccagggcaattaggcaggagaaggaaataaagggtattcaattaggaaaagaggaagtcaaattgtccctgtttgcagatgacatgattgtatatctagaaaaccccattgtctcagcccaaaatctccttaagctgataagcaacttcagcaaagtctcaggatacaaaatcaatgtacaaaactcacaagcattcttatacaccaataacagacaaacagagagcgaaatcatgagtgaactcccattcacaattgcttcaaagagaataaaatacttaggaatccaacttacaagggatgtgaaggaccttttcaagcagaactacaaaccactgctcaatgaaataaaagaggatacaaacaaatggaagaacactccatgctcatgggtaggaagagtcaatattgtgaaaatggccatactgcccaaggtaatttacagattcaatgccacccccatcaagctaccaatgactttcttcacagaattggaaaaaactactttaaagttcatgtggaatcaaaaaagagcccccacattgccccaagtccaatccctaagcccaaaagaacaaagctgggaggcatcacggctacctgacttcaaactatacctacaaggcctacagtaacccaaaacagcatggtactggtacccaaaacagagatatagaccaatggaacagaacagagccctcagaaataacaccgcatatctacaactatctgatctttgacaaaccctgggaaaaaccaagcaatggggaaaggtttccctatttaataaatggtgctgggaaaactggctagccatatgtagaaagctgaaactggatcccttccttacaccttatacaaaaattaattcaagatggattaaagacttaaatgttagacctaaaaccataaaaaccctagaagaaaacctaggcattaccattcaggacataggcatgggcaaggacttcatgtctaaaacaccaaaagcaatggcaacaaaagccaaaattgacaaatgggatctaatttaaactaaagagcttctgcacagcaaaagaaactaccatcagagtgaacaggcaacctacagaacgggagaaaattttcgcaacctactcatctgacaaagggctaatatccagaatctacaatgaactcaaacaaatttacaagaaaaaaacaaacaaccccatcaaaaagtgggcgaaggatatgaacagacacttctcaaaagaagacatttatgcagccaaaaaacacatgaaaaaatgctcatcatcactggccatcagagcaatgcaaatcaaaaccacaatgagataccatcttacaccagttagaatggcgatcattaaaaagtcaggaaacaacagtcttattctagtgcccctattaaaaaaagaagaacgtgctttgcagagtgacaccactacaaagccaagtagaaccagtgtccaaaggtcaccaattcaagataagcccagatttggcattcatctgaagagtccagtaaagatccagaggacatcgtgtcagttcaagtgtggcaggccaggtctcactaacacaggcctccgtaacaactgtttccatactgaccgagtggttaagttaaatattgaaagtcaaagcccttatacaaagcctgggatataa

SEQ ID NO: 128583 - DNA, 3443 bp, Homo sapiens
atgaagcgagaaggaagtttagagaaaaaaagaataaaaagaaatgaacaaagcctccaagaaatatgtgactatgtgaaaagagcaaatctacgtctgattggtggacctgaaagtgacggggaaaatggaaccaagttggaaaacactctgcaagatatgcaggagaaattccccaatctagcaaggcaggccaacattcaaattcaggagatacagagaacgccacaaagatactcctcaagaagagcaactccaagacacataattgtcagattcaccaaagttgaaatgaaggaaaaaatgttaagggcagccagagagaaaggtcaggttacccacaaagggaagtccatcagactaacagctgatctctcggcagaaactctacaagccagaagagagtgggggccaatattcaacattcttaaagaaaagaattttcaacccagaatttcatatccaggcaaactaagcttcataagtgaaggagaaataaaatcctttacagacaagcaaatgctgagagattttgtcaccaccaggcctgccctaaaagagctcctgaaggaagcactaaacatggaaaagaacaagcagtaccagccaccacaaaaacatgccaaattaactagagaagcaagagcaaacacattcaaaagctagcagaaggcaagaaataactaaaatcagagcagaactgaaggaaatagagacacaaaaaaccgttcaaaaaattaatgaatccaggagctggttttttgaaaggagcaacaaaatttacagaccgctatcaagactaataaagaaaaaaagagagaagaatcaaatagacacaataaaaaatgataaaggggataccaccactgatcccacagaaatacaaactaccatcagagaatactacaaacacctctatgcaaataaactagaaaatctagaagaaatggataaattcctcgacacatacactctcccaagactaaaccaggaagaaattgaatctctgaatagaccaataacaggaactgaaattgtgacaataatcaatagtttaccaaccaaaaagagtccaggaccagatggattcacagccgaattctaccagaggtacaaggaggaactggtaccattccttctgaaactattccaatcaatagaaaaagagggaatccttcctaactcattttatgaggccagcatcatcctgatagcaaagccgggcagagacacaaccaaaaaagagaattttagaccaatatccttgatgaacattgatgcaaaaatcctcaataaaatactggcaaaacgaatccagcagcacatcaaaaagcttatccaccatgatcaagtgggcttcattcctggaatgcaaggctggttcaatatacgcaaatcaataaattgtaatccagcatataaacagagccaaagacaaaaaccacatgattatctcaatagatgcagaaaaagcctttgacaaaattcaacaacgcttcaggctaaaaactctcaataaattaggtattgatgggacgtatttcaaaataataagagctatctatgacaaacccacagccaatatcatactgaatgggcaaaaactgaaagcattccctttgaaaactggcacaagacagggatgccctctctcaccactcctattcaacatagtgttggaagctctggccagggcaattaggcaggagaaggaaataaagggtattcaattaggaaaagaggaagtcaaattgtccctgtttgcagacgacatgattgtatatctagaaaaccccattgtctcagcccaaaatctccttaagctgataagcaacttcagcaaactgaatctgcaaactcaggaatacaaaatcaatgtgcaaaaatcacaagcattcttatacaccaataacaggcaaacagagagccaaatcatgagtgaactccccattcacaattgcttcaaagagaataaaatacctaggaatccaacttacaaggtacgtgaaggacctcttcaaggagaactacaaaccactgctcaaggaaataaaagaggatacaaacaaatggaagaacattccatgctcatgggtaggaagaatcaatatcgtgaaaatggccatactgcccaaggtaatttacagattcaatgccatccccatcaagctaccaatgcctttcgtcacagaattggaaaaaactactttaaagttcatatggaaccaaaaaagagcccacattgccaagtcaatcctgagcaaaaaggaacaaagctggaggtatcacactacctgacttcaaactatactacaaggctacagtaaccaaaacagcattgtacttgtaccaaaacagagatgtagatcaatggaacagaacagagccctcagaaataatgctgcatatctacaactatctgatctttgacaaacctgacaaaaacaagcaatgggggaaaggattcccatatttaataaatggtgctaggaaaactggctaaccatatgtaaaaggctgaaactggatcccttccttacaccttatacaaaaaatcaaattcaagatggattaaagacttaaaatgttagacctaaaaaccataaaaaaccctagaagaaaacctaggcaataccattcaggacataggcatgggcaaggacttcatgtctaaaacacccgaaagcaatggcaacaaaagccaaaacagacaaaggggatttagttaaactaaagaactttctgcacatgcaaaagagaaactaccatcagagtgaacaggcaacctacagaatgggagaaaatctttgcaatctactcatttgacaaagggctaatatccagaatctacaaagaactcaaacaaatttacaagaaaaaaaaaacaaacaatcccatcaaaaagtgggcgaaggatatgaacagacacttctcaaaagaagacacttatgcagccaaaaaacacatgaaaaaatgctcagcatcactggccatcagagaaatgcaaatcataaccgcaatgagataccatctcacaccagttagaatggcaatcattaaaaagtcaggaaacaacaggtgctggaggggatgtggagaaataggaacacttttacactgttggtgggactgtaaactagttcaaccattgtggaagtcagtgtggcgattcctcagggatctagaactggaaataccatttgacccagccatcccattactgggtatatacccaaaggactataaatcatgctgctataaagacacatgcacactaacttggatggagctagaagccattattctaagtgaagtactcaggaatggaaaaaccaaaaaccgtatgttctcacttataagtgggaaccaagatacgggtatgcaaaggcatacagaattctatgatggactttggcgactcagaagagggagggttgaggggg

SEQ ID NO: 128584 - DNA, 8157 bp, Homo sapiens
atgcacattgttgtagaaacagctctgtcagcttcatggcagaacaaggccaagcccccagctagggttctgcttcaggtggtccccaatgtgtggttccttgtggctgttgtgtgggaactgtatccatctttggatctcatggatcgttccatagaatgcagttcctcaccagcaacggaacaaagctggacagagaatgactatgacaagctgagagaagaaggcttcagacgatcaaattactctgagctacaggaggacattcaaaccaaaggcaaagatgttgaaaactttgaaaaaaatttagaagaatgtataactagaataactaatacacagaagtgcttaaaggagctgatggagctgaaaaccaaggctcgagaactacgtgaagaatgcagaagcctcaggagccgatgcgatcaactggaagaaagggtatcagtgatggaagatgaaatgaatgaaatgaagcaagaagggaagtttagagaaaaaagaataaaaagaaatgagcaaagcctccaagaaatatgggactatgtgaaaagaccaaatctacgtctgattggtgtacctgaaagtgatggggagaatggaaccaagttgaaaaacactctgcaggatattatccaggagaacttccccaatctagcaaggcaggccaaagttcagattcaggaaatacagagaatgccacaaagatattccttgacaagagcaactccaagacacataattgtcagattcaccaaagttgaaatgaaggaaaaaatgttaagggcagccagagagaaaggagcacccagattcataaagcaagtcctgagtgacctacaaagagacttagactcccacacattaataatgggagactttaacaccccactgtcaacattagacagatcaacgagacagaaagtcaacaaggatacccaggaattgaactcagctctgcaccaagtggacctaatagacatctacagaactctccaccccaaatcaacagaatacacatttttttcagcaccacaccacacgtattccaaaattgaccacatacttggaagtaaagctctcctcagcaaatgtaaaagaacagaaattataacaaactatctctcagaccacagtgcaatcaaactagaactcaggattaagaatctcactcaaaaccgctcaactacatggaaactgaacaacctgctcctgaatgactactgggtacataacgaaatgaagctagaaataaagatgttctttgaaaccaacgagaacaaagacacaacataccagaatctctgggacgcattcaaagcagtgtatagagggaaatttatagcactaaatgcccacaagagaaagcaggaaagatccaaaattgacaccctaacatcacaattaaaagaactagaaaagcaagagcaaacacattcaaaagctagcagaaggcaagaaataactaaaatcagagcagaactgaaggaaatagagacacaaaaaacccttcaaaaaattaatgaatccaggagctggttttttgaaaggatcaacaaaattgatagatagatcactagcaagagtaataaagaagaaaggagagaagaatcaaatagacacaataaaaaatgataaaggggatatcaccaccgatcccacagaaatacaaactaccatcagagaatcctataaacacctctatgcaaataaactagaaaatctagaagaaatggataaattcctcgacacatacaccctcccaagactaaaccaggaagaagttgaatctctgaatagaccaataacaggctctgaaattgtggcaatagtcaatagcttaccaaccaaaaagagtccaggaccagatggattcacagccgaattctaccagaggtacaaggaggaactagtacccttccttctgaaactcttgcaatcaatagaaaaagagggaatcctccctcactcattttatgaggccagcatcatcctgataccaaagcctggcagagacacaacaaaaaaagagaattttagaccaatatccttgatgaacattgatgcaaaaatcctcaataaaatactggcaaaccaaatccagcagcacatcaaaaagtttatccaccatgatcaagtgggcttcatccctgggatgcaaggctggttcaatacatgcaaatcaataaatgtaatccagcatataaacagaaccaaagacaaaaaccacatgattatctcaatagatgcagaaaaggcctttgaaaactggcacaagacagggatgccgtctttcaccattcctattcaacatagtgttggaagttcaggccggggcaatcaggcaagagaaagaaataaagcgtattcaattaggaaaagaggaagtcaaattgtccctgtttgcagaagacatgatggtatatttagaaaaccccatcgtctcagcccaaaatctccttaagctgataagcaactttagcaaagtctcaggatacaaaatatacaaaatcgatgtgcaaaaatcaccaagcattcctatacaccaataacacagacaaacaagagagccaaatcatgagtgaactcccatttcacaattgcttccaagagaattaaatacctaggaatccaccttacaagggacgtgaaggacctcttcaaggagaactacaaaccactgctcaaggaaataaaagaggacacaaacaaatggaagaacattccatgctcatgggtaggaagaatcaatatcgtgaaaatggccatacttgcccaaggtaatttacagattcaatgccatccccatcaagctaccaatgactttcttcacagaattggaaaaaaactactttaaagttcactactggaaccaaaaaaggagcctgcattgccaagtcaatcctaagccaaaagaacagagctggaggcatcacgctatctgacttcaaactgtactacaaggctacagtaaccaaaacagcatcggtactggtaccaaaaacagagatatatagaccaatggaacagaatagagcccctcagaaataacgccacatatatctacactattctgatcctttggacaaacctgagaaaaacaagcaatgggggaaaggattcccttatttaataaatgggtgctgggaaaaactgggctagcccatatgtaggaagctgaaacttggatccccttcccttacaccttatacaaaagttaattcaagatggattaaagactttaaatgttagacctaaaccccataaaaaaccctagaaggaaaacctaggcaatacccatttcaggacataggcatgggcaaggacttcatgtctaataaaacaccaaaagccaatggccaacaaaagcccaaaattgacaaatgggatctaattcaactaaagagcttctgcacagcaaaagaaactaccatcagagtaaacaggccaacctacaaaatgggagaaaaaatttttgcaatctacatcatctgacaaaagggctaatatccagaatctacaaagaacttaaaaacaaatttacaagaaaaaatcaaacaaccccatcaaaaagtgggcaaaggatatgaacaggcacttctcaaaagaagacatttatgcagccaaaaaaacacatgaaaaaatgctcaaccatcactggccatcagagtaatgcaaatcaaaaccacaatgagataccatctcacaccaagttagaatggcgatcattaaaaaggtcaggaaacaacagagacgttggcaatgtggttgaagccatgtatggggaccttcctcctccaattatgctgattggacatagcatgggtggtgctattgcagtccacacagcatcatccaacctggtaccaagcctcttgggtctgtgcatgattgatgttgtagaaggtacagctatggatgcacttaatagcatgcagaatttcttacggggtcgtcctaaaaccttcaagtctctggagaatgctattgaatggagaaatatcaaagatctatcttgggcagatagcatcaagaatgtagctgctgccagcttggcttgtatctcaggtgccctgcctgcttccgcagtaacaacaagcccagataataagaggatggccaggaatgtcttgaaatatgaaaggctcttggcagagagccccaaccacgtggtagctgaggctgtcatccagaggcccaatataccccacctgcagaccagagacacctacgaggggctatgtcagaccctgggttcccagcccactctctaccagatccctagcctctactgttcctatgagaccaattccaacgcctacctgctgctccagcccatccggaaggaggtcatccacctggagccctacattgctctctaccatgacttcgtcagtgactcagaggctcagaaaattagagaacttgcagaaccatgggaacagagctcctcaccagcaacggaacaaagctggatggagaatgactttgatgagttgagagaagaaggcttcagacgatcaaactactccgagctacaggaggaaattcgaaccaatggcaaagaagttaaaagctttgaaaaaaaattagacgaatggataactagaataaccaatgcagagaagtccttaaaggacctgatggagctgaaaaccaaggcacgagagctacgtgacgaatgcagaagcctcagtagccgatgcaatcaactggaagaaagggtatcagtgatggaagacgaaatgaatgaaatgaagcaagaagggaagatcaaaagagacaaagaaggccattacataatggtaaagggatcaattcaacaagaagagctaactatcctaaatatatatgcacccaatacaggagcacccagattcataaagcaagttctgagtgacctacaaagagacttagactcccacacattaataatgggagactttaacacctcactgttaacattagacagatcaatgagacagaaagtcaacaaggatacccaggaattgaactcatctctgcaccaagcggacctaatagacatctacagaactctccaccccaaatcaatagaatatacatttttttcagcaccacaccacacctattccaaaattgaccacatagttggaagtaaagctctcctcagcaaatgtaaaagaacagaaattataacaaactatctctcagaccacagtgcaatcaaactagaactcaggattaagaatctcactcaaagccgctcaactacatggaaactgaacaacctgctcctgaatgactactgggtacataacgaaatgaaggcagaaataaagatgttctttgaaaccaacgagaacaaagacacaacataccagaatctctgggacgcattcaaagcagtgtgtagagggaaatttatagcactaaatgcccacaagagaaagcaggaaagatccaaaattgacaccctaacatcacaattaaaagaactagaaaagcaagagcaaacacattcaaaagctagcagaaggcaagaaataactaaaatcagagcagaactgaaggaaatagagacacaaaaaacccttcaaaaaatcaatgaatccaggagctggttttttgaaaggatcaacaaaattgatagaccgctagcaagactaataaagaaaaaaagagaggagaatcaaatagacacaataaaaaatgataaaggggatatcaccaccgatcccacagaaatacaaactaccatcagagaatactataaacacctctacgcaaataaaccagaaaatctagaagaaatggataaattcctcgacacatacactctcccaagactaaagcaggaagaagttgaatctctgaatagaccaataacaggagctgaaattgtggcaataatcaatagtttaccaaccaaaaagagtccaggaccagatggattcacagccgaattctaccagaggtacaaggaggaactggtaccattccttctgaaactattccaatcaatagaaaaagagggaatcctccctaactcattttatgaggccagcatcattctgataccaaagccgggcagagacacaaccaaaaaagagaattttagaccaatatccttgatgaacattgatgcaaaaatcctcaataaaatactggcaaaccgaatccagcagcacatcaaaaagcttatccaccatgatcaagtgggcttcatccctgggatgcaaggctgccaatatcatactgaatgggcaaaaactggaagcattcctttgaaaactggcacaagacagggatgccctctctcaccactcctattcaacacagtgttggaagttctggccagggcaatcaggcaggagaaggaaataaagggtattcaattaggaaaagaggaagtcaaattgtccctttttgcagacgacatgattgtttatctagaaaaccccatcgtctcagcccaaaatctccttaagctgataagcaacttcagcaaagtctcaggatacaaaatcaatgtacaaaaatcacaagcattcttatacaccaacaacagacaaacagagagccaaatcatgagtgaactcccattcacaattgcttcaaagagaataaaatacctaggaatccaatttacaagggatgtgaaggacctcttcaaggagaactacaaaccactgctcaaggaaataaaagaggatacaaacaaatggaagaacattccatgctcatgggtaggaagaatcaatatcgtgaaaatggccatactgcccaaggtaatttacagattcaatgccatccccatcaagctaccaatgactttcttcacagaattggaaaaaactactttaaatttcatatggaaccaaaaaagagcccgcatcgccaagtcaatcctaagccaaaagaacaaagctggaggcatcacactacctgacttcaaactatactacaaggctacagtaactaaaacagcatggtactggtaccaaaacagagatatagatcaatggaacagaacagagccctcagaaataacgccgcatacctacaattatctgatctttgacaaacctgagaaaaacaagcaacggggaaaggattccctatttaataaatggtgctgggaaaactggctagccatatgtagaaagctgaaactggatcccttccttacaccttatacaaaaatcaattcaagatggattaaagatttaaacgttagacctaaaaccataaaaatcctagaagaaaacctaggcattaccattcaggacataggcgtgggcaaggacttcatgtccaaaacaccaaaagcaatggcaacaaaagccaaaattgacaaatgggatctaattaaactaaagagcttctgcacagcaaaagaaactaccatcagagtgaacaggcaacctacaacatgggagaaaattttcgcaacctactcatctgacaaagggctaatatccagaatctacaatgaactcaaacaaatttacaagaaaaaaacaaacaaccccatcaaaaagtgggcgaaggacatgaacagacacttctcaaaagaagacatttatgcagccaaaaaatacatgaaaaaatgctcatcatcactggccatcagagaaatgcaaatcaaaaccacaatgagataccatctcacaccagttagaatggcaatcattaaaaagtcaggaaacaacaggtgctggagaggatgtggagaaataggaacacttttacactgttggtgggactgtaaactagttcaaccattgtggaagtcagtgtggcgattcctcagggatctagaactagaaataccatttgacccagccatcccattactgggtatatacccaaatgactataaatcatgctgctataaagacacatgcacacgaaaaatacgaacaaatgggagaaattgtgccagcaaaaaaggaaacatcaacaaagaagctagaagcctatttaaccactggcccctgcaaaggccaaggcgagtgtatagcctgcacgttctctgtggagacaccgcgttcaggcacggtttgagacctgcccaccatcatccatcattggactgcctgtcctcaacccaccatggagaacaagcttttctaagggaaggacatctgcaggataaaatgggaaaagaggaag

SEQ ID NO: 128585 - DNA, 390 bp, Homo sapiens
cagagagctgggctgtagctccaagcggaaaccgcggcagccgagcccagctaggaatgcacacctcctgaaaaccaagccgaggactgcggcgtccggtgtccacgcacagtgtcagcttgctctggtgcaaccagcacgtcttccagtatgaatcccacagaaacctaggctgtaaaaacagaacctgagatgaagtcacaggcaaccaagctgtctgtggttcatgagaaaaaatcccaagaaggaaagccgaaagaacacacagagccaaaaagcctacccaagcaggcatcagatacaggaagtaacgatgctcacaatataaaagcagtttccagatcagctgaacagcatccatcagagaattcaacagatccaaatactgaa

SEQ ID NO: 128586 - DNA, 660 bp, Homo sapiens
ctacttctccggattgttgggaggagggtcgaagcgtagactggccacgcccgggtcccgctctctcgttgcacaactgcaagctagatctgggcatcgaaggaggaacgctgcaacctccaaccccttctttctgaccaaccgggaccagagcagtgcgacaaggaggaggagtcgccaagaaacacagttaaactcagaacgcacggtatcgccagggtcgcgatagtaggaaaagcgcacgtcccgagcctggggagtccgctgcagggaccaggccccggacacgcagggcaggtagccgggggcacagggcctagaaccgggagcacgcgcggtgacatttgcagaagtgtgggaagatacagtctgtgcctctgaactgtgaactgatacccatctaacatcaatacttaaacccaaagtactcccgtgttcctgtcctgggataggtgcaagttcgtcatggcccctcagattaggtattcttttgtacttcatgaccatggccttatttgctctcctacccactgagtatgaatttttacagatatcatgatcacatactgaaacttctggtccagtatacgttgtatttgcttcttcagtttcttcaggtcctcctaaagtatctattaagtcatccaaagcagcattcat

SEQ ID NO: 128587 - DNA, 1089 bp, Homo sapiens
atggtggacaatgatgtgccttggccattggtggtagcacaggaaaaaggacagcctgatctctgtctgtcctccaaaggctacaggccccttgcactagtacaactggatttccatcaggtgtcagtaacatctaagattttcattttgtccggggctctacgcagtttaactggagccgccacagctgattggacctgcagagtactggttatttaccctcatgatatcatggctgattcggagtgcaactcactgctggtgcccagcaccacaagaaagatcatgaagcatatgctagcctcagaaaagatcaaaactcaaaattttaactacaatgtcgatgaatgtgtatcacttttataccatcacaaagccaataaattggaggcagctgaggcccggcaagaatgcgagctattgagggtggcgtcagtgagccggcactgctgggggacccagcgcaccctcacagctgctggcccaggtgctaagcccctcactgcctggggccagcccgtgccccgaatgcgaggcctgccaagcccgcaaccacctggaacttgcgcagctcgcgagcgccatgcgcagccccggttcccacccagagctgggctggagctccaagcggaaccgcgggagccgagcccagctaggaatgcagacctcctgaaaaccaagcgaggactgcggggtccggtgtccacgcagaggcctgtgcccccgctacctgccctgcgtgtccggggcctggtccctgcagcggactccccagctcgggacgtgcgcttttcctactatcgcgaccctggcgataccgtgcgtctgagtttaactgtgtttcttggcgactcctcctccttgtcggtaacatgttactgccccttccgccgggaaatgtatctggtgaccggacgcgtaggttacaaaacaagggatttgtgtggcccggtacaagtggcccgagacaatggcccgagacaagtggcccaaaagaaggaaagcagcagctatgtcagttggtttggcacctttatctctagggttggagatagatctcctcctccccgccgtgccgccaccctgtga

SEQ ID NO: 128588 - DNA, 644 bp, Homo sapiens
cctcaacaacctttgcccttgacctgatattgataacatcttttcagaatttggtgcaaaaagcaaaccatatcttaccgttgatcagatgatggattttatcaaccttaagcagcgagatcctcggcttaatgaaatactttatccacctctaaaacaagagcaagtccaagtattgattgagaagtatgaacccaacaacagcctcgccagaaaaggacaaatatcagtggatgggttcatgcgctatctgagtggagaagaaaacggagtcgtttcacctgagaaactggatttgaatgaagacatgtctcaccccctttctcactatttcattaattcctcgcacaacacctacctcacaggtatgaattttctagttctttgttactttagccagtctcaccaaatttcaccaacctctactttctgttgttcggaagctgaagtgtgttttcttccatttcctgcgaagtgcctctgagaactctggggttccaccactaaagcctcccgcctcccataagcagtcatgtccacatgtgtatgaagcaatagcatcatttctccacagcctaagtttttaagtcttctaaaatgcaaccggcttgacatttcagatcattggggattttgtgtacctg

SEQ ID NO: 128589 - DNA, 1248 bp, Homo sapiens
atttatgctagactatggaagagatgtaaataaagtgaaggccatggtccttgctcactaaggctcaggcccatctacttagacacttctgcttcaataggttctggctgcttgggaataccagcagcaactttctggaacaccttctgggaaaggagccacagagcttctctcttcaggacatcaggcttgtctgcggtttctcctagacttgaggacaaggaagcctcggtatgagaatgtcctcaggaccaagcagaagaatgtacctttttggagacattcagcccctccctactccttccttctaaacttagcccatcggcaatcaacgctgtaaaagaatgcattcacatcctttctaacttcatttcctccaggacaaatatcagtggatgggttcatgcgctatctgagtggagaagaaaacggagtcgtttcacctgagaaactggatttgaatgaagacatgtctcagcccctttgcttcatgggaatctggggtttgttttgttggtgttttatagctggccaactggctggaaactcctctgttgagatgtatcgccaagtgctcctgtctggttgtcgctgtgtggagctggactgctggaagggacggactgcagaagaggaacctgtaaaaattctggcatactgaatatacatgtgttctcatttttaggaagtgatagaagcaattgcggagtgtgcatttaagactttaagcctccctactttccttcttctgttcttgttctcccttagcccaaagcagcaagccaagatggcggagtactgccgactgatagggagcagtatttttaaagaatatgcctttcatttctattagctggaatctggagttcctcttccaagccctatggatttaatgtataaaattttggtgaaaaataagaagaaatcacacaagtcatcagaaggaagcggcaaaaagaagctctcagaacaagcctccaacacctactgttgaaatggtgacatgatgatctgttattaaaatttgacaggagaagctgatacggaaagtgacgaatgctgactctggaaatgttttcttttttattcctacttccaggggactgctggaagtgaggctatggccacagaagaaatgtctaatctggtgaactttctcaccttccccttttttgttttgttgttgcttaactcagaaagaaataaaagttttgaaatgtcttccttcgtggaaaccaaaggacttga

SEQ ID NO: 128590 - DNA, 647 bp, Homo sapiens
gagtgaagctacagaccttcacagagagtgttacagctcataaaggcagcgtggacccaaaaagtgagcagcagcaagatttatcgcaaagagccaaagaacaaagccttcacaatgcagaagggcaccccaaccgcccttgggcggttgatgggactgggtgccatgaagcaaggggcagcgctagtccgggaccgggtgccatggagcagggggcagcactagtccgggaggctcaggccgtgcaggagcccacggcagggggtgggggagactcaggcatggcgggctgcaggtcccgagccctgccccgtggggaggcagctaaggcccagcgagaaatcaagcgcagctccggtgggccggcactgatgggggacccggtgcaccctccgcagctgctagcccgggaacatgatattagtgggcagcacttagttgctggggagaaagaagcagagtcagaagatgaagaggaggaggacatgaaactcttaggtacccctgaagggggtagcaagtttacacagaaaaaagtaaaacttgctgctgatgaagatgatgatatgatgatgcagatgatgatgatgatgatgatgatgatgatgattttgatgatgaggaaactgaagaaaaagctccagtga

SEQ ID NO: 128591 - DNA, 950 bp, Homo sapiens
  misc_feature (1)...(950): n = a,t,c or g
ttcccggggcgacccacgcgtccgcaccaccaggggtcttaaggttgaagtgtggttcagggccagtgcatattattggacagcacttagtagctgtggaggaagatgcacagtcacaagatgaagaggaggaggatgtgaaactcttaagtatatctggaaagcggtctgcccctggaggtggtagcaaggttccacagaaaaaagtaaaacttgctgctgatgaagatgatgacgatgatgatgaagaggatgatgatgaagatgatgatgatgatgattttgatgatgaggaagctgaacaacaagcgccagtgaagaaatctataccgagatactccagccaaaaatgcacaaaagtcaaatcagaatggaaaagactcaaaaccatcatcaacaccaagatcaaaaggacaagaatccttcaagaaacaggaaaaaactcctaaaacaccaaaaggacctagttctgtagaagacattaaagcaaaaatgcaagcaagtataggaaaaaaggtggttctcttcccaaagtggaagccaaattcatcaattatgtgaagaatttgctcccggatgactgaccaagaggctatttcaagatctttggcggtggaggaggtctctttaagaaaatagtttaaacaatttgttaaaaaattttccgtcttatttcatttctgtaacagttgatatctggctgtcctttttataatgcagagtgagaactttccctaccgtgtttgataaatgttgtccaggttctattgccaagaatgtgttgntcaaaatgcctgtttaagttttaaagatggaacttcacccctttgctgggtttaagtatgtatggaatgttatgataggacatagtagtagcggtggtccgacatggaaatggtgtgggagacacagatatacatgtgaaataaaactccggattttaataaagt

SEQ ID NO: 128592 - DNA, 1974 bp, Homo sapiens
atgatgacgtcaaacgcaatggctcccgcgggttgtggtcggagcgctggcgggggcgggatcgtgacgttaagggcggtgcccagtcagcgaggtaggtcgggaaggcagccggcggccccagatctagaaccgctgcagtgccgagcttccagggacgtgaagccggaaagccaggcgcccttcttgactgcgcctaggtggaactggccctccagcagcttgaacgtttgccattttcccattcaactttgcgcagtctcatccacgctgatgacgccacaaatccgtgtctctaacctggatccagctcaaaacccccagacccctatcattcagctccctaggggacaatttcagctggaagtcctgcgaactcctcacaatccacttatgaaaagcgcattcatgttttcctttaggacccctctcctaccaccatctctgttccagcttggtaaaactggccagttgtccaaggcaaagagaagagctctatctgcagtcatccctcacacctacctccaccctaagatcatggtatacgttcaaagatggaaacgacatatccttcaaaagaaaggggaaggaaaatgtgcattgcagattgctggacaacagcgctggatagaagaggttgggggtggttggaggaagctgtacactgtgcctaccacctgcccactgctgaacagggcacccatctggttatatcaggcagagaggaatctcgaacacagagagagggagcctacgcaaggtctcccaatttacacatcacagaaccacattctgcgacaaagcctgtctttggcatcttcccacatcccaagcagaggaagaggaagcacaggcctcaccttggaatcagggaagggagcagaaagcctggcaggatggagcaggggcagagacctcatgggtgcacaggaaggagaactgagaaatgaaatgaagcctctagattatagaacagaaggattttgtggcaaggtcatgaaacgagtgcgtaccgagcagattcagatggcagtgtcctgctacctcaaacgccggcagtacgtggactcagatggtcccctgaagcaaggactgcggctgtcacagactgctgaagagatggcggccaatctaacagtgcaatcagaatctggttgtgccaacatagtgtctgcagccccttgccaggcagaaccccagcaatatgaagtacagtttggacgactgcggaattttctcactgattctgattcccagcatagccacgaagtgatgcctctcctctatcctctctttgtctacctccatctcaacctggtccaaaacagtccgaagagcacagtggaaagtttttacagccgcttccatggaatgtttctgcagaatgctagccagaaggatgtcattgagcagctacagaccactcaaaccatccaggacatcctatctaacttcaagcttcgagcattcctagataacaagtacgtggtccgtctccaagaagacagctacaactaccttatccgctacctccaaagtgacaacaatactgccctgtgcaaagtcctcaccttacatattcatcttgacgtgcagcctgccaagagaacagactatcagctgtatgccagtggcagctcctcccgcagtgagaacaacggtttggagccccccgacatgcccagccctattctgcagaacgaggctgccctagaggtcttacaggagagcattaagcgagtcaaggatgggcctccctccctcactaccatctgcttctatgccttctataacacagagcagctgttgaacactgcagaaatctcccccgatagcaagctgcttgctgctgggtttgacaactcctgtataaaactttggagtttacgatccaagaagttaaaatcagagccccaccaagtagacgtgtcccgcatccatttggcttgtgatattctggaggaggaggtatga

SEQ ID NO: 128593 - DNA, 1246 bp, Homo sapiens
  misc_feature (1)...(1246): n = a,t,c or g
gcggccgcccagagcggcggcgagggcggcggggcgcggggctccaggacacagctgagccggcggtcagagcgagacctgcagcagagacgacggaggcggaagcatctcgatccgggaggcggcggcgtggggacggggccgctggggagccggggccgcctggggagccggggccgcctgggatgttcagtcatgaaatgagtgcgtaccgaggagatccagatggcagtgtcctgctacctcaaacgctggcagtacgtggactcagacgggtcccctgaagcaaggactgcggctgccacagactgctgaagagttggcggccaatctcacggtacacagagaatctcattgtgccgacatagtgtctgcagtcccttggccaggcagagccccagcaatatgaagtacatgtttggacgactgcggaattttctcatcgattctgattccccgcatagccacgaagtgatgcctctcctttatcctctctttgtctgcctccatctcagcctggtccagaacagtccaaaaagtacagtggaaagtttttacagccgcttccatggaatgtttctgcagaaagctagcccagaagggcgtcattgagcagctacagaccactcaaaccatccaggacatcctatctaacttcaagcttcgagcattcctagataacaattacgtggtccatctccaagaagacagctacaactaccttatccactacctccaaagtgacagctatactgccctgtgcaaaatgtttatcttacttattcatcttgatgtgcagcctgccaagacaacagactaacagctgtatgcaagtggcagctcctcccgcagtgagaacaattacttggaggcccctgatatgcccagccctattctgcagaacgatgctgccctggaggtcttacaggagcgcattaagcaagtcaaggatgggtgtccctccctcactaccgtctgcttctataacacctagcagctgttgaacactgcagaaatctcccctgatagcaagctgcttgctgctgggtttgacaactcctgtataaaactttggagcttacaatccaggaagttaaaatcagagtcctgtcaagtagacatgtcccgcatccatttggcttgtgatattctggaggagcatgtgtgcgnacgcgtgggcggacgcgtgggcggacgcgtggtcnaccnnatgccgacgncttcagtcatcatttnnnnnnacgct

SEQ ID NO: 128594 - DNA, 384 bp, Homo sapiens
aagggagcaagctcccggagccggtggcgcatcaccatgacccagtcggtggtcgtacaggtcggccagtgcggaaaccagatcggctgctgcttctgggacctggcactaagggagcacgccgcggtcaaccaggtacccgcccgccgccgcgagccccctcgcctgtcagctaggtcttccagcccatacgcaggaaataatcgacttgagctttcatctgacccgtttaagatgcatgggatcttcccagtaaagaacgtactggtttttaaacatgttgcgtcagacacacactaaactaaaagaacactggccagcgaccttagtcttaacgtttttcctgattctcagggtctcctctttattggtgttcgtgtgcac

SEQ ID NO: 128595 - DNA, 1156 bp, Homo sapiens
agcgccgttgctgggggaatgcagaagcggccgcgggctagcaagctcccggagccggcggcgcaccaccatgacccagtcggtggtcgtacagggtaagctacgccgggcgggtagagacctggtcgccgcggaatccagcggccatgtttcctgcttaatgtcctattctctttccttcctctcctccggtcgcagtcggctggcactaagggagcacgccgcggtcaaccaggtacccgcccgccgccgcgagccccctcgcctgtcagctaggtcttccagcccatattcttttcatttacagagtgaataactctaaaagaaaatacattaattatattttatttttctttctcaggcagtcttgattgatatggaagaaggggtagtgaatgaaattctgctttagattagaactaatcaaataaaaaaataaatgcaaggaatttttaaaatccatattctaattttcagggccgtgggtcacaaagttttcggcagtctttaccaagaccagattttagagaagtttcaaattcttcacaattatattctgaatcatttatgctaatttttaaaaacactttaatcctcaggaacaggatctggacttggcacatttcttttaaaggtgcttgaagacgaattcccagaagtatacagatttgtgacttccatttatccttctggtgaggatgatgtcataacctcacctttcctagtagaatatcatctacatccactcttcttaatagcttctctcccaatgtttttccctcaaaagtctttatttgacatcattagcaaaatcgacctcatgggtgaattctgggaaagttggggtacaactgtgaagccaaagagtctgggtaacttcaagttctggggctttaaaaatcgagctacatttaaagtgtataattttaaaattaaaaattttctcattttaatgttaactttttagctctgcaagatttgaagggtcccttaatatggaccttaatgaaatcagcatgaatttagttccttttcctccttcttcataggaaatagtctctttaaagtatgtgctctattttaattgatactgtgacactgctttcagtgttatgacagtagagtctcttgcaattgcacatagaactgaggagag

SEQ ID NO: 128596 - DNA, 461 bp, Homo sapiens
tgtagcgctctgaccatgcttaaagcaagcttggcacgaggtgagaacatgcaacccaagctattctaagcagatcccttttttatattggaacaggaaatatgtatagtaaagctgggagacagtaaacatgtatttctggctggcatttgtttagggcatcagtaacgtgtccaggcattcagacaagtccccataactggcacatttcagacaactctagtttgccaaataacatttttattgtttgctggaaccttttaggaatgacaaggaactatataattttcattgaacaacctctaaagatgaacctgtggaaaattgccacttctaaaattcggggaaaggccttttcagatgggataagctgggaacccccagtgtaatacgcggtttcatgtggtggaaaaacgcactggacagctccttccagggagatactacagcaaaccttttgt

SEQ ID NO: 128597 - DNA, 525 bp, Homo sapiens
atggtcatagctgtttcctgtgtgaaaatgttatccgctcacaattccacacaacatacgagccggaagcctaaaggaggatccccgggtaccgagctcgaaattctaatcatggtcatagctgtttcctgtgggaaaatggtttccggtccaaattccccaaaacatcgaacccgaaaccataagggtttctcctataaggttattcgggttcctccagagaaggtggaccttggggagacaatccatggagtccaggtgatatgttctattgcttctacagagaaagggaaaccttcttactaccatagctttgatcagcatctggaggaagccatcactagatctaggactgcagagacaaaggaagtaactgtgttagaggagtcaaggagtgggcatctccagtgggctctagagaatcccgggtcccgagctcgaaattctaatcatggtcatagctgtgtcctggtggaaattggtatccgcttcacattcccaccacataccaacccggaagcataa

SEQ ID NO: 128598 - DNA, 927 bp, Homo sapiens
atggaggacctgctcacagaagccaggtcgccttactgggggagagccagagcaaagatccaggactcctgctggagtgtaacctcagatccaaatgcaggctctgtggacattcttgctcccttgttgctcccttctccttccagctacctccccaacttcacttgtactgtatctgttgtcaccagccaccttcatgaggcgtttctagacctggggttcagagggacaggaggaagcaactgcaaaacctctagacaggtgcagttgaacaatcagaagagaaagaagaaaaaatccaaaagcctcccattccacatgagcctgcaaatccaaaattacaaaacacaggaagaacctcatgctaagcctagcagccagcagcaccaacactctgaacatgaatcaatccagacaaaattagtattcagaagcagcatgacatacatgcatacattgaagctgataagagaaaaaggaagcataatgctgtcatccacacagggtgaatgtccaaatagcacatgccgctggcctgctgaggagcaccccttggggtccactcacagagaggaccaggaacacgttattcgggttcctccagagaaggtggaccttggggagacaatccatggagtccaggtgatatgttctattgcttctacagagaaagggaaaccttcttactaccatagctttggaatgacaaggaactatataattttcattgaacaacctctaaagatgaacctgtggaaaattgccacttctaaaattcggggaaaggccttttcagatgggataagctgggaaccccagtgtaatacgcggtttcatgtggtggaaaaacgcactggacagactactcaatgtgaagacaatgagaatgaagacctttatgatgatctactaccacttaatgaatag

SEQ ID NO: 128599 - DNA, 885 bp, Homo sapiens
atggcagaaattttgacccaggttccagatgacatgctgaagaagaaaactccccgagtaaaatcagtgtggagaagtcagcgtgggtcatgcactcccttaataggcaccacagagctgacactggacacaagccatatgagtatcaggaatatggacagaagccatataaatgtacatactgtaagaaagccttcagctgatctcccctactttcgaacacatgaatgggctcacactggggggaaaccttatgattgtgaggaatgtggaaaaagctttatttcccgttcaagcattcgaagacacaggataatgcacagtggagatggaccctacaaatgtaacttttgtgggaaagccttgatgtgtctcagtttgtatcttatccacaaacgaactcacactggagagaaaccatatgaatgtaaacagtgtggtaaagcctttagtcattctggtagccttcgaatacatgaaagaactcacactggagagaagccttatgaatgcagtgagtgtgggaaagcattccatagttccacatgcctccatgcacataaaataactcacactggggagaagccgtatgaatgtaaacagtgtgggaaagcctttgtttctttcaattccgttcgatatcatgaaagaactcacactggagagaagccctatgaatgtaagcaatgtgggaaagccttcagatctgcctcgcaccttcgaacacatggaaggactcacactggagagaaaccctatgaatgtaaacaatgtggtaaagcctttggatgtgcctcgagcgttaaaatccatgaaaggactcacactggagaaaaaccctgtagctccaacacttcgaaaggccaaggcgagaagattgcttaa

SEQ ID NO: 128600 - DNA, 455 bp, Homo sapiens; identical to SEQ ID NO: 128231

SEQ ID NO: 128601 - DNA, 1044 bp, Homo sapiens; identical to SEQ ID NO: 128232

SEQ ID NO: 128602 - DNA, 1212 bp, Homo sapiens
gggcctggcaccgggatagccgggggtctggcaggaatgggaggcatccagaacgagaaggagaccatgcaaagcctgaacgaccgcctggcctcttacctggacagagtgaggagcctggagaccgagaaccggaggctggagagcaaaatccgggagcacttggagaagaagggaccccaagtcagagactggagccattacttcaagatcatcgaggacctgagggctcagatcttcgcaaatactgtggacaatgcccgcatcgttctgcagattgacaatgcccgtcttgctgctgatgactttagagtcaagtatgagacagagctggccatgcgccagtctgtggagaacgacatccatgggctccgcaaggtcattgatgacaccaatatcacacgactgcagctggagacagagatcgaggctctcaagtaggagctgctcttcatgaagaagacccccgaagaggaagtaaaaggcctacaagcccagattgccagctctgggtttgaccgtggaggtaagatgcccccaaatctcaggacctcgccaagatcatggcagacatccggggcccaatatgacgagctggctcggaaagaaccgagaggagctagacaagtactggtctcagcagattgaggagagcaccacagtggtcaccacacagtctgctgaggttggagctgctgagacgcacgctcacagagctgagacgtacagtccaggtctttggagattcgacctggacttccatgagaaatctgaaggccaagcttggagaacagccttgagggaggtggaggcccgctacgcccttacagatggagcagctccaacgggatcctgctgcaccttgagtcacagctgggacagacaccgcgcacagaggcacagcgccaggcccaggaagtatgaggccctgcttgaacatcaaggtcaagcttggaagctgagatctgccaccttacccggccgccttcttggaagattggcgaggactttaatctttggtgattcctttggacgaacgcaactccatgcaaaccatccaaaagaccaccacccgccggataagttggattgggcaaagtggtgtcttgagaccaattgacaccaaagttcttgaggcattaagccagcaagaagccagtggtacccttttggggaagcaggaggccaataaaaagtttcagagtttcaaaa

SEQ ID NO: 128603 - DNA, 2385 bp, Homo sapiens; identical to SEQ ID NO: 114923

SEQ ID NO: 128604 - DNA, 340 bp, Homo sapiens
atgcctgagcctcccaccctctccgtgggctcctgtgcggcccgagcctctccgacgagcgccgccccctgctccacggcgctcagtccgatcaaccacccaagggctgaggagtgcgggcgcacgcgcaggactggcaggcagctccacctgcagccctggaaaaagaaaatgagtgagactcaaaattcaacaagccagaaagcaatggatgaggataacaaagccgcaagccaaacaatgccgaatacacaagacaagaactacgaggatgaattgactcaagtagctctagctctggttgaggatgtcatcaattatgctgttaagattgtggaag

SEQ ID NO: 128605 - DNA, 732 bp, Homo sapiens
atgattataaaatttgccaatatagaggtcattgatgacatgacaaaagtacaattagtggagaagaagaggaaatataaaaccacagatagaggtaaagaaagaatcttccttattttgtacaatggcaaccacccttacagcacacagctgtcaataagaacttcacgcatgtttgtgcaagctggtgttgatgctaggacatctacaactttcaagggaggtgtggagggagaggcacgagcaggaaccggggctgtgtgcagcacttgggggccagctggagttacgggtgggcgtgggcttggtgggccccacactcggagcagctggccagccctgctggccccgggcaatgagggacttagcacccgggccagtggctgcagagggtgtactgggtcccccagcagtgccagcccaccggcgctgcgctcgatttcgcaccgagccttagctgccttcctgcagggcagggctcgggacctgcagcccaccatgcctgagcctcccacccactccatgggctcctgtgcggcccgagcctccccaacgaccaccacccgctgctccacggcgcccagtcccatcgaccacccaagggctgaggaatgcgagtgcacggcgcaggactggcaggcagctctacctgcagtcccggtgcaggatccactaggtgaagccagctgggctcctgagtctggtggggacgtggagagtctttatgtctag

SEQ ID NO: 128606 - DNA, 804 bp, Homo sapiens
ctagacataaaggttctccacctccccaccagactcaggagcccagctggcttcacccagtggatcctgcaccagggctgcaggtggagctgcctgccagtcctgcaccgtgtgcccatactcctcagcccttgggtggttgatgggactgggcgccgtggagcagggggcggtgctcgttggggaggctcgggccacacaggagcccacggagggctggagaggctcaggcatggcgggctgcaggtcccaagccctgcccatgtccacctcggagatgctgtccaggctctccacctgtacgtccacgcccgccgggatggcagggcctcctgagtgtgtgacctgggtgaggccattcactgagatagagcactgagaaaaagcaatgaggaaaggatatagtaacaggaagcagctggcatgctccaaggggtcattgaagagagcctgagcctggaaaagagctgtagctcttggaaaaagccgcccgatgggagctgtggccttcaaaagaaggatgcagcccgtagctgggccaagagcgatgcaggagaagccattcccctcatcctcctcctccctttcgatacctcctgccttctgataccgactggcactttcattggcagaaccaagcaggaggtggagggcaaggactggggctctcatgcagttgtagtcagatggtggcagctgatgggtgttttcatgcttgtgaaaacactcgaaggtgttttcatgcttgtgtctggtgcctgggctgaagaccccaaagctggggctcctcaggcatcctggcat

SEQ ID NO: 128607 - DNA, 457 bp, Homo sapiens; identical to SEQ ID NO: 120523

SEQ ID NO: 128608 - DNA, 390 bp, Homo sapiens; identical to SEQ ID NO: 120302

SEQ ID NO: 128609 - DNA, 1029 bp, Homo sapiens; identical to SEQ ID NO: 123816

SEQ ID NO: 128610 - DNA, 654 bp, Homo sapiens; identical to SEQ ID NO: 128464

SEQ ID NO: 128611 - DNA, 964 bp, Homo sapiens; identical to SEQ ID NO: 120527

SEQ ID NO: 128612 - DNA, 838 bp, Homo sapiens; identical to SEQ ID NO: 120528

SEQ ID NO: 128613 - DNA, 801 bp, Homo sapiens
ttaattgttgtgcagtttcatagatgggtcaggaggtggacaagttggggccagagatgatggcagtccagcagcaactccctgtgctcccttctctttgggcagagattctatttttgacatttgcacaagacaggtagggaaaggggacttgtggtagtggaccataccttgagctagatacagagtgccgattggtgtatttacaatccctgagctagacataaaggttctccaaggccccaccagagcagctagatacagagtgtcgattggtgcattcacaaaccttgagaaaccttgagctaaacacagggtgctgattggtatatttacaatccctgagctagatatactctccacattcccactagactcgggagcccagctggcttcacccagtggatcccacaccggggctgcaggtggagctgcctgccagtcccgcgccgtgcgctcgcattcctcagcccttgggttgtttgttccttcccggtcgatgggactgggcgccgtggagcagggggtggtgctcgtcggggaggctcgggccgcacaggtgcccatggagtgggtgggaggctcaggcatggcgggctgcaggtcccgagccctgccccgcgggaaggcagcagtaaggtcagagggcactaggtacttcctcttgtccagatcaggcaccctggcttttggagccttctctacaatcacggggaccctgtccggatatttcttccggatcttttctccttcctttttccgatactcaaagggatggtcctccttgtactggaacttcat

SEQ ID NO: 128614 - DNA, 732 bp, Homo sapiens
atgatgaatgaggggtctggtatctccttgtctggatgtgatctgggtacagccctgcagctgctttcacaggctattgttgagtgcctgaagcttttccagatgctcaatagatctaccattctgggatctggaggacaacagccctcttctcacagctctaccaagctgcgccccgactcaggagcccagctggcttcacctagtggatcctgcactggggctgcaggtggagctgcctgccagtcccgcaccgtgtgctcgcactcctcagcccttgggtggtcgatgggactgggagccgtggagcagggggtggtgctcgttggggaggctcaggccgcacaggagcccatggagggggtgggaggctcaggcatggcgggctgcaggtcccgagccctgccccacgggaaggcagctaaggcccggcgagcaatcgagcacagcaccggtgggctggcactgctgggggacccagtacactctccgcagccactggcccgggtgctaagtccctcattgcccagggccagcagggctggctggctgctccgagtgcggggcccgccaagcccacgcccacccggaactccagctggccggcaagcgccgcacgcagccccggttcccgctcgtgcctctccctccacacctccctgcgagctgagagagtgggctccagccctggccagcccagaaaggggctcccacagtgcagtggggggctga

SEQ ID NO: 128615 - DNA, 537 bp, Homo sapiens
ctaggcagtcttttttttacaaatattccagctggttgtcagctcttccttgatcatgtcatcattactgccgtattcatcggcgctgcgctcgatttctcgccgggccttagctgccttcccgtggggcaaggctcgggacctgcagcccgccatgcgtgagcctcccacccgctccgtgggctcctgtgcggcccgagcctcctcgacgagcgccaccccctgctccacagcgcccagtcccatcgaccacccaagggctgaggagtgcgggcgcacggcgcgggactggcaggcaactccacctgcagctgcgagggtccgcggcttcattcttgaagtcagtgagaccaagaacccaccaattccggacacattagcatctgcattccagaagacctcagcctggacttcattgtccatatcactatcagcattttggtcaaaaccgttcaacaagtctctcagaagttccagactttcccatatcttcctttcatcttctgagatctccaaattgtcccaacgtctgtccat

SEQ ID NO: 128616 - DNA, 981 bp, Homo sapiens
atgagtgaagcccccagattcttcgttggaccagaagatacagaaataaatcctggaaattatcgacatttcttccaccatgcagatgaagacgatgaggaggaagatgattctccaccagaaaggcagattgtggttggaatatgttccatggcaaagaaatccaaatccaaaccaatgaaggaaattcttgaacggatctccttatttaaatatatcacagtagtagtatttgaagaggaggttattttgaatgaaccagtggaaaactggcctttatgtgattgtcttatttctttccattctaaaggatttccactggacaaagcggttgcctatgcaaaactcaggaatccatttgtaatcaatgacttgaatatgcagtatctcatacaagataggagagaagtatatagtattcttcaagctgaaggtattttacttcctcgttatgctattttgaaccgtgacccaaataatcccaaaggagtgaagctgcagaccttcgcggtgagtgttacagctcttaaggtagcgcgtctggagttgttcgttcctcccggtgggctcttggtcttgctgggctcaggtgtgaagctgcagatcttcgcgggctgcaggtggagctgcctgccagtcacgcgccgtgtgctcgcactcctcagcccttgggtggtcgatgggactgggcgccgtggagcagggggtggtgctcgttggggaggctcgggccgcacaggagcccatggagtgggtgggaggctcaggcatagcaggctgcaggtcccgagccctgccctcctcttcaaatactactactgtgatatatttaaataaggagatccgttcaagaatttccttcattggtttggatttggatttctttgccatggaacatattccaaccacaatctgcctttctggtggtccagtctgccaccctgtgaagaaggtgcctgcttctcctttaccttctgccat

SEQ ID NO: 128617 - DNA, 1774 bp, Homo sapiens; identical to SEQ ID NO: 120892

SEQ ID NO: 128618 - DNA, 390 bp, Homo sapiens
ctgcatgacttgcagcttagcaagcctctgagcgatgacacagctttgaccgacgggggccgccactgcctgcccgttggtgggcacagccaggaagactccagcgctgcgctcgatttctcgccgggccttagctgccttcccgcggggcagggctcgggacctgcagcccgccatgcctgagcctcccaccccctccgtgggctcctgtgcggcccaagcctccccgacgagcgccgccccctgctcgatggcgcccagtcccatcgaccacccaagggcttggcctgtgctgtgtagcttctgcatgcttctatcactgtttgtagcctccatcagcagctgcagccagcaccagccaatgcaggtcgggaccatggtctgcctcat

SEQ ID NO: 128619 - DNA, 807 bp, Homo sapiens
tcatggaagcagcccgatttcatgggatgggaaatggactctgtgtcttcctgcaaggagcagcaggggatgtgatggagacagctttgcaatcacggccctgacagccttgtcacctcctaacctgaagcccacggtggcttctgcgtggggaggtcctgtgaagcctgcactcaaagctctgttggtggctacagcagctctgggtaacagacacctgtcccaggtgcagtgtccaagactgcagacagagatgggcttctgccggtaaccagagctaaagactgctagtggatcccgcaccggggctgcaggtggagctgcctgccaatcccgtgccgtgcgctcgcattcctcagcccttgggtggtcgatgggactaggcaccgtggagcagggggtggtgctcttcggggaggctcgggctgcacaggagcccatggagtgggtgggaggctcaggcatggcgggctgcaggtcccgagccccgccccgcaggaaggcagctgggagcaatgagttgtaaggtggaaactggaacctgagattctgagcagaggcacagattcggagagagttggggacatccctgggcaggggcacagccgacaggacccgtgctgtctgggattctgaacgtcctgagctccttctccgtcctggccctgcccaggcccacaggctggcctcgcccttgctctgcagcaagcccatccaggtgccctgctcagagccaccagcattaatagctgatggtttaataccctcaggagccagcgcactcaagcagcaatcagaaggccccat

SEQ ID NO: 128620 - DNA, 376 bp, Homo sapiens
tctgcctgcctggccggccgccccattcggggggagggcaggcctcgggacctgcagcccgccatgcctgagcctcccaccccctccatgggctcctgtgctgcccgagcctccccaacgagcgccaccccctgctccacggcacccagtcccatccaccactcaagggctgaggagtgcgggcacacagcactgggactggcaggcagctccacctgcagccccggaaccttccgcaaactattaactggcgaactacttactctagcttcccggcaacacttaatagactggatggaggcggataaagttgcaggaccacttctgcgctcggcccttccggctggctggtttattgctgataaatctggagccg

SEQ ID NO: 128621 - DNA, 843 bp, Homo sapiens
atgctggctctccctggggccttgtggcttgcatgcttcgatgaagaacactgccacactgaagaggcacatttcaaggaactgagagtgggcaacaactcaggagcccagctggcttcacctagtggatcccgcaccggggctgcaggtggagctgcctgccagtcccgtgccgtgcgcttgcactcctcagcccttgggtggtcgatgggactgggcgccgtggagcagggggtggtgctcgtcagggaggctggggcagcacaggagcccatggagtgggtaggaggctcaggcatggcgggctgcaggtcccgagccctgccccgcgggaaagcagctaaggtccggcgagaaatcgatcacagcgccggaggagcgactcaagccttcgcgaaagaaaataaccaaaaagcatacaaagaaacgtacggcgtctctcatattacacgccatgatatgctgcagatccctaaacagcagcaaaacgaaaaataccaagtgcctcaattcgatcaatcaacgattaaaaatattgagtctgcaaaaggacttgatgtgtgggacagctggccgctgcaaaacgctgacggaacagtagctgaatacaacggctatcacgttgtgtttgctcttgcgggaagcccgaaagacgctgatgacacatcaatctacatgttttatcaaaaggtcggcgacaactcaatcgacagctggaaaaacgcgggccgtgtctttaaagacagcgataattccaagtttttctaccctgagcctttggtttgtgttcctgaatttctgagcaagtctcagttatttagaaggtgtttttgccaaggctga

SEQ ID NO: 128622 - DNA, 1449 bp, Homo sapiens; identical to SEQ ID NO: 122677

SEQ ID NO: 128623 - DNA, 626 bp, Homo sapiens; identical to SEQ ID NO: 122678

SEQ ID NO: 128624 - DNA, 972 bp, Homo sapiens
atgcaacaagcacttctgaataaatggagttcagctgctcatttaactgctctcattaccttgacatggttggcagcatttattaagtgcccacctctatgcgcgacagtgctagaagctaagcaaatggaatggaactacctttggggaagaagcacaggttcctaccataagggtactgcttcccttttggagcacagagtgggcccttttaaaggggggacctatgggagagggaagggagcagctgccttcccacggggcagggctcgggacctgcagcctgccatgcctgagcctcccacccactccatgggctcctgtgcagcccgagcctccccgacgagcaccaccccctgctccatggcgcccagtcccattgaccacccaagggctgaggaatgcgagcacagggtgcaggactggcaggcagctccacctgcagccccactcaaggtttgtaaatacaccaatcagcaccctgtgtttagcacaaggtttgtgaatgcaccaatcgacactctgtatctagctgctctggtgaggacgtggagaacctttatgtctagctcaaggattgtaaatacaccaatcggcactctgtatctagctcaaggcctctctgcccatcaagagatgggacttatgtcttcccctttgaatctaggctgggcctgtgactggttggaccaagatgaagcagaggaattgctgttctgggattttggagcccaggccttagaatgtgacagcttctccttccctcatctcagagcctttggccagatgcccaagcccaccaggttaggagttgtacttcgtgagtattggaaacggcttccctcctgtaaagtggccattccactgcattttcgctgctcggtaattgctgcaggaacaacaatcgatgaggaacgaggagaccaagataagagaaaacaatcccttatacaggggaagatcctagtataa

SEQ ID NO: 128625 - DNA, 363 bp, Homo sapiens; identical to SEQ ID NO: 120303

SEQ ID NO: 128626 - DNA, 630 bp, Homo sapiens
tcagcttgcggggaggtgtggagggagaggcgcgagcgggaaccggggctgcgtgcggcgcttgcgggccagctggagttccgggtgggcgtgggcttggcggccccacactcggagcagccggccggcccgggccttagctgccttcccgccgggcagggctcgggacctgcagcccgccatgcctgagcctcccacccgcttcacgggctcctgtgcggcccgagcctctccgatgagcgccgccccctgctccacggcgcccagtcccatcgaccacccaagggcaatcagcgccgtcaaaacagaccattcagctctaccaatcagcaggatgtgggtggggccggataagagaataaaagcaggctgcggagccagcagtggcaacccgctggggtccccttccacagtgtggaagctttgttctttcattctttgcaataaatcttgctgctgctcactctttgggtccacgctgcttttatgagctgtaacactcaccgcgaaggtctgcagcttctctccagaaggaagaaactccgaacacatccgaatatcagaaggaacagactccagacgcgccaccttaagagctttaacactcaccgcgagggtccgcggcttcat

SEQ ID NO: 128627 - DNA, 961 bp, Homo sapiens
tcagcttgcagggaggtgtggagggagaggtgccagcaggaaccagggctgtgcgccgcgcttgcgggccagctggagttccgggtaggcgtgggcttggcgggccccacactcggagcaaccggctggccctgccggcctgggcagtgagtggcttagcacccgggccagtggctgcagagggtgtactgggtcccccagcagtgccagcccactggcgctgtgctcgatttctcgcccggccttagctgccttcccgtggggcacggctcgggacctgcagcctgtcatgcctgagcctcccacccactccatgggctcctgtgcggcccgagcctcccccatgagcgccgccccctgctccacggcgcccagtcccatcgaccagccaagggctgaggagtgcgtgcacacggcgtgggactggcaggcagctccacctgcagcccccatgcaggatccagtgggtgaagccagctgggctcctgagtctggcagccactcccagagtccctggaactctggcccaaggctctctgactccttcccagatcttcttggcttagcggctgaagactgacgctgcccgatcgcctcggaagcccccctgacacccatcaggctcagcaaattacctgggctctactgccgcaaggcttcgcggacagcccccattacttcagtcaagctcaaatttcttcctcatctattacctatctcggcataattcttcatgaaaacacccgtgctctccctgctgaccatgtctgactaatctcccaaaccccaatctcttctacaaaacaacaactcctttccttcctaggcatggttaggtacttctgcctttggatacctagttttaccatcctgactaaaccattatattaattcacaaaagcaaacctagctgaccccacagatcctaaatcctttccccactcctctttccgttccttga

SEQ ID NO: 128628 - DNA, 1513 bp, Homo sapiens; identical to SEQ ID NO: 122680

SEQ ID NO: 128629 - DNA, 1305 bp, Homo sapiens
tcagattggctggaaagtcctcaaggcatacttggctctaatttcagattcacctggctctttccacgggagatggcagccggcgaacccaaacagagccgtggttttccaaggcacttggtgtttctgctgcagcgaagcctcagactcctggctggctgcctttcttgggtctgggctgtttcctggctcgctgatctctttggatcccagaggctcctggtgcagacttgctgcctgacctttctcagatttgctgagggccagaagatgaggcccctgacacctggctgctgctacagtctgaatgtttgtgtccctccactcctcaaattcatgtttagaaatcctaacgcccaaggtgatggcattgggaggtggggcgagggctgttgtcacatttgtgtttgctcctgcagcattttcctctcttccattcaaagaatgactccaatctttgagattccttatctcaggggagattgggaactgggttgggttgagatagagaagctgatggctggggaacagcaaaggagccttcaatcctggaatcccaaaatagtcctgtttcttgacctcaaagattttagagaaaacctctcctcccatgggctctgggtagagcacttgtcttcctctgtgctccatattatgcacatcaaaaatcttcccggtactattaatgcttacccccactggtgtgccagactgagggcatctgtggcgacttcctgtctcgtggactgtgcttgcagggagcacgaaggagaggaaacaagcatttgctaattccttgcaatgtgttaggcacttgagaaaaggctcacagttgatcagaggagacagacaggtgaaagggttattacaatgcagcatgacaaacatcttaacagactcaggagcccagctggcttcacctagtggatcccgcactggggctgcaggtggagctgcctgccagtcccgtgccatgcgctcgcattcctcagcccttgggtggttgatgggactgggcaccgtggagcagggggtggtgctcgtcagggaggctcggaccgcacaggagcccatggagtgggtgggaggctcaggcatggcgggctgcaggtcccgagccctgccccgcgggaaggcagctaaggcccggccaacaccctttggtcacatgaataaaagtcaagccctttctttgctcattgctcagcctctgggtattaatctgctgagctggtggccacctaaatacaatcgtcctgttcccctcattggtctctccggtctcctgattccagccacattttg

SEQ ID NO: 128630 - DNA, 910 bp, Homo sapiens
aggaggcttggaagagagtcaggactttagccacttcctgggagtaaaagagcctcctccacttatgtcagtagaacccacatggagaccattaagaagccttcctgtacctctcggccaggtatcagtggaccctgagtggggagctggaactcctacccccactcaacagcccccttcaggtatgaaaggaggccaagggtgtaacctggactttcactactgtgtccggaattggtgggttcttggtctcactgacttcaagaatgaagccgcggaccctggccgagtgaagctgcagacctttgcagtgagtgttacagctcttaaggcagagcgtctggagttgttcattcctcccggtgggctcgtgatatcgctgggctcaggagtgaagctgcagaccttcacagtgagtgttacagctcttaaggcagagcatctggagtcgttccttactcccggtgggctcgtgatctcgctgggctcaggagtgaagctgctgcagatcttcgaggtgactgttatagctcataaaagcaacgtggacccaaaaaactcaggagcccagctggcttcacctagtggatcccgcaccagggctgcaggtggagcggcctgccagtcccacgccgtgtgctcgcactcctcagcccttgggtggtcaatgggactgggcgccctgcagcagggggcggtgctcgttggggaggctcgggccgcacaggagcccatggagtgggtgggaggctcaggcatggcgggctgcaggtcccgagccctgccccgcgggaaggtagctaaggcacgctactcatttggtagtttttgttcaccacattgtgaagaagggaatggaaaaattacagaatatcagaatatgtcaaacaagttctcaggttctgagcca

SEQ ID NO: 128631 - DNA, 861 bp, Homo sapiens; identical to SEQ ID NO: 126008

SEQ ID NO: 128632 - DNA, 1635 bp, Homo sapiens; identical to SEQ ID NO: 120536

SEQ ID NO: 128633 - DNA, 2234 bp, Homo sapiens; identical to SEQ ID NO: 117270

SEQ ID NO: 128634 - DNA, 3325 bp, Homo sapiens
tcagggacagtcccgcccacatttgtgaggacagtcattcaggcacaaggggctcgtacagtcattcagcaatcgttgattgggagcctctatatattcagacactgtgttaggtgccaggggattgagtctgtctttgtcatcattatttggagcagagtagggtatgatgagaaaggcttctgcctcttcacatctgtcttgggagtttgggggcatgtgagaaccaaaccatgtctcctgattacctggagaaccctgaagtctagaagtggcctggagtagcctgccggcttcagctctagcccaggtaccagcccccaaatcataagaaagcaaaagcgcggggtccctcaacaccccgtctgcgatctgccgggacgcttccggccgcgggctggcacgcccttggctgcgcaaatccaagtgcctggcctgccaccttgtggacaccaggagtaaaaccgccggtgggctggctccagtgccctctgcccaccttatctctgtgcgcgagcgggaaccggggctgtgtgccgtgcttgtgagccagctggagttccgggtgggcgtgggcttggtgggccccacactcggagcacgccgcgagccctgctggccccaggcaatgggggacttagcacccgagccagtggcggcactgcgcttgatttctcgccgggccttacctgccttcccatggggcagggctcgggacctgcagcccgccatgcctgagcctcccacccactccatgggctcctgtgcggcccgagcctccccgatgagcaccaccccctgctccacggcacccagtcccatcgaccacccaagggctgaggaatgtgagcgcacggcgcaggactggcaggcagctccacctgcagccccggtgtgggatccactaggtgaagccagctgggctcctgagtctggaactaacatttccattacacctggaaatgccacatttgtgacccgggtgcagggacaggcttggtttgcctcatgtatcactggtcatgatatgtctagtttaaaaacttccagtgtcgtggtattaaggagacaatctgaggcacttctaccagccaatttgacatgcaattggcaagattcttctgcccttgccaccttagaaagtgccctgtcccaggtcagacacaaaagattcacatttacacttatggtctttacaggctcagccatagtcattatggcaactgttagcattgctgttgtatctattactgaatcagtacaaacaactgcttttgtagataatctggccaaaaatatatgtgatgaacttctcctacaggacatggatgaagctggaaaccaacattctcagcaaaataacacaagaacagaaaaccaaacaccacatgttctcactcataagtgggagttgaacaatgagaacatacggatacagggaggggaacattacatactggggcctgttggtggcaggttgccaacatccaaactcgctgttgattgccagctcctgctccttgcagcagcccagcatgctctctgctggtgccaaaatacccttccaccaaaccccgctaacttctggaactgtcctagagggtttcctaccctagcaagtgagcttgcctatgtcagccctaaccttgctcttgtcattcagctgagccagaggaaaaaatttgagctattctggggtggtctacagagaaccatcttctttcccttcagtgttctcagaatattgactgttgatgaacaagccaatgatgtgagtgtggctgcagcaaggacccttcaaattttcagagatgacatgattgtatatctagaaaaccccattgtctcagcccaaaatctccttaagctgataagcaacttcagcaaaatctcaggatacaaaatcaatgtacaaaaatcacaagcattcttatacaccaacaacagacaaacagagagccaaatcatgagtgaactcccattcacaactgcttcaaagagaataaaatacctaggaatccaacttacaagggatgtgaaggacctcttcaaggagaactacaaatcactgctcaaggaaataaaagaggatacaaacaaatggaagaacattccatgctcatgggtaggaaaaatcaatatcgtgaaaatggccatactgcccaaggtaatttacagattcagtgccatccccatcaagctaccaatgactttcttcacagaattggaaaaaactactttaaagttcatatggaaccaaaaaagagcccacactgccaagtcaatcctaagtcaaaagaacaaagctggaggcatcacactacctgacttcaaactatactacaaggctacagtaaccaaaacagcatggtactggtaccaaaacagagatatagatcaatggaacagaacagagccctcagaaataacgctgcttatctacaactatctgatctttgacaaacctgagaaaaacaagcaaatccagaaagccttcatcctccatcaaggaaccttgggtaatgtggaacatgggaaccaatgtcagatgaaattgatgtatgaacataatcttcagagaacagcctgcaatatgacctatggatcatttggtggtgtaaaaggtagaggagcctcttcctgtgggcaccactaccactggcccacagaagtgttctggcaggccactgaccatgttcacttaaagtccaaggtctcttcagacagctgtggtaaatgctgccaggcctgggactcacccttcagggcagtgggctcccatctggcccagggcaggtccagaaatagtgtccaagagcctaagcctggacttggagaccccaggagcctgcttgttgctctacctcagtgtggccaagctgtggctaaggtggtatccaggatgcaagacaaagttctctttactcctcgttctcttctccttaagcagaggatggagtcactttcattgctccggccagccctgctggccctgggcaatgaggggcttagcacccaggccagcagctgcggagggtatactgggtcccccagcagtgccagaccactggcgctgcgctcaatttctcaccgggccttagctgccttcccgtggggcagggctcgcgacctgcagcccgccatgcctgagcctcccaccccctccgtgggctcctgtgcggccgagcttccccgggctggggagtgcgggcacagggcgcgggactggcaggcagctccacctgcagccccagtgcagggtccactgggtgaagccagctgggctcctaagtctggtggggatgtggagaacctttatgtctag

SEQ ID NO: 128635 - DNA, 992 bp, Homo sapiens
tgggctggtggtctcgctggcttcaggagtgaagccgcagaccttcgcggtgagtgttacagttcttaaggcggcgcgtctggagttgttcattcctccccgtgggctcgtggtctctctggcttcaggagtgaagctgcagaccttcgcggtgagtgttacagctcataaaagcagcgtggacccaaagaactcaggagcccagctggcttcacctagtggatcctgcaccagggctgcaggggtagctgcctgccagtcccggtgccgtgcgctcgcattcctcagcccttgggtggtcgttgggactgggtgccgtggagcagggggtagtgctcgtcggggaggctcgggctgcacaggagcccatggagtggatgggaggctcaggcatggcgggctgcaggtcccgagccctgccccacggaaaggcagctaaggcccggcgagaaattgagcgcagcgccggtgggctggcgctgctgggggacccagtataccctctgcagctgctggcccgggtgctaagcccctcattgcccggggccggtggggcgggccagccggctgctccaagtgcagggcccgccaaacccacgcccacccggaactccagctggcccgcaagcgccgcacgcagccccggttcccgctcgcgcctctccctccacacatccctgcaagctgagggagccagctgtggccttggccagcacagaaaggggctcccacagtgcagcggtgggctgaagggctcctcaagtgccgccaaagtgggagcccaggcagaggaggcactgagagcgagcgagggctgtgaggactgccagcacgctgtcacctctcaactcagtctcccacatggcgtggccacccttgtgtctgttaaactctttctctacaaaaatgccatggtctttctttgtgcagtggtcaggaaaaaccccttgggcagatacaaaagttctttcaggcatctgtttccagaatag

SEQ ID NO: 128636 - DNA, 1193 bp, Homo sapiens
atgaagccagggaccctcgcggtgagtgttacagctcttaatgtggcgcatctggagtttgttccttctgatgttcggatgtgttcggagtttcttccttctggagtgaagctgcagaccttcacggtgagtgttacagctcttaaggcggcgcttctggagttgttggttcctcctggtgggctcgtggtctcgctggcttcaggagtgaagctgcagaccttcgcagtgagtgttacagctcataaaagcagtgtggaccccaagaactcaggagcccagctggcttcccccagtgaatcccgcacgagagctgcaggtggagctgcctgccagtcccgcgccgtgcgcccgcactcctcagctcttgggtggtcgatgggactgggcgccgtggagcagggggtggtgctcatcggggaggctcgggctagtggatcccgcaccagggctgcaggtggagctgcctgccagtcccacgccgtgcgctcgcattcctcagcccttgggtggtcgatgggactgggcgccatggagcagggggtggtgcttgtcggggaggctcgggccacacaggagcccttggagtgggtgggaggctcaggcatggcagactgcaggtcccgaaccctgccacgagggaaggcagctcttccgcagtagtccctgggcctagagggaggcaacttgtatggttttagcagcagagcattagtagtgaaacaaatccgatcccagtgggatgccaaatgacggagattcatatctctggccttcagaataccatgattttggtttccttggccccttttagtcaaggcaggagcacctgggatgcatggcaccaagtcccaggtgggccctgaacctggcccaggaaaccgttgtttcctcctaggcctctgggcctgtgatgggaggggatgctgcaaaggtctctgacatgccctggcgacattttccccattatcttggtgattagcatttggctccttgtaacttatgcaaatttcggcagctggctttaatttctccccagaaaatgggttttccctttctttattccagttcccaacaagttcctcatcttcatctgaggccacctcaacctgaactttattgtctataccactatcagcattttggtcaaagccattcaagaagtctctagaaagtgtcaaactttcccacat

SEQ ID NO: 128637 - DNA, 2095 bp, Homo sapiens
cagaggggctacacttcagcattacctggaatccacagtcaccagtgtttcttcagggttaggggagcattagcacatgccacagccaggcaacacagagcaagggctataaggcatggccatcagcgttggcagcagaaaggtagtaggaacaatcacacagtagcagcagttgagggagagaaggacattctgggaggtttcagcagctggcatcaccgcagtatgcctgataatttttcattgaaaggaggacacgatgtactgggtgaaagaggctgtggtaaatatactttaagtgacatagtggtaatgtgtgaggagaaagaagtgttctataattttcacgctttaaaaggattaaagcctgttatcactcgcctgctacagcatggccttttaaagcctataaactctccttacaattcccccattttacctgtcctagaaccagacaagccttacaggttagttcaggatctgcgccttatcaaccaaattgttttgcctatccaccccgtggtgccgaacccatacactctcctatcctcaatacctccctccacaacccattattctgttctggatctcaaacatgctttctttactattcctttgcacccttcatcccagcctgtcttcgctttcacttggactgaccctgacacccatcaggctcagcaaattacctgggctgtactgcctcaagtcttcacagacagcccccattacttcagtcaagcccaaatttcttcctcatctgttacctatctcagcgtaattctcataaaaacacacgtgctctccctgctgatcgtgtccgactgatctctcaaaccccagcaccttctacaaaacaacaactcctttccttcctaggcatggttagcgtggtcagaattcttacacaagagccaggaccgcaccctgtagcctttctgtccaaacaacttgaccttactgttttagcctagccctcatgtctgcgtgcagcggctgccactgctttaatacttttagaggccctaaaaatcacaaactatgctcaactcactctctacagttctcataacttccaaaatctattttcttcctcatacctaacgcatatactttctgctccccagctccttcagctgtactcactctttgttgagtctcccacaattaccattgttcctggcccggacttcaatctggcctcccacattattctggataccacacctgacccccatgactgtatctctatgatccacctgacattcaccccatttccccatatttccttctttcctgttcctcaccctgatcacgcttgatttattgatggcagttccaccaggcctaatcgccacacaccagcaaaggcaggctatgctatagtatcttccacatctatcattgaggctaccgctctgccccgctccactacctctcagcaagccgaactcattgccttaagtcaaaccctcactcttgcaaagggactacatgtcagtatttatactgactctatatatgccttccatatcctgcaccaccatactgttatatgggctgaaagaggtttcctcactacgcaagggtcctccatcattaatgcctctttaataaaaactcttctcaaggccactttacttccaaaggaagctggattcattcactgcaagggccatcaaaaggcgtcagatcccatcgctcagggcaacacttatgctgataaggtagctaaaaaagcagctagcattccaacttctgtccctcatggccagtttttctccttctcatcggtcactcccacctactcccccactgaaacttccacctatcaatctcttcccacacaaggcaaatggttcttagaccaaggaaaatatctccttccagcctcacaggcccattctattctgtcatcatttcatagcctcttccatgtaggttacaagccgctagcccacctcttagaacctctcatttcctttccatcatgaaaatctatcctcaaggaaatcacttctcagtgttccgtctgctattctactcctcctcagggattgttcaggccccctccaagtcctcccatttcattacc

SEQ ID NO: 128638 - DNA, 1365 bp, Homo sapiens
atggatcccgggcagcagccgccgcctcaaccggccccccagggccaagggcagccgccttcgcagcccccgcaggggcagggcccgccgtccggacccgggcaaccggcacccgcggcgacccaggcggcgccgcaggcaccccccgccgggcatcagatcgtgcacgtccgcggggactcggagaccgacctggaggcgctcttcaacgccgtcatgaaccccaagacggccaacgtgccccagaccgtgcccatgaggctccggaagctgcccgactccttcttcaagccgccggagcccaaatcccactcccgacaggccagtactgatgcaggcactgcaggagccctgactccacagcatgttcgagctcattcctctccagcttctctgcagttgggagctgtttctcctgggacactgacccccactggagtagtctctggcccagcagctacacccacagctcagcatcttcgacagtcttcttttgagatacctgatgatgtacctctgccagcaggttgggagatggcaaagacatcttctggtcagagatacttcttaaatcacatcgatcagacaacaacatggcaggaccccaggaaggccatgctgtcccagatgaacgtcacagcccccaccagtccaccagtgcagcagaatatgatgaactcggcttcagccatgaaccagagaatcagtcagagtgctccagtgaaacagccaccacccctggctccccagagcccacagggaggcgtcatgggtggcagcaactccaaccagcagcaacagatgcgactgcagcaactgcagatggagaaggagaggctgcggctgaaacagcaagaactgcttcggcaggtgaggccacaggagttagccctgcgtagccagttaccaacactggagcaggatggtgggactcaaaatccagtgtcttctcccgggatgtctcaggaattgagaacaatgacgaccaatagctcagatcctttccttaacagtggcacctatcactctcgagatgagagtacagacagtggactaagcatgagcagctacagtgtccctcgaaccccagatgacttcctgaacagtgtggatgagatggatacaggtgatactatcaaccaaagcaccctgccctcacagcagaaccgtttcccagactaccttgaagccattcctgggacaaatgtggaccttggaacactggaaggagatggaatgaacatagaaggagaggagctgatgccaagtctgcaggaagctttgagttctgacatccttaatgacatggagtctgttttggctgccaccaagctagataaagaaagctttcttacatggttatag

SEQ ID NO: 128639 - DNA, 585 bp, Homo sapiens
atggccaacgtgcaccagaccatgcccatgaggctccggaagctgcccgactctttcaagccgcccgagcccaagtccaactcccaacgggtcagtactgaggcaggcaccgcaggagccctgactccacagcacgttcgagctcattcctctccagcttctctgcagttgggagctgtttctcctgggacactgacccccactggagtagtttctggcccagcagctacacccacagctcagcattttcaacagtcttcttttgagatacctgatgatgtacctctaccagcagctcgggagatggcgaagacatcttctggtcagagatacttcttaaatcacatcgatcagaaaacaacacagcaggacccccaggaagaccatgctgtctcagatgaatgttatagccaatccaccagtgcagcagaatatgatgaactcggcctcagagcccacaaggaggcgtcatggtggcagcaactccaaccagcagcgacagatgcgaccacagcaactgcagatggaggagaggctgcagctgaaacagcaataactgcttcagcaggagttagcactgcgtag

SEQ ID NO: 128640 - DNA, 1056 bp, Homo sapiens
atgaaactcatggaaacacttaaccagtgcataaacgctggtcatgaaatgacgaaggctatcgccattgcacagtttaatgatgacagcccggaagcgaggaaaataacccggcgctggagaataggtgaagcagcggatttagttggggtttcttctcaggctatcagagatgccgagaaagcagggcgactaccgcacccggatatggaaattcgaggacgggttgagcaacgtgttggttatacaattgaacaaattaatcatatgcgtgatgtgtttggtacgcgattgcgacgtgctgaagacgtatttccaccggtgatcggggttgctgcccataaaggtggcgtttacaaaacctcagtttctgttcatcttgctcaggatctggctctgaaggggctacgtgttttgctcgtggaaggcaacaaagcaatctacaatctaaaatcaaattcccctcaaacacagattccaggtctacaggatataattcctttgacagacaacccaacatctgtttttataagcgccaagagactcctcacacggggccacacccagtccctgagggccgcccttatccaatgcctggttgatgtggggcatgaagtcctggcccctttgcctcaaggaactgaagtgaaaaaaattgaagctataaatgttccttgcacacagctttcaatgtcattttttcatcggttatatgatgaagatattgtacgagacagtggacatattgttaaatgtttagattctttttgtgatccatttctcatttctgatgagttacgaagagccagtactgatgcaggcactgcaggagccctgactccacagcatgttcgagctcattcctctccagcttctctgcagttgggagctgtttctcctgggacactgacccccactggagtagtctctggcccagcagctacacccacagctcagcatcttcgacagtcttcttttgaaatacctgatgatgtacctctgccaacaagttggggagaggcaaagacatcttctgggtcaaaaatacctttttaa

SEQ ID NO: 128641 - DNA, 1185 bp, Homo sapiens
tttttttgagaacttgcttcaggctaaacttcagcataggaactttgcccaaaagttaataggttttccaaatactgcaaatgtagttagccccacttcggggatgtaacttgagtggaaagaagagttaccgcccccactcccattccctctcctatttgcagggcctgttgtatagtctcctgtcggagaccaaagggttttggaactcagaaaaaatcacttaacctgatgacaaaaacccgggttaaggaggaggaaagaaggaaaaacaatttagctgcttgcctaaacacttcaatttgtcttaggccagtactgatgcaggcactgcaggagccctgactccacagcatgttcgagctcattcctctccagcttctctgcagttgggagctgtttctcctgggacactgacccccactggagtagtctctggcccagcagctacacccacagctcagcatcttcgacagtcttcttttgagatacctgatgatgtacctctgccagcaggatgagagattgctaagttatcttctggtcaaagatacttcttaaatcacatcgatcaggacaacaacatggcaggaccccaggaaggccatgctgtcccagatgaacgtcacagcccccaccagtccaccagtgcagcagaatatgatgaactcggcttcaggtcctcttcctgatggatgggaacaagccatgactcaggatggagaaatttactatataaaccataagaacaagaccacctcttggctagacccaaggcttgaccctcgttttgccatgaaccagagaatcagtcagagtgctccagtgaaacagccaccacccctggctccccagagcccacagggaggcggggggggtggcagcaactccaaccagcagcaacagatgcgactgcagcaactgcagatggagaaggagaggctgcggctggtgtgggcagacttttttgggcaggcaatgcggaatatcaatcccagcacagcaaattctccaaaatgtcagcacgaattgacctcatttctccaactggctttgtgctttgaaaaactgaccaaaatgccacgcgtgtgtttgattagcacttcacaccttgtttacagtgcactagagaaactggctgttgttggcatccgtccagctgttcctgatgagttgccaggctga

SEQ ID NO: 128642 - DNA, 2142 bp, Homo sapiens; identical to SEQ ID NO: 118316

SEQ ID NO: 128643 - DNA, 1824 bp, Homo sapiens; identical to SEQ ID NO: 123214

SEQ ID NO: 128644 - DNA, 2025 bp, Homo sapiens; identical to SEQ ID NO: 119515

SEQ ID NO: 128645 - DNA, 2121 bp, Homo sapiens; identical to SEQ ID NO: 124478

SEQ ID NO: 128646 - DNA, 1929 bp, Homo sapiens; identical to SEQ ID NO: 122739

SEQ ID NO: 128647 - DNA, 2133 bp, Homo sapiens; identical to SEQ ID NO: 126622

SEQ ID NO: 128648 - DNA, 3021 bp, Homo sapiens; identical to SEQ ID NO: 120367

SEQ ID NO: 128649 - DNA, 3171 bp, Homo sapiens; identical to SEQ ID NO: 121976

SEQ ID NO: 128650 - DNA, 2703 bp, Homo sapiens
atggagaaaaaacagagcagaaaaactggaaactctaaaaatcagagtgcctctcctcctccaaaggaatgcagctccttacaagcaacggaacacagctggatggagaatgactttgatgagttgagagaacagggcttcagaagatcaaactactccgagctaaaggaggaagttcgaacccatggcaaagaagttaaaaaccttgaaaaaagattagacgaatggctaactagaataaccaatgcagagaagtccttaaaggacctgatggagctgaaaaccatggcacgagaactacttgatgaatgcataaatctcagtagccaattcgatcaactggaagaaagagtatcagtgatggaaaatcaaatgaatgaaatgaaaccaaatctacgactgattggtgtacctgaaagcgatggagagaatggaaccaagttggaaaacactctgcaggatattatccaggagaacttccccaacctagcaaggcaggccaacattcagattcaggaaatacagagaatgtcacaaagatactcctcgagaagagcaattccaagacacataattgtcagattcaccaaagttgaaatgaaggaaaaaatgttaagggcagccagagagaaaggtcgggttaccctcaaagggaaacccatcagactaaaagctgatctctcagtagaaactctacaagccagaagagagtgggggccaatattcaacattcttaaagaaaagaattttcaacccagaacttcatatccaggcaaactaagcttcataagtgaaggagaaatgaaatcctttacagacaagcaaaagctgagatattttgtcaccaccaggcctgccctaaaagagctcctgaaggaagccctaaacatggaaaggaacaaccgctaccagccactggaaaaacaaatacaaactaccatcagagaatactataaacacctctacgcaaatgaactagaaaatctagaagaaatggataaattcttcgacacatacaccctcccaagactaaaccaggaagaagttgaatctctgaatagaccaataacaggctttgaaattgaggcaataattaatagcttaccaacaaaaaaagtccagaaccaggtggattcacagctgaattctaccagagcaatagaaaaagagggaatcctccctaactcattttatgaggccagcatcatcctgatgctaaagcctggcagagacacaacaaaaaaagagaattttagaccaatatccctgatgaacatcgatgcaaaaatcctcaataaaatactggcaaaccgaatccagcagcacatcaaaaagcttatccaccaagatcaagtgggcttcatccctgggatgcaaggctggttcaatatacgcaaatcaatcaacataatccagcatataaacagaaccaatgacaaaaaccacaagattatctcaatagatgcagaaaaggccttttacaaaattcaacaacccttcatgctaaaaactctcaataaattaggtattgatgggtcatatctcaaaataataagagctatctatgacaaacccacagccaatatcatactgaatgggcaaaaactggaagcattccctttgaaaactggcacaagacagggatgccctctctcaccactcctattcaacttagtgttggaagttctggccagggcaattaggcaggagaaggaaataaagggtattcaattaggaaaagaggaagtcaaattgtccctgtttgcagatgacatgattgtatatttagaaaaccccatcgcctcagcccaaaatctccttaagttgaaaggcaacttcagcaaagtctcaggatacaaaatcaatgtgcaaaaatcacaagcattcttatacaccaagaacagacaaacagagagccaaatcatgagtgaactcccattcacaattgcttcaaagagaataaaatacctaggaatccaacttacaagggacatgaaggacctcttcaaggagaactacaaaccactgctcaatgaaataaaagaggatacaaacaaatggaagaacattccatgctcatgtgaaggaagaatcagtatcctgcaaatggccatactgcccgaggtaatttacagattcaatgccatccccatcaagctaccaatgactttcttcacagaattggaaaaaactactttaaagttcatatggaaccaaaaaagagcccgcatcaccaagtcaatcctaagccaaaagaacaaagctggaggcatcacgctacctgacttcaaacaatactacaaggctacagtaaccaaaacagcatggtactggtaccaaaacagacatatagaccaagggaacggaacagagccttcagaaatagtgccgcatatctacaaccatctgatctttgacaaacctgagaaaaacaagaaatggggaaaggattccctatttaataaatggtgctgggaaaactggctagccatatgtagaaagctgaaactggatcccctccttaaaccttatacaaaaattaattcaagatggattaaagacttaaatgttagacctaaaaccataaaaaccctagaagaaaacctaggcaataccattcaggacataggcataggcaaggactttatgtctaaaacaccaaaagcaatggccacaaaagccaaaattgacaaatggatctaa

SEQ ID NO: 128651 - DNA, 2313 bp, Homo sapiens; identical to SEQ ID NO: 121959

SEQ ID NO: 128652 - DNA, 1308 bp, Homo sapiens
atgaacattgatgcaaaaatcctcaataaaatactggcaaaccgaatccagcagcacatcaaaaagcttatccaccatgatcaagtgggcttcatccctgggatgcaaggctggttcaatatacgcaaatcaataaatgtaatccagcatataaacagagccaaagacaaaaaccacatgatcatctcaatagatgcagaaaaagcctttgacaaaattcaacaacccttcatgctaaaaactctcaataaattaggtattgatgggacgtatttcaaaataataagagctatctatgacaaacccacagccaatatcattctgaatgggcaaaaactggaagcattccctttgaaaactggcacaagacagggatgccctctctcaccactcctattcaacatagtgttggaagttctggccagggcaatcaggcaggagaaggaaataaagggtattcaattaggaaaagaggaagtcaaattgtccctgtttgcagacgacatgattgtttatctagaaaaccccatcgtctcagcccaaaatctccttaagctgataagcaacttcagcaaagtctcaggatacaaaatcaatgtacaaaaatcacaagcattcttatacaccaacaacagacaaacagagagccaaatcatgagtgaactcccattcttcaatgccatccccatcaagctaccaatgactttcttcacagaattggaaaaaactactttaaagttcatatggaaccaaaaaagagcccgcatcgccaagtcaatcctaagccaaaagaacaaagctggaggcatcacactacctgacttcaaactatactacaaggctacagtaaccaaaacagcatggtactgttacctaaacagagatatagaccaatggaacagaagagagccctcagaaataataccacacatctacacccatgtgatctttgacaaacctgacaaaaacaagaaatggggaaaggattccctatttaataaatggtgctgggaaaactggctagccatatgtagaaagctgaaactggattgcttccttgcaccttatacaaaaattaattcaagattgattaaagacttacatgttagacctaaaaccataaaaaccctagaagaaaacctaggcaataccattcaggacataggcatgggcaaggacttcatatctaaaacaccaaaagcaatggcaacaaaagccaaaattgacaaatggggtttaattaaactaaagaacttctgcacagcaaaagaaactaccatcagagtgaacaggcaacctacagaatag

SEQ ID NO: 128653 - DNA, 2151 bp, Homo sapiens; identical to SEQ ID NO: 118551

SEQ ID NO: 128654 - DNA, 777 bp, Homo sapiens
atgggcaaagatttttataatgaaattgccaaaagcaattgcgacaaaagccaaaagccgccccgtccaggagggagctcattgagaacgggccatgatgacaatggcggttttgtggaatcgaaagaggggaaaggtggggaaaagattgagaaatcggatggttgccgtgtctgtgtagaaagaatggtcacccaggccagctgcttcgacgtggataggggctacacaggacatgaatatcatgagaagaattggaaaaaaactgctttaaatttcatatggaaccaaaaaagagcccatatagccaagacaatcctaagcaaaaagaacaaagctggaggcatcatgctacctgacgtcaaactatactacaaggttacagcaaccaaaacagcatggtactggtaccaaaacagatacctagaccaatggaacagaacagagaccacagaaaaaatgctacacatctacaaccaactgatctttgacaaacctgacaaaaacaagcagtggggaaaggattccctgtttaataaatggtgttgggaaaactggctagccatatgcagcaaactgacactggaccccttccttacacctcatacaaaaattaactcaagatggattaaagacttaaatgtaagacctaaaaccataaaaaccctagaagaaaatctaggcaataccattcaggacataggcatgggcaaagacttcatgactaaaacaccaaaagcaatggcaacaaaagccaaaattgacaatgggatctaa

SEQ ID NO: 128655 - DNA, 3117 bp, Homo sapiens
agcacccagattcataaagcaagtcctgagtgacctacaaagagacttagactcccacacaataataatgggagactttaacaccccactgtcaacattagacagatcaacaagacagaaagtccacaaggatacccaggaattgaactcagctctgcaccaagcggacctaatagacatctacagaactctccaccccaaatcaacagaatatacatgtttttcagcaccacaccacacctattccaaaattgaccacatagttggaagtaaagcactcctcagcaaatgtaaaagatcagaaattataacaaactgtctctcagaccacagtgcaatcaaactagaactcaggattaagaaactcactcaaaaccgctcaactacatggaaactgaacaacctgctcctgaatgactactgggtacataacgaaatgaaggcagaaataaggatgttctttgaaaccaacgagaacaaagacacaacataccagaatctctgggacacattcaaagcagtgtgtagagggaaatttatagcactaaatgcccacaagagaaagcaggaaagatccaaaattgacaccctaacatcacaattaaaagaactagaaaagcaagagcaaacacattcaaaagctagcagaaggcaagaaataactaaaatcagagcagaactgaaggaaatagagacacaaaaaacccttcaaaaaattaatgaatccaggagctggttttttgaaaggatcaacaaaattgatagaccgctagcaagactaataaagaaaaaaagagagaagaatcaaatagacacaataaaaaatgataaaggggatatcaccactgatcccacagaaatacaaactaccatcagagaatactacaaacacctctacgcaaataaactagaaaatctagaagaaatggataaattcctcgacacatacactctcccaagactaaaccaggaagaagttgaatctctgaatagaccaataacaggagctgaaattgtggcaattatcaatagtttaccaaccaaaaagaatccaggaccagatggattaacagccgaattctaccagaggtacaaggaggaactggtaccattccttctgaaactattccaatcaatagaaaaagagggaatcctccctaactcattttatgaggccagcatcattctgataccaaagccgggcagagacacaaccaaaaaagagaattttagaccaatatccttgacgaacattgatgcaaaaatcctcaataaaatactggcaaaccgaatccagcagcacatcaaaaagcttatccaccatgatcaagtgggcttcatccctgggatggaaagctggttcaatatacgcaaatcaataaatgtaatccagcatataaacagagccaaagacaaaaaccacatgattatctcaatagatgcagaaaaggcctttgacaaaattcaacaacccttcatgctaaaaactctcaataaattaggtattgatgggacgtatttcaaaataataagagctatctatgacaaacccacagccaatatcatactgaatgggcaaaaactggaagcattccctttgaaaactggcacaagacagggatgccctctctcactgctcctattcaacatagtgttggaagttctggccagggcaatcaggcaggagaaggaaataaagggtattcaattaggagaggaagtcacattgtccctgtttgcagacgacatgattgtttatctagaaaaccccattgtctcagcccaaaatctccttaagctaataagcaccttcagcaaagtctcaggatacaaaatcaatgtacaaaaatcacaagcattcttatacaccaacaacagacaaacagagagccaaatcatgagtgaactcccattcacaattgcttcaaagagaataaaatacctaggaatcctacttacaagggatgtgaaggacctcttcaaggagaactacaaaccactgctcaaggaaataaaagaggatacaaacaaatggaagaacattccatgctcatgggtaggaagaatcaatatcgtgaaaatggccatactgcccaaggtaatttacagattcaatgccatctccatcaagctaccaatgactttattcacagaattggaaaaaactactttaaagttcatatggaagcaaaaaagagcccgcatcgccaagtcaatcctaagccaaaagaagtgtgctggaggcatcacactacctgacttcaaactatactgcaaagctacagtaaccaaaacagcatggtactggtaccaaaacagagatatagatcaatggaacagaacagatccctcagaaataacgccgcatacctacaactatctgatctttgacaaacctgagaaaaacaagcaatggggaaaggattccctatttaataaatggtgctgggaaaactggctagccatatgtagaaagctgaaactggatcccttccttacaccttatacaaaaatcaattcaagatggattaaagatttaaacattagacctaaaaccataaaaaccctagaagaaaacctaggcattaccattcaggacataggcatgggcaaggacttcatgtccaaaacaccaaaagcaatggcaacaaaagccaaaattgacaaatgggatctaattaaactaaagagcttctgcacagcaaaagaaactaccatcagagtgaacaggcaacctacaacatgggagaaaattttcgcaacctactcatctgacaaagggctaatatccagaatctacaatgaactcaaacaaatttacaagaaaaaaacaaacaaccccatcaaaaagtgggcgaaggatatgaacagacacttctcaaaagaagacatttatgcagccaaaaaacacatgaaaaagatggtgatgtacagatgggtttttggtgtggatgtcctttctgtttgttagttttccttctaacagacaggaccctcagctgcaggtctgttggagtttgctagaggtccactccagaccctgtttgcctgggtaccagcagtggtgtctgcagaacagcagattttcatgaaccgtgaatgctgctgtctgatcgt

SEQ ID NO: 128656 - DNA, 3813 bp, Homo sapiens
atggtaaagggatcaattcaacaagaggagctaactatcctaaatatttatgcacccaatacaggagcacccagattcataaagcaagtcctcagtgacctacaaagagacttagactcccacacattaataatgggagactttaacaccccactgtcaacattagacagatcaacgagacagaaagtcaacaaggatacccaggaattgaactcagctctgcaccaagcagacctaatagacatctacagaactctccaccccaaatcaacagaatatacatttttttcagcaccacaccacacctattccaaaattgaccacatagttggaagtaaagctctcctcagcaaatgtaaaagaacagaaattataacaaactatctctcagaccacagtgcaatcaaactagaactcaggattaagaatctcactcaaagccgctcaactacatggaaactgaacaacctgctcctgaatgactactgggtacataacgaaatgaaggcagaaataaagatgttctttgaaaccaacgagaacaaagacaccacataccagaatctctgggacgcattcaaagcagtgtgtagagggaaatttatagcactaaatgcccacaagagaaagcaggaaagatccaaaattgacaccctaacatcacaattaaaagaactagaaaagcaagagcaaacacattcaaaagctagcagaaggcaagaaataactaaaatcagagcagaactgaaggaaatagagacacaaaaaacccttcaaaaaatcaatgaatccaggagctggttttttgaaaggatcaacaaaattgatagaccgctagcaagactaataaagaaaaacagagagaagaatcaaatagacacaataaaaaatgataaaggggatatcaccaccgatcccacagaaatacaaactaccatcagagaatactacaaacacctctacgcaaataaactagaaaatctagaagaaatggatacattcctcgacacatacactctcccaagactaaaccaggaagaagttgaatctctgaatcgaccaataacaggctctgaaattgtggcaataatcaatagtttaccaaccaaaaagagtccaggaccagatggattcacagccgaattctaccagaggtacaaggaggaactggtaccattccttctgaaactattccaatcaatagaaaaagagggaatcctccctaactcattttatgaggccagcatcattctgataccaaagccgggcagagacacaaccaaaaaagagaattttagaccactatccttgatgaacattgatgcaaaaatcctcaataaaatactggcaaaccgaatccagcagcacatcaaaaagcttatccaccatgatcaagtgggcttcatccctgggatgcaaggctggttcaatatacgcaaatcaataaatgtaatccagcatataaacagagccaaagacaaaaaccacatgattatctcaatagatgcagaaaaagcctttgacaaaattcaacaacccttcatgctaaaaactctcaataaattaggtattgatgggacgtatttcaaaataataagagctatctatgacaaacccacagccaatatcatactgaatgggcaaaaactggaagcattccctttgaaaactggcacaagacagggatgccctctctcaccgctcctattcaacatagtgttggaagttctggccagggcaatcaggcaggagaaggaaataaagggtattcaattaggaaaagaggaagtcaaattgtccctgtttgcagacgacatgattgtttatctagaaaaccccatcgtctcagcccaaaatctccttaagctgataagcaacttcagcaaagtctcaggatacaaaatcaatgtacaaaaatcacaagcattcttatacaccaacaacagacaaacagagagccaaatcatgagtgaactcccattcacaattgcttcaaagagaataaaatacctaggaatccaacttacaagggatgtgaaggacctcttcaaggagaactacaaaccactgctcaaggaaataaaagaggagacaaacaaatggaagaacattccatgctcatgggtaggaagaatcaatatcgtgaaaatggccatactgcccaaggtaatttacagattcaatgccatccccatcaagctaccaatgactttcttcacagaattggaaaaaactactttaaagttcatatggaaccaaaaaagagcccgcatcaccaagtcaatcctaagccaaaagaacaaagctggaggcatcacactacctgacttcaaactatactacaaggctacagtaaccaaaacagcatggtactggtaccaaaacagagatatagatcaatggaacagaacagagccctcagaaataatgccgcatatctacaactatctgatctttgacaaacctgagaaaaacaaacaatggggaaaggattccctgtttaataaatggtgctgggaaaactggctagccatatgtagaaagctgaaactggatcccttccttacaccttatacaaaaatcaattcaagatggattaaagatttaaacgttaaacctaaaaccataaaaaccctagaagaaaacctaggcattaccattcaggacataggcgtgggcaaggacttcatgtccaaaacaccaaaagcaatggcaacaaaagacaaaattgacaaatgggatctaattaaactaaagagcttctgcacagcaaaagaaactaccatcagagtgaacaggcaacctacaacatgggagaaaatttttgcaacctactcatctgacaaagggctaatatccagaatctacaatgaactcaaacaaatttacaagaaaaaaacaaacaaccccatcaaaaattgggcgaaggacatgaacagacacttctcaaaagaagacatttatgcagccaaaaaacacatgaagaaatgctcatcatcactggccatcagagaaatgcaaatcaaaaccactatgagatatcatctcacaccagagatacagtatgctacttctccccaacaccaaggcattgtgggactcactaggtgctttctagatgaatggaggtcatgcaccagagccaacagttcccttgttagtgacatagtcataaggtacgctgacaacagaggtgacacttcccagcccttcaaagctgataagcaacttcagcaaagtctcagaatacaaaatcaatgtacacaaatcacaagcattcttatacaccaacaacagacagagagccaaatcatgagtgaactcccattcacaattgcttcaaagagaataaaatacctaggaatccaacttacaagggatgtgaaggacctcttcaaggagaactacaaaccactgctcaaggaaataaaagaggatacaaacaaatggaagaacattccatgctcatgggtaggaagaatcaatatggtgaaaatggccacactgcccaaggtaatttatagattcaatgccatccccatcaagctaccaatgactttcttcacagaattggaaaaaactactttaaagttcatatggaaccaaaaaagagccctcatcgccaagtcaatcctgagccaaaagaacaaagctggaggcatcacactacctgacttcaaactatactacaaggctacagtaaccaaaacagcgtggtactggtaccaaaacagagatatagatcaatgcaacagaacagagccctcagaaaactttcttacaagaaattctaaagggagttcttcaggctga

SEQ ID NO: 128657 - DNA, 1776 bp, Homo sapiens
atgaacattggtgcaaaaatcatcaataaaatactggcaaaccaaatccagcagcacatcagaaagcttatccaccatgatcaagtgggcttcatccctgggatgcaaggctggttcaatatatgcaaatcaataaatgtaatccagcatataaacagaaccaaagacaaaaaccacatgattatctcaatagatgcagaaaaggcctgtgacaaaattcaacaacgcttcatgctaaaaactctcaataaattaggtattgatgggaagtatctcaaaataataagagctatctatgacaaacccacagccaatatcatactgaatgggcaaaaactggaagcattccctttgaaaactggcacaagacagggatgccctctctcaccactcctattcaacatagtgttggaagttctggccagagcaattaggcaggagaaggaaataaaggatattcaattaggaaaagaggaagtcaaattgtccctgtgtgcagacaaaatgattgtgtatctagaaaaccccattgtctcagcccaaaatctccttaagctgataagcaacttcagcaaagtctcaggatacaaaatcaatgtacaaaaatcacaagcattcttatacaccaataacagacaaacagagagccaaatcatgagtgaactcccattcacaattgcttcaaagagaataaaatacctacaaatccaccagacaagggacgtgaaggacctcttcaaggagaactacaaaccactgctcaaggaaataaaagaggatacaaacaaagaacattccatgctcatgcgtaggaagaatcaatattgtgaaaatggccatactgcccaagaattggaaaaaactactttaaagttcatatggaaccagaaaagagcccgcatcaccaagtcaatcctaagtcaaaagaacaaagctggaagcatcatgctacctgacttcaacctatactacaaggctacagtatccaaaacagcatggtactggtaccaaaacagagatatagatcaatggaacagaacagagccctcagaaataacaccgcatatctacaactatctgatctttgacaaacctgagaaaaacaagcaatggggaaaggattccctatttaataaatggtgctgggaaaactggctagccatatgtagaaagctgaaactggatcccctccttacactttatacaaaaattaattcaagatggattaaagacttaaacgttagtcctaaaaccatcaaaaccctagaagaaaacctagacattaccattcaagacataggcatgggcaaggacttcatgtctaaaacagcaaaagcaatggcagcaaaagcaatgtcaacaaaagcaaaatttggcaaatgggatctaattaaactaaagagcttctgcacagcaaaagaaactaccatcagagtgaacaggatctcatcttatgcatcatcatccacatcattacaagccttctccagaaagatactaaactgttcaaaaagattttttaaaattgcacagatgtgtaagcttgttgaacttcggccacaagacatgcatacttccagaggcagtggtaactgctcagaggcccggactctcctatgtgactttagtgcaggaagaacttctgtcaatcacggacgcatctggagacaaatcagagaagctggggctgctgacccagagatcgggcttgaagtttgcaataagaatccaacttccttcacattattttacttcttgagctacaccacagggtaa

SEQ ID NO: 128658 - DNA, 2070 bp, Homo sapiens; identical to SEQ ID NO: 119520

SEQ ID NO: 128659 - DNA, 3229 bp, Homo sapiens
atgggagactttaacaccccactgtcaacattagacagatcaacgagacagaaagtcaacaaggatacccaggaattgaactcagctctgcaccaagcagacctaatagacatctacagaactctccaccccaaatcaacagaatatacatttttttcagcaccacaccacacctattccaaaattgaccacatagttggaagtaaagctctcctcagcaaatgtaaaagaacagaaattataacaaactatctctcagaccacagtgcaatcaaactagaactcaggattaaaaatctcactcaaagccgctcaactacatggaaactgaacaacctgctcctgaatgactactgggtacataacgaaatgaaggcagaaataaagatgttctttgaaaccaacgagaacaaagacaccacataccagaatctctgggacgcattcaaagcagtgtgtagagggaaatttatagcactaaatgcctacaagagaaagcaggaaagatccaaaattgacaccctaacatcacaattaaaagaactagaaaagcaagagcaaacacattcaaaagctagcagaaggcaagaaataactaaaatcagagcagaactgaaggaaatagagacacaaaaaacccttcaaaaaatcaatgaatccaggagctggttttttgaaaggatcaacaaaattgatagaccactagcaagactaataaagaaaaaaagagagaagaatcaaatagacacaataaaaaatgataaaggggatatcaccaccgatcccacagaaatacaaactaccatcagagaatactacaaacacctctacgcaaataaactagaaaatctagaagaaatggatacattcctcgacacatacactctcccaagactaaaccaggaagaagttgaatctctgaatagaccaataacaggttctgaaattggggcaataatcaatagtttaccaaccaaaaagagtccaggaccagatggattcacagccgaattctaccagaggtacaaggaggaactggtaccattccttctgaaactattccaatcaatagaaaaagagggaatcctccctaactcattttatgaggccagcatcattctgataccaaagccgggcagagacacaacaaaaaaagagaattttagaccaatatccttgatgaacattgatgcaaaaatcctcaataaaatactggcaaaccaaatccagcagcacatcaaaaagcttatccaccatgatcaagtgggcttcatccctgggatgcaaggctggttcaatatacgcaaatcaataaatgtaatccagcatataaacagagccaaagacaaaaaccacatgattatctcaatagatgcagaaaaagcctttgacaaaattcaacaacccttcatgctaaaaactctcaataaattaggtattgatgggacgtatttcaaaataataagagctatctatgacaaacccacagccaatatcatactgaatgggcaaaaactggaagcattccctttgaaaactggcacaagacagggatgccctctctcaccgctcctattcaacatagtgttggaagttctggccagggcaatcaggcaggagaaggaaataaagggtattcaattaggaaaagaggaagtcaaattgtccctgtttgcagacgacatgattgtttatctagaaaaccccatcgtctcagcccaaaatctccttaagctgataagcaacttcagcaaagtctcaggatacaaaatcaatgtacaaaaatcacaagcattcttatacaccaacaacagacaaacagagagccaaatcatgggtgaactcccattcacaattgcttcaaagagaataaaatacctaggaatccaacttacaagggatgtgaaggacctcttcaaggagaactacaaaccactgctcaaggaaataaaagaggacacaaacaaatggaagaacattccatgctcatgggtaggaagaatcaatatcgtgaaaatggccatactgcccaaggtaatttacagattcaatgccatccccatcaagctaccaatgactttcttcactgaattggaaaaaactactttaaagttcatatggaaccaaaaaagagcccgcatcgccaagtcaatcctaagccaaaagaacaaagctggaggcatcacactacctgacttcaaactatactacaaggctacagtaaccaaaacagcatggtactggtaccaaaacagagatatagatcaatggaacagaacagagccctcagaaataatgccgcatatctacaactatctgatctttgacaaacctgagaaaaacaagcaatggggaaaggattccctatttaataaatggtgctgggaaaactggctagccatatgtagaaagctgaaactggatcccttccttacaccttatacaaaaatcaattcaaaatggattaaagatttaaacgtcagacctaaaaccataaaaaccctagaagaaaacctaggcattaccattcaggacataggcgtgggcaaggacttcatgtccaaaacaccaaaagcaatggcaacaaaagccaaaattgacaaatgggatctaattaaactaaagagcttctgcacagcaaaagaaactaccatcagagtgaacaggcaacctaccacatgggagaaaattttcgcaacctactcatctgacaaagggctaatatccagaatctacaatgaactcaaacaaatttacaagaaaaaaacaaacaaccccatcaaaaagtgggcgaaggacatgaacagacacttctcaaaagaagacatttatgcagccaaaaaacacatgaagaaatgctcatcatcactggccatcagagaaatgcaaatcaaaaccactatgagatatcatctcacaccaactgcttgtttggaaacagcggaggaacaacaactaaataacatggagtgcgcaggcaccgaagctataaacagcctcatcagcattgccctcctgcccaagggtggaatgagccgtatcttgattgagactcaaggggacaggaccctgaagtggcacaaagagcgagcagtgtgcggagcccatatgcaggcccgagcggggcagacgacgcacagcgcaggaggatttctgctcccgcctggaattcatttgcagtcattaccttgtgggtgcgaagagttgcccagaaaacagaggatggaaa

SEQ ID NO: 128660 - DNA, 3370 bp, Homo sapiens; identical to SEQ ID NO: 126634

SEQ ID NO: 128661 - DNA, 3033 bp, Homo sapiens; identical to SEQ ID NO: 121975

SEQ ID NO: 128662 - DNA, 2745 bp, Homo sapiens
atgggagactttaacaccccactgtcaacattagacacatcaacgagacagaaagtcaacaaggatacccaggaattgaactcagctctgcaccaagcagacataatagacatctacagaactcttcaccccaaatcaacagaatgtacatttttttcagcaccacaccacacctattccaaaattgaccacatacttggaagtaaagctctcctcaacaaatgtaaaagaacagaaattataacaaactatctctcagaccacagtgcaatcaaactagaactcaggattaagaatctcactcaaaaccgctcaactacatggaaactgaacaacctgctcctgaatgactactgggtacataacaaaacgaaggcagaaataaagatgttctttgaaaccaacgagaacaaagacaccacataccagaatctctgggacgcatccaaagcaagtccaggaccagatggattcacagccgaattctaccagaggtacaaggaggaactggtaccattccttctgaaactattccaatccatagaaaaagagggaatcctccctaactcattttatgaggccagcatcatcctgataccaaagccggacagagatacaaccaaaaaagagaattttagaccaatatccttgatgaacattgatacaaaaatcctcaataaaatactggcaaaccgaatccagcagcacatcaaaaagcttatccaccatgatcaagtgggcttcatccctgggatgcaaggctggttcaatatacgcaaatcaataaaggtaatccagcatataaacagaaccaaagacaaaaaacacatgattatctcaatagatgcagaaaaggcctttgacaaaattcaacaacctttcatactaaaaactctcaataaattaggtattgatgggacgtatttcaaaataataagagctatctatgacaaacccacagccaatatcatactgaatgggcaaaaactggaagcattccctttgaaaactggcacaagacagggatgccctctctcaccactcctattcaacacagtgttggaagttctggccagggcaattgggcaggagaaggaaataaagggtattcagttaggaaaagaggaagtcaaactgtccctgtttgcagatgacatgattgtatatctagaaaaccccattgtctcagcccaaaatctccttaagctgataagcaacttcagcaaagtctctggatacaaaatcaatgtacaaaaatcacaagcattcttatacaccaacaacagacaaacagagagccaaatcatgagtgaactcccattcacaattgcttcaaagagaataaaatacctaggaatccaacttacaagggatgtgaaggacctcttcaaggagaactacaaaccactgctcaaggaaataaaagaggatacaaacaagtggaagaacattccatgctcatgggtaggaagaatcaatattgtgaaaatggccatactgcccaaggtaatttacagattcaatgccatccccatcaagctaccaatgactttcttcacagaactggaaaaaactactttaaagttcatatggaaccaaaaaagagcctgcatcgccaagtcaatcctaagccaaaagaacaaagctggaggcatcacactacctgacttcatactatactacaaggctacagtaacaaaaacagcatggtactggtaccaaaacagagatatagatcaatggaacagaacagaggcctcagaaataacgccgcatatctacaactatctgatctttgacaaacctgaggaaaacaagcaatggggaaaggattccctatttaataaatggtgctgggaaaactggctagccatatgtagaaagctgaaactggatcccttccttacaccttatacgaaaatcagttcaggatggattaaagacttaaacgttagacctaaaaccataaaaaccctagaagaaaacctaggcattaccattcaggacataggcatgggcaaggacttcatgtctaaaacaccaaaagcaatggcaacaaaagccaaaattgacaaatgggatctaattaaactaaagagcttctgcacagcaaaagaaactaccatcagagtgaacaggcaacctaaaaaatgggagaaaattttcacaacctactcatctgacaaagggctaatatccagaatctacaacgaactcaaacaaatttacaagaaaaaaacaaacaaccccattaaaaagtgggcaaaggacatgaacagacacttctcaaaagaagacatttatgcagccaaaaaacacatgaaaaactgctcaccatcactggccatcagagatatgcaaatcaaaaccacaatgagataccatctcacaccagttagaatggcgatcattaaaaagtcaggaaacaacagaagaattggtaccaatcctatggacactattccaaaagataaagagggaatcctccctaaatcattctatgaagccatgatcaccctaataccaaaaccaggaaaggacatatcaaaaaaacaaaactatggaccaacatccctgatgaacacagatgcaaaaatcctcaacgaaatcctagctaaccgaatccaacagcatatcaaaaagataatccatcacgatcaagttgtacctgtgtcttatcctgaagacagtggtgatggtcagcatcccatgaatgagatggacctgtcatccacataccactaa

SEQ ID NO: 128663 - DNA, 3831 bp, Homo sapiens; identical to SEQ ID NO: 124226

SEQ ID NO: 128664 - DNA, 2667 bp, Homo sapiens; identical to SEQ ID NO: 123242

SEQ ID NO: 128665 - DNA, 2328 bp, Homo sapiens
atgctgaacccgggcctggtgggcctcaacatcctggacagcttcgccggcggcctgcccatgctgacgacggactgcggcctgcattcgcccgagatcgcctatctgggatttttggccaatcgggtccagccagctcaaaatccttggctcacactgaaccttcagctcggtaccccacttatcaccacagaaatacaaactatcatcagagaatactacaaacacctctatgcaaataaactagaaaatctagaagaaatggataaattccttgacacatacaccctcccaagactaaaccaggaagaagttgaatctctgaatagatcaataacaggctctgaaattgaggcaataattaatagcttaccaaccaaacaaaatccgggaccagatggattcacagccgaattctaccagaggtacaaggaggagctgcatataaacagaaccagtgacaaaaaccatatgattacctcaatagatgcagaaaaggcctttgacaaaattcaacagcccttcatgctaaaaactctcaataaattaggtactgataggacatatctcaaaataataagagctatctatgacaaacccacagccaatatcatactgcgtgggcaaaaactggaagcattccctttgaaaactggcacaagacagggatgtcctctctcaccactcctattcaacatagtgttagaagtactggccagggcaatcaggcaggagaaggaaataaagggtattcaattaggaaaagaggaagtcaaattgtccctgtttgcagatgacatgattgtatatcaagaaaaccccatcatctcagcccaaaatctccttaagttgataggcaacttcagcaaagtctcaggatacaaaatcaatgtgcaaaaatcacaagcattcttatacaccaataatagacaaacagagagccaaaccatgagtgaaccgccattcacaattgcttcaaagagaataaaatacctaggaatccaacttacaagggatgtgaaggacctcttcaagaagaactacaaaccactgctcaatgaaataaaagaggatacaaacaaacggaagaacattccatgctcatgggtaggaagaatcaatatcgtgaacatggccatactgcccaaggtaatttatagattcaatgccatccccatcaagctaccaatgcctttcttcacagaattggaaaaaactactttaaagttcatatggaaccaaaaaagagcccgcattgccaagtcaatcctaagccaaaagaacaaagctggaggcatcatgctacctgacttcaaactatactacaaggctatagtatatcaaaacagagatatagaccaatggaacagaacagaggcctcagaaataatgccgcatatctacaaccatctgatctttgacaaacctgacaaaaacaagaaatggataaaggattccctatttaacaaatggtgctgggaaaactggctagccatatgtagaaagctgaaactggatcccttccttacaccttatacaaaaattaattcaagatggattaaagacctaaatgttagacccaaaaccataaaaaccctggaagaaaacctgggcaataccattcaggacataggcatgggcaaggacttcatgtctcaaacaccaaaagcaatggcaacaaaagccaaaattgacaaatgggatctaattaaactaaagagcttctgcatagcaaaagaaactaccatcggagtgaataggcaacctacagaatgggagaaaatttttgcaatttactcatctgacaaagggctaatatccagaatctacaatgaagtcaaacacatttacaagaaaaaaacaaccccatcaacaaacagggccaccagaagggttccttggtctggcggtgatgccagcgtctgggaagatgcccgttgtcaggcggaccgtggtctagcagtagcgaaaagtgtcaaggaacaacacccgctacttagcagaccaggaaagggaggctccctttccccgggggagtttagagaagactctgttcctccacctcttgtggagggcctgacatcagtcagactgcccgggtaccgagcacgattgtatcatgatatgatttgtcttctaataatactgacaaaaacaactggatttaaagatgaaagtgtctgccatgaggagtacggggacagcaggaatgaaaaggaatatttaagaatgcaaaaaccagtcagacagcacagctctgagcctggcagtgcccctgcaggggcactggttcacatgctgattgtgagcaaggaaaatctcatttaa

SEQ ID NO: 128666 - DNA, 3057 bp, Homo sapiens; identical to SEQ ID NO: 121979
  misc_feature (1)...(3057): n = a,t,c or g

SEQ ID NO: 128667 - DNA, 2976 bp, Homo sapiens; identical to SEQ ID NO: 116582

SEQ ID NO: 128668 - DNA, 3105 bp, Homo sapiens
atgtactcacatgtgatcacggtgtgccggcatgtgaagaatggggacattctgctactgaaccgacagcccacactgcacagaccctccatccaggcccaccgtgcccgcatcctgcctgaagagaaagtgctgcggctccactatgccaactgcaaggcctataatgccgactttgatggagacgagatgaatgcccatttcccccagagtgagctgggccgggccgaggcctacgtcctggcctgcactgatcagcagtaccttgttcccaaggatggccaaccattggcgggactgatccaggatcacatggtttcaggggcaagcatgactactcggggttgctttttcacccgggagcactatatggagctggtgtaccgaggactcacggacaaagtggggcgcgtgaagctcctttctccttccatcctgaagccctttccgctgtggacaggaaaacagcatataaacagaaccaaagacaaaaaccacatgattatctcaatagatgcagaaaaggcctttgataaaattcaacaacccttcatgctaaaaactctcaataaattaggtattgatgggacgtatctcaaaataataagagctatctatgacaaacccacagccagtatcatactgaatgggcaaaaactggaagcattccctttgaaaactggcacaagacagggatgccctctctcaccactcctattcaacatagtgttggaagttctggccagggcaatcaggcaggagaaggaaataaagagcattcagttaggaaaagaggaagtcaaattgtccctgtttgcagatgacatgattgtatatctagaaaaccccactgtctcagcccaaaatctccttaagctgatgagcaacttcagcaaagtctcaggatacaaaatcaatgtgcaaaaatcacaagcattcttatacaccaataacagacaaacagagagccaaatcatgagtggactcccattcacaatcacttcaaagagaataacatacctaggaatccaacttacaagggatgtgaaggacctcttcaaggagaactacaaaccactgctcaaggaaataaaagaggatacaaacaaatggaagaacattccatgctcatgggtaggaagaatcaatatcgtgaaaatggccatactgcccaaggtaatttatagattcaacaccatccccatcaagctaccaatgactttcctcacagaattggaaaaaactactttaaagttcatatggaaccaaaaaagagcccacattgccaagtcaatcttaagccaaaagaacaaagctggaggcatcatgctacctgacttcaaactatactacaaggctacagtaaccaaaacagcatggtactggtaccaaaacagagatatagaccaatggaacagaacagagccctcagaaataatgccgcatatctataactatctgatctttgacaaacctgacaaaaacaagcaatggggaaaggattccctatttaataaatggtgctgggaaaactggctagccatatgtagaaagctgaaactggatcccttccttacaccttatacaaaaattaattcaagatggattaaagacttacatgttagacctaaaaccataaaaaccctagaagaaaacctaggcaataccattcaggacataggcatgggcaaggacttcatgtcgaaaacaccaaaagcaatggcaacaaaagccaaaattgacaaatgggatctcattaaactaaagagcttctgcacagcaaaagaaaccaccatcagagtgaacaggcaacctacagaatgggagaaaatttttgcaacctactcatctgacaaagggctaatatccagaatctacaatgaactcaaacaaatttacaagaaaaaaacaaacaaccccatcaaaaagtgggcaaaggatatgaacagacacttctcagaagaagacatttatgcagccaaaaaacacatgaaaaaatgctcatcatcactggccatcagagaaatgcaaatcaaaaccacaatgagataccatctcacaccagttagaatggtgatcattaaaaagtcaggaaacaataggtgctggagaggatgtggagaaataggaacacttttacactgttggtgggactgtaaactagttcaaccattgtggaagtcggtgtggcaattcctcagggatctagaactagaaataccatttgacccagccatcccattactgggtatatacccagaggattataaaccatgctgctataaagacacatgcacacgtatgtttattgcggcactattcacaatagcaaagacttggaaccaacccaaatgtccaacaatgatagacgggattaagaaaatgtggcacatatacaccatggaatactatgcagccataaaaaaggatgagttcatgtcctttgtagggacatggatgaagctggaaaccatcattctcagcaaactatcgcaaggacagaaaaccaaacaccgcatgttctcactcatagtcaggaccctcagctgcaggtctgttggagtttactcgaagtccactccagaccctgtttgcctgagtatcagcagcagtggctgcagaacagcagatattagtgtatcacaaatgctactgcctgattgttcctctggaagttttgtctcagaggagtacccgaaggtaatgagtgggcacaaggaggatgaagagggctcggggcaccgcctggcatggatgatgccatctgtcaaggagagtcactggggcctcctattttcaaaggagagaactagccactttgatcagcacgacctaggagatgtcaccctacaccagtcagaacccgaggacgatgccagagagacataccttagaagaggtgttctggggcctggagaggcatttggtgccctcacatctacctgccataccacatgcagggcagcctttaacaaagtccaatcctcagggtctgtccaagcaaagggggtggacacagagaggagattaaggacccagactctggagacacctgcttggcttcaaattcctgttccacgacttgatgactatgtctttgggtga

SEQ ID NO: 128669 - DNA, 3657 bp, Homo sapiens; identical to SEQ ID NO: 120146

SEQ ID NO: 128670 - DNA, 2839 bp, Homo sapiens
aaacctcaactctctatgcagcttcgatcgtaggtatgtgtggggcttctgtaaaagtctgatccagggttactttgcccaattacactctccgctgcctgctggaccccacttgtgatgccccttgtaatgatcatggcatgaacacccgctggatgagccatagatactgtgagatggtgagctcactttctttagagaattttcattgttgcacccaaaggagctccattctcttccctcatgtgcctgttggcagaagacaactcgtatggaaagtggtttttggaatcgatgtgattctacatgaggttctatgcagagtcaatgcctctgcaaggagaagcaggcttgcccacacatggtttgccctgagagcatgtactgtctgtatttatctccctgtctatatgcagcccactgtcttacaacagtgcagtgcaagccctgcagctggtaggatatcaaaacctgaaggcctagatttcaagtgccatccagatatgaaatctttcaacctttcggtggctttgaatctaaagtgtgtctcttgtaaatggcacactgagtttgaagtgcctcacagtgaggtctctgctgtgggcgactgctgggcttcaagcagtccaggacccttcagtcaactgcccaagttcagatggcccagttctccaaaaggagagaagggtgcaccagaatgtcaccagggcagagagcgaaacagatcatggtagcgatccttccccagatccaggccctcccccttcctccttctctctcgttatctcagaattcacatggtattctcagttttgccttttggcctgcaaaacccgaaatatttactatctggctctttgcaggaaaagttcaggacccctggtataaattcccataaaacactggatccaaatagagtaatcattaaggtgaggaggaggctggagaaggagaaagccctgagggcctatgttgggaaatcagaggttcgtaacatgcatttaagagaaagatgcaaactatagaagaaaagagagaagaatcaaatagacacaattaaaaatgataaaggggatatcaccactgatgccacagaaatacaaactaccatcagagaatactataaacacctctatgcaaataaactagaaaacctagaagaaatggataaattcctcgacacatacatcctcccaagactaaaccaggaagaagttgaatctctgaatagaccaataacaggctctgaaattgaggcaataattaatagcttaccaaccaaaagaagtccaggaccagatggattcacagccgaattctaccagacgtacaaagaggagctggtaccattccctctgaaactattccaatcaacagaaaaagagggaatcctccctaactcattttatgaggccagcatcatcctgataccaaagcctggcagagacacaacaaaaaaagagaattttagaccaatatccttgatgaacatcgatgcaaaaatcctcaataaaatactggcaaaccgaatccagcagcacatcaaaaagcttatccactatgatcaagtgggcttcatccctgggatgcaaggctggttcaacaaacgcaaatcaataaatgtaatccagcatataaacagaaccaatgacaaaaaccacatgattatctcaatagatgcagaaaaggcctttgacaaaattcaacaacccttcatgctaaaaactctcaataaattaggtattgatgggacgtatctcaaagtaataagagctatctatgacaaacccacagccaatatcatactgaatgggcagaaactggaagcattccctttgaaaactgacacaagacagggatgccctctctcaccactcctattcaacatagtgttggaagttctggccagggcagtcaggcaggagaaggaaatagagggtattcaattaggaaaagaggaagtcaaattgtccctgtttgcagatgacatgattgtatatctagaaaaccccatcgtctcagcccaaaatctcctcaagctgataagcaacttcagcaaagtgtcaggatacaaaatcaacatacaaaaatcacaagcattcttatacaccaataacagacaaacagagagccaaatcatgagtgaactcccattcacaactgcttcaaagaaaataaaatacctaggaatccaacttacaagggatgtgaaggacctcttcaaggagaactacaaaccactgctcaatgaaataaaagaggatacaaacaaatggaagaacattccatgctcgtgggtaggaagaatcaatatcatgaaaatggccatactgcccaaggtaatttgtagattcaatgccatccccatcaagctaccaatgcctttcttcacagaattggaaacaactactttaaagttcatatggaaccaaaaaagagcccgcatcgccaagtcaatcctaagccaaaagaacaaagctggaggcatcacactacctgacttcaaactatactacaaggctacagtaaccaaaacagcatggtactggtaccaaaacagagatatagatcaatggaacagaacagagccctcagaaataacaccgcatatctacaactatctgatctttgacaaacctgagaaaatgagtataatagatacagggggatggtatgaggcaccagtcagttccttcttcaaggagggactatgccgcacaggtactgagaatcaggttaacagacagcctccagctgccagtcccttcaaggtttacgtcagctgcacggggtcacttcaccctaggccacactacttcttggagcatccatatccaag

SEQ ID NO: 128671 - DNA, 2253 bp, Homo sapiens; identical to SEQ ID NO: 123239

SEQ ID NO: 128672 - DNA, 2872 bp, Homo sapiens
atgaaggcagaaataaaggtgttctttgaaaccaacgagaacaaagacacaacataccagaatctctgggacacattcaaagcagtgtgtagagggaaatttatagcactaaatgcccacaagagaaagcaggaaagatccaaaattgacaccctaacatcacaattaaaagaactagaaaagcaagagcaaacacattcaaaagctagcagaaggcaagaaataactaaaatcagagcagaactgaaggaaatacagacacaaaaaacccttcaaaaaatcaatgaatccaggagctggttttttgaaaggatcaacaaaattgatagatcgctagcaagactaataaagaaaaaaagagagaagaatcaaatagacacaataaaaaatgataaaggggatatcaccaccgatcccacagaaatacaaactaccatcagagaatactacaaacacctctatgcaaataaactagaaaatctagaagaaatggataaattcctcgacacatacactctcccaagactaaaccaggaagaagttgaatctctgaatagaccaataacaggagctgaaattgtggcaataatcaatagtttaccaaccaaaaagagtccaggaccagatggattcacagccgaattctaccagagctgggcagagacacaaccaaaaaaagagaattttagaccaatatccttgatgaacattgatgcaaaaatcctcaataaaatactggcaaaacgaatccagcagcacatcaaaaagcttatccaccatgatcaagtgggcttcatccctgggatgcaaggctggttcaatatacgcaaatcaataaatgtaacacagcatataaacagagccaaagacaaaaaccacatgattatctcaatagatgcagaaaaagcctttgacaaaattcaacaacccttcatgctaaaaactctcaataaattaggtattgatgggacgtatttcaaaataataagagctatctatgacaaccccacagccaatatcatactgaatgggcaaaaactggaagcattccctttgaaaactggcacaagacagggatgccctctctcaccactcctattcaacatagtgttggaagttctggccagggcaattaggcaggagaaggaaataaagggtattcaattaggaaaagaggaagtcaaattgtccctgtttgcagacaacatgattgtatatctagaaaaccccattgtctcagcccaaaatctccttaagctgataagcaacttcagcaaagtctcaggatacaaaatcaatgtacaaaaatcacaagcattcttatacaccaacaacagacaaacagagagccaaatcatgagtcaactcccattcacaattgcttcaaagagaataaaatacctaggaatccaacttacaagggatgtgaaggacctcttcaaggagaactacaaaccactgctcaaggaaataaaagaggatacaaacaaatggaaaaacattccatgctcagggggaaggaagaatcaatatcgtgaaaatggccatactgcccaagaattggaaaaaaactactttaaagttcatatggaaccaaaaaagagcccgcattaccaagtcaatcctaagccaaaagaacaaagcgggaggcatcatgttacctgacttcaaactatactacaaggctacagtaaccaaaacagcatggtactggtaccaaaacagacatatagatcaatggaacagaacagatccctcagaaataatgccacatatctacaactatctgatctttgacaaacccaagaaaaacaagcaatggggaaaggattccctatttaataaatggtgctgggaaaactggctagccatatgtagaagcctgaaactggatcccttccttacaccttatacaaaaatcaattcaaggtggattaacgacttaaacgttagacctaaaaccataaaaaccagagaagaaaacctaggcattaccattcaggacatcggcatgggcaaggacttcatgtctaaaacaccaaaatcaatggtaacaaaaaccaaaattgacaaatgggatctaattaaactaaagagcttctgcacagcaaaagaaactaccgtcagagtgatcaggcaacctacaaaatgggagaaaattttcacaacctactcatccgacaaagggctaatatccagaatgtacaatgaactcaaacaaatttacaagaaaaaaacaaacaaccccatcaaaaagtgggtgaaggacatgaacagacacttctcaaaagaagacatttgtgtagtcaaaaaacacatgaaaaaatactcaccatcactggccatcagagaaatgcaaatcaaaaccacaatgagataccatctcacaccagttagaatggcaatcattaaaaagtcaggaaacaacaggtgctggagaggatgtggagaaacaggaacgcttttacactgttggtgggactgtaaactagctcaaccattgtggaagtcagtgtggcgattcctcagggatctagaactagaaataccatttgacccagccatcccattactgggtatatacccaaatgactataaatcatgctgctataaagacacatgcacacgtatgtttattgcggcattattcacaatagcaaagacttggaaccaacccaaatgtccaacaattatagactggattaagaaaatgtggcacatatacaccatggaatactatgcagccataaaaaatgatgagttcgtgtcctttgtagggacatggatgaaattggaaatcatcattctcagtaaactatcacaagaacaaaaaaccacacaccgcatattctcactcataggtgggaattga

SEQ ID NO: 128673 - DNA, 2940 bp, Homo sapiens
atggtggcctccagatcctctagagtcggtgtcttctatggaggtcaaaacagcgtggatggcgtctccaggcgatctgacggttcactaaacgagctctgcttatatagacctcccaccggggcgtacttggcatatgatacacttgatgtactgccaagtgggcagtttaccgtaaatactccacccattgacgtcaatggaaagtccctattggcgttactatgggaacatacgtcattattgacgtcaatgggcgggggtcgttgggcgatgcagccacttggccagctgggtcagctcgaacacctcggagaccggcgcgatcaggtcctcgaccgaagtggacgctcccgacgactcgatgctgctcagcacctgcgacatcgacctgaccgccgcccgcagggcatggttggggtgcttaccaaccaaaaagagcccaggaccagatggattcacagcagaattctaccagaggtgcaaggaggaactggtaccgttccttctgaaactattccaatcgatagaaaagagggaatccttcctaacttatttgatgaggccagcatcatcctgataccaaagcggggcagagacaccaccaaaaaagagaattttagaccaatatccttgatgaacattgatgcaaaaatcctcaataaaatactggcaaaccgaaaccagcagcacatcaaaaagcttatccaccatgatcaagtgggtttcatccctgggatgcaaggctggttcaatatatgcaaatcaataaatgtaatccagcatataaacagaaccaaagacaaaaaccacatgattatctcaatagatgcagaaaaggcctttgacaaaattcaacaacccttcatgctaaaaactcttaataaattaggtattgatgggacgtatctcaaaataataagagctatctatgacaaacccacagccaatatcatactgaatgggcaaaaactggaagcattccctttgaaaactggcacaagacagggatgccctctctcaccactcctattcaacatagtgttggaagttctggccagggcaatcaggcaggagaaggaaataaagggtattcaattaggaaaagaagaagtcaaattgtccctgtttgcagatgacatgattgtatatctagaaaaccccatcgtctcagcccaaaatctccttaagctaataagcaacttcagcaaagtctcagcatacaaaatcaatgtacaaaaatcacaagcattcttatacaccaataacagacaaacagagagccaaatcatgagtgtattcccattcacaattgcttcaaagagaataaaatacttaggaatccaacttgcaaggaatgcgaaggacctcttcaaggagaactacaaaccactgctcaatgaaataaaagaggatacaaagaaatggaagaacattccatgctcatgggtaggaagaatcaatatcgtgaaaatggccatactgcccaaggtaatttacagattcaatgccatccccatcaagctaccaatgactttcttcacagaattggaaaaaactactttaaagttcatatggaaccaaaaaagagcccgcatcgccaagtcaatcctaagccaaaagaacaaagctggaggcatcacgctacctgacttcaaactacactacaagattacagtaaccaaaacagcatggtactggtaccaaaacagagatatagatcaatggaacagaacagagccctcagaaataacgccgcatatctacaactatctgatctttgacaaacctgagaaaaacaagcaatggggaaaggattccctatttaataaatggtgctgggaaaactggctagccatatgtagaaagctgaaactggatcccttccttacaccttatacaaaaattcatccaagatggattaaagacttaaacgttagacctaaaaccataaaaaccctagaagaaaacctaggcaataccattcaggacataggcatgggcaaggacttcatgtctaaaacaccaaaagcaatggcagcaaaagccaaaattgacaaatgggatctaattcaactaaagagcttctgcacagcaaaagaaactaccatcagagtgaacaggcaacctacaaaatgggagaaaattttcgcaacctactcatctgacaaagggctaatatccagaatctacaaagaactcaaacaaatttacaagaaaaaaaacaaacaaccccatcaaaaagtgggcgaaggacatgaacagacacttctcaaaagaagacatttatgcagccaacaaacacatgaaaaaatgctcaccatcactggccatcagagaaatgcaaatcaaaaccactatgagataccatctcacaccagttagaatggcaatcattcaaaagtcaggaaacaacaggtgctggagaggatgtggagaaataggaacactcttacactgttggtgggactgtaaactagttccacatattctcactcataggtgggaattgaacaatgagatcacatggacacaggaaggggaatatcacactctggggactgtggtggggtggggggaggggggagggatagcattgggagatatacctaatgcaagatgacgggttagtgcctggttggaatggatcaaatattccatccacacgttaaaaaaaagcaattgttatgcttgtgcacatggcaagccagaggcccagattgtcccctttccactaaggtggtcctccagtcaaccaggtgtgggctgcatggtaacccttttccaggattctacagcctggagtaataagtcatgccaagctctctctgctgtatcccggaagctgactggtccacgcacagccgaagcatgagaaaactcattgcggggactcattttccttaaaattcagacttgtacagtaaggacttattaact

SEQ ID NO: 128674 - DNA, 3303 bp, Homo sapiens; identical to SEQ ID NO: 124216

SEQ ID NO: 128675 - DNA, 2902 bp, Homo sapiens
atggctgacatgctaacatgggaatcctgtcttgaggagtcactccaagaggagtcaccattggtcactcactgtggccccagctgctgcatctctggacagtcgcctccaagctcagctcgtccatcctcagtgtccagtgcaatctctgtgttgatgctgcctcagaacaggaagctgcctcctgcctggacgtctcctggaatcttccccacagatctggtggtttactccatgtcacttcctcatgcccttgccagatataactgtgatgtatgtaaaagcatgctgcctccaagattgtatgctcctgaggaaaaagctcgtacctctccactttgtggaacctggtactcaccttcactaccactttgtggagcctggtgcaagaagaatgagaagaagagggaaagagagagagagagaaagagacagagagaggatatactttctggtgcctcttcgtataaggacactattcatattcaattaagacccccaccttatgacgtccttcaacaaatacaaactaccatcagagaatacttcaaacacctctatgcaaataaactagaaaatctagaagaaatggataaactcctcgacacatacaccctcccaagactaaaccaggaagaagttgaatctctgaatagactaataacaggctctgaaattgtggcaataatcaacagcttaccaaccaaaaagagtccaagaccagatggattcacagctgaattctaccagaggtacaaggaggaactggtaccattccttctgaaactattccaatcaatagaaaaagggggactcctccctaactcattttatgaggccagcatcatcctgatgccaaagctgggcagagacacaaccaaaaaagagaattttagaccgatatccctgatgaacattgatgcaaaaatcctcaataaaatactggcaaaccaaatccagcagcacatcaaaaagcttatccagcatgatcaagtgggcttcatccctgggatgcaaggctggttcaatatttgcaaatcaataaatgtaatccagcatataaacagaaccaaagacaaaaaccacatgactatctcaatagatgcaggaaaagcctttgacaaaattcaacaactcttcatgctaaaaactctcaataaattaggtattgatgggacgtatctcaaaataataagagctatctatgacaaacccacagccaatatcattctgaatggggaaaaactggaagcattccctttgaaaactggcacaagacagggatgccctctctcaccactcctattcaacatagtgttggaagttctggccagggcaattaggcaggagaaggaaataaagggtattcgattacgaaaagaggaagtcaaattgtccctgtttgcagatgacatgattgtatatctagaaaaccccatcatctcagcccaaaatctccttaagctgataagcaacttcagcaaaatctcaggatacaaaatcaatgtacaaaaatcacaagcattcttatacaccaacaacagacaaacagagagccaaatcatgagtgaactcctattcacaattgcttcaaagagaataaaatacctaagaatccaacttactaaggacgtgaaggacctcttcaagaagaactacaaaccactgctcaatgaaataaaagaggatacaaagaaatggaagaacattccatgctcatgggtaggaagaatcaatatcgtgaaaatggccatacggcccaaggtaatttatagattcaatgccatccccatcaagctaccaatgactttcttcacagaattggaaaaaactactttcaagttcatatggaaccaaaaaagagcccgcatcgccaagtcaatcctaagccaaaagaacaaagctggaggcatcacactacctgacttcaaactatactacaaggctacagtaaccaaaacagcatggtactggtaccaaaacaaagatatagatcaatggaacagaacagagccctcagaaataatgccgcatatctacaactatctgatctttgacaaacctgacaaaaacaagcaatggggaaaggattccctatttaataaatggggctgggaaaactggctagccatatgtagaaagctgaaactggatcccttccttacaccttatacaaaaattaattcaagatggattaaagatttaaacgttagacctaaaaccataaaaaccctagaaaaaaacctaggcattaccattcaggacataggcatgggcaaggacttcatgtctaaaacaccaaaagcaatggcaacaaaagccaaaattgacaaatgggatctaattaaactaaagagcttctgcacagcaaaagaaactaccatcagagtgaacaggcaacctacaaaatgggagaaaatttttgcaacctactcatctgacaaagggctaatatccagaatctacaatgaactcaaacaaatttacaagaaaaaaacaaacaaccccatcaaaaagtgggtgaaggacatgaacagacacttctcaaaagaagacatttgtgcagccaaaaaacacatgaaaaaatgctcatcatcactggccatcagagaaatgcaaatcaaaaccacaatgagatatcatctcacaccagttagaatggcaatcattaaaaagtcaggaaacaacagcactattcacagtagcaaagacatggattcaacccaaatgtgcatcaatgatacactgtatgaagaaagtgtagaacatatacaccatgaaatacaatccagccataaaaaaggagttcacatcctttgcagcaatatggatggagctgaaagccactttcctaagcaaactaatgcaagaacagaaagccaaatactgcatgttctcactt

SEQ ID NO: 128676 - DNA, 5178 bp, Homo sapiens
atggctcagttccatgtctctcatcctccagcagagtggcccagacatgttctcctgctgatggcagacagcaagaatgagcttcagaatatgaatacaggccagacctgtgggacaagacagaccctgaagtcaaagctgcagggttggaacaagccagggattcagtctgatcctggaagtcaggggcatcccaggtgcctgaagacctttcctcttgttgctcaatctagcacacaggaaagaaatcatgtcatggaaaaggcagttttgaagagtcagaattgggctataattgaagagttcattaccaagatcggttggttccctgattacagtggcaaggtgaaatatttatcctctccaaaaagctcctgcacaactgttctccaagtcacccacttctcactcttttttcatccgaacccggatgagcttgtcagcaaaattaaagtgtggtctaagcatcgtctgtatcagaacaattcagaggctttcttagaagtgcagattccagagcccaaatgtgaggtgtacagcatgagaacaatgggaagaagacagccggggactgctatggacctgaatgcagggggctccatctgcaatgtcccacgcaccttactgcatctcacaggggaatccacttttcgtgataggcagagggtaggggcttatcttgacattcggggttggtatatcttggttttggtggttgataaagaaaaactggggattcctggacagaaacagaattcttccaagatcctctttgggtcagagaagctgaaacagtgggtctatgtgaagaatcatgcaaaggagtcaattacacaagaagcaatgggaatctgggtagggcagcagaggaagagacagcctttaggatatgaagaacgaaaactaacaaacaggaaggacatccacatcaaaaacccatctgtatgtcaccatcatcaaagaccaaaggtagataaaaccacaaagatggggaaaaaacagagcagaaaaactggaaactctaaaaatcagagcacatctcctactctaaaggaaagcagctcctcaccagcaacagaacaaagctggacagagaatgactttgacgagttgagagaagaaggcttcagaagatcagactactccgagctacaggaggaagttcaaaacaatggcaaagaagttaaaaactttggaaaaaaattagatgaatggataactagaataaccaatgcaaagaagtccttaaaggacctgatggagctgaaaaccaaggcacgagaactatgtgatgaacgcacaagcctcagtagccaatgcaatcaactggaagaaagggtatcagtgatggaagatgaaatgaatgaaataaagcaagaagagaagtttagagaaaaaagaataaaaagaaacgaacaaagcctccaagaaatatgggactatatgaaaagaccaaatctacgtctgattggtgtacctgaaagtgacggggagaatggaaccaagttggaaaacactctgcaggatattatccaggagaacttccccaatctagcaaggcaggccaacattcaaattcaggaaatacagagaacgccacaaagatactccttgagaagagcaaccccaagacacataattgtcagattcaccaaagttgaaatgaaggaaaaaatgttaagggtagccagagagaagggtcgggttacccacaaagggaagcctgtcagactaacagctgatctcttggcagaaactctacaagccagaagacaagacacacataggctcaaaataaagggatggaggaagatttaccaagcaaatggaaaacagaaaaaggcaggggttgcaatcctagtctcagataaaacagaatttaaaccaacaaagatcaaaagagacaaagaaggccattacataatggtaaagggatcaattcaacaagaagagctaactatcctaaatatatatgcacccaatacaggagcacccagattcacaaagcaagtccttagagacctacaaagagacttagactccaacacaataataacgggagactttaacaccccactgtcaacattagacagatcaatgagacagaaagttaacaaggatatccaggaattgaactcagctctgcaccaagcagacctaatagacatctacagaactctccaccccaaatcaacagaaaatacattcttttcggcaccacaccacacctattccaaaattgaccacatagtgggaagtaaagcactcctcagcaaatgtaaaagaaaagaaattataacaaactgtctctcagaccacagtgcaatcaaactagaactcaggattaagaaactccctcaaaactgctcaactatatggaaactgaacaacctgctcctgaatgactactgggtacataacgaaatgaaggcagaaataaagatgttgtttgaaaccaatgagaacaaagacacaacataccagaatctctgggacacattgaaagcagtgtgtagagggaaatttatagcactaaatgcccacgggagaaaacaggaaagatctaaaattgacaccctaacatcacaattaaaagaactagcaaagcaagagcaaacacattcaaaagctagcagaaggcaagaaataactaagatcagagcagaactgaaggaaatagagacacaaaaaacccttcaaaaaattaatgaatccaggagctggttttttgaaaggatcaacaaaattgatagaccgctagcaagactaataaagaaaaaaagagagaagaatcaaatagacacaataaaaaatgataaaggggatatcaccaccgatcccacagaaatacaaactaccatcagagaatactacaaacacctctacgcaaataaactagaaaatctggaagaaatggatacattcctcgacacatacactctcccaagactaaaccaggaagaagttgaatctctgaatcgaccaataacaggctctgaaattgtggcaataatcaatagtttaccaaccaaaaagagtccaggaccagatggattcacagccgaattctaccagaggtacaaggaggaactggtaccattccttctgaaactattccaatcaatagaaaaagagggaatcctccctaactcattttatgagaccagcatcattctgataccaaagccgggcagagacacaaccaaaaaagagaattttagaccaatatccttgatgaacattgatgcaaaaatcctcaataaaatactggcaaaccgaatccagcagcacatcaaaaagcttatccaccatgatcaagtgggcttcatccctgggatgcaaggctggttcaatatacgcaaatcaataaatgtaatccagcatataaacagagccaaagacaaaaaccacatgattatctcaatagatgcagaaaaagcctttgacaaaattcaacaacccttcatgctaaaaactctcaataaattaggtattgatgggacgtatttcaaaataataagagctatctatgacaaacccacagccaatatcatactgaatggacaaaaactggaagcattccctttgaaaactggcacaagacagggatgccctctctcaccgctcctattcaacatagtgttggaagttctggccagggcaatcaggcaggagaaggaaataaagggtattcaattaggaaaagaggaagtcaaattgtccctgtttgcagacgacatgattgtttatctagaaaaccccatcgtctcagcccaaaatctccttaagctgataagcaacttcagcaaagtctcaggatacaaaatcaatgtacaaaaatcacaagcattcttatacaccaacaacagacaaacagagagccaaatcatgagtgaactcccattcacaattgcttcaaagagaataaaatacctaggaatccaacttacaagggatgtgaaggacctcttcaaggagaactacaaaccactgctcaaggaaataaaagaggagacaaacaaatggaagaacattccatgctcatgggtaggaagaatcaatatcgtgaaaatggccatactgcccaaggtaatttacagattcaatgccatccccatcaagctaccaatgactttcttcacagaattggaaaaaactactttaaagttcatatggaaccaaaaaagagcccgcattgccaagtcaatcctaagccaaaagaacaaagctggaggcatcacactacctgacttcaaactatactacaaggctacagtaaccaaaacagcatggtactggtaccaaaacagagatatagatcaatggaacagaacagagccctcagaaataatgccgcatatctacaactatctgatctttgacaaacctgagaaaaacaagcaatggggaaaggattccctgtttaataaatggtgctgggaaaactggctagccatatgtagaaagctgaaactggatcccttccttacaccttatacaaaaatcaattcaagatggattaaagatttaaacgttaaacctaaaaccataaaaaccctagaagaaaacctaggcattaccattcaggacataggcgtgggcaaggacttcatgtccaaaacaccaaaagcaatggcaacaaaagacaaaattgacaaatgggatctaattaaactaaagagcttctgcacagcaaaagaaactaccatcagagtgaacaggcaacctacaacatgggagaaaatttttgcaacctactcatctgacaaagggctaatatccagaatctacaatgaactcaaacaaatttacaagaaaaaaacaaacaaccccatcaaaaagtgggcgaaggacatgaacagacacttctcaaaagaagacatttatgcagccaaaaaacacatgaagaaatgctcatcatcactggccatcagagaaatgcaaatcaaaaccactatgagatatcatctcacaccagttagaatggcaatcattaaaaagtcaggaaacaacaggccagaaaagaccaaaagttttttacctcctttgccaacacaaagttcaattcacagtggtttcctagagcattgtgttgaacaggattctgaggctctgtctggagaggctggtaaaagtctgatgtttgccatgggtgtaggaagtgaacgagcaaagcat

SEQ ID NO: 128677 - DNA, 5808 bp, Homo sapiens
atgggagactttaacaccccactgtcaacattagacagatcaacgagacagaaagttaacaaggatacccaggaattcaactcagctctgtaccaagcggacctaatagacatctacagaactctccaccccaaatcaacagaatatacatttttttcagcaccacaccacacctattccaaaattgaccacatagttggaagtaaagctctcctcagcaaatgtgaaagaacagaaattataacaaactatctctcagaccacagtgcaatgaaactagaactcaggattaagaatctcactcaaaactgctcaactacatggaaactaaacaacctgctcctgaatgactactgggtacataacgaaatgaaggcagaaataaagatgttctttgaaaccaacgagaacaaagacacaacaaaccagaatctctgggacgcattcaaagcagtgtgtagagggaaatttatagcactgaatgcccacaagagaaagcaggaaagatccaaaattgacaccctaacatcacaattaaaagaactagaaaagcaagagcaaacacattcaaaagctagcagaaggcaagaaataactaaaatcagagcagaactgaaggaaatagagacacaaaaaacccttcaaaaaatcaatgaatccaggagctggttttttgaaaggatcaacaaaattgatagaccgctagcaagactaataaagaaaaaaagagagaagaatcaaatagacacaataaaaaatgataaaggggatatcaccaccgatcccacagaaatacaaactaccatcagagaatactacaaacacctctacgcaaataaactagaaaatctagaagaaattaataaattgctcgacacatacactctcccaagactaaaccaggaagaagttgaatctctgaatagaccaataacaggagctgaaattggggcaataatcaatagtttaccaaccaaaaagagtccaggaccagatggattcacagccgaattctaccagaggtacaaggaggaactggtaccattccttctgaaactattccaatcaatagaaaaagaggaaatcctccctaactcattttatgaggccagcatcattctgataccaaagccgggcagagacacaaccaaaaaagagaattttagaccaatatccttgatgaacatcgatgcaaaaatcctcaataaaatactggcaaaccgaatccagcagcacatcaaaaagcttatccaccatgatcaagtgggcttcttccctgggatgcaaggctggttcaatatacgcaaatcaataaatgtaatccagcatataaacagagccaaagacaaaaaccacatgattatctcaatagatgcagaaaaagcctttgacaaaattcaacaacccttcatgctaaaaactctcaataaattaggtattgatgggacgtatttcaaaataataagagctatctatgacaaacccacagccaatatcatactgaatgggcaaaaactggaagcattccctttgaaaactggcacaagacagggatgccctctctcaccgctcctattcaacatagtgttggaagttctggccagggcaatcaggcaggagaaggaaataaagggtattcaattaggaaaagaggaagtcaaattgtccctgtttgcagacgacatgattgtttatctagaaaaccccatcgtctcagcccaaaatctccttaagctgataagcaacttcagcaaagtctcaggatacaaaatcaatgtacaaaaatcacaagcattcttatacaccagcaacagacaaacagagagccaaatcatgagtgaactcccattcacaattgcttcaaagagaataaaatacctaggaatccaacttacaagggatgtgaaggacctcttcaaggagaattacaaaccactgctcaaggaaataaaagaggatacaaacaaatggaagaacattccatgctcatgggtaggaagaatcaatatcgtgaaaatggccatactgcccaaggtaatttacagattcaatgccatccccatcaagctaccaatgactttcttcacagaattggaaaaaactactttaaagttcatatggaaccaaaaaagagcccgcatcgccaagtcaatcctaagccaaaagaacaaagctggaggcatcacactacctgacttcaaactatactacaaggctacagtaaccaaaacagcatggtactggtaccaaaacagagctatagatcaatggaacagaacagagccctcagaaataacaccgcatacctacaactatctgatctttgacaaacctgagaaaaacaagcaatggggaaaggattccctatttaataaatggtgctgggaaaactggctagccatatgtagaaagctgaaactggatcccttccttacaccttatacaaaaatcaattcaagatggattaaagatttaaacgttagacctaaaaccataaaaaccctagaagaaaacctaggcattaccattcaggacataggcatgggcaaggacttcatgtccagaacaccaaaagcaatggcaaccaaagccaaaattgacaaatgggatctaattaaactaaagagcttctgcacagcaaaagaaactaccatcagagtgaacaggcaacctacaacatgggagaaaattttcgcaacctactcatctgacaaagggctaatatccagaatctacaatgaactcaaacaaatttacaagaaaaaaacaaacaaccccatcaaaaagtgggagaaggacatgaacagacacttctcaaaagaagacatttatgcagccaaaaaacacatgaaaaaatgctcatcatcactggccatcagagaaatgcaaatcaaaaccactatgagatatcatctcacaccagttagaatggcaatcattaaaaagtcaggaaacaacagacttcttggaagtgccctagaatcagcaggtccaaatcaaactcagctggccgtgggtcagccattgcagccccacctgccacgggctccaggaagagcagtcatcagtatggagaaggccggactctgctcagaagccactgagcaggtgctccatagactcaccagctggagcggggtcacatctcggaggcaccgtcagcaccaggagggcagccaagcaagggtatggcatttccgagcctctgcggtcaagggtatcgcatttccgagcctctgcggtcaagggtatggcgtttccgagcctctgcggtcaagggtatggcgtttccgagcctctgcagtcaagagcccagagatgggttgtcggggcagctgtgggggcatcccagatgtgggtgccaacatgcgtgatgacctgacaccagtgtgtgatgacctggcaccagtgcttgatgacctgacaccagtgcatcatgacctgacaccagcgcgcaatgacctgacaccagtgcacgatgacctggcaccagtgcgtgatgacctgacaccagtgcgtcatgacctgacaccagtgcgtgatgacctggcaccagtgcgcgatgacctgacaccagtgtgcgatgacctggcaccagtgtgcgatgacgtggccccagtgtgccatgacctggcaccagtgcgcgatgacctgacaccagtgtgcgatgacctggcaccagtgcacaatgaccttgcagcaatccaaacctacctgcaagctgcaagcgatgtgcctgtgggacacagcctggaccccgctgcgaactacaactccccgaaattccgctcccggaaccagagctacatgagggccgtcagcaccctgagccaggccagctgcgtgagccaggtgagcgaggcggagatcaatgggcaattcgagtccgtgtgcgagtccgtcttcagtgaagttgaatctcaggccatggatgccctcgacctcccgggatgtttccgaacaaggagtcacagctaccttcgagccattcaagccggctactcccaagatgacgaatgtattcccatgatgacaccctctgacatcacctccaccatcaggtcaacagcagaaggcgagcgtgatgcagataaatcgtgcatctgtatcaggaactgcatatactggaattacaacatgaatgctgggatgatctcccaggtgatgtttgccattggtggtggaggccgaataatgccgcacagttctctgtatgatagtgtgacggtggagttcatgtggcaacttgactgggccatggagtgcccaaatatctggttaaacattattgtggggtgccctgagcccaaccgaatgaagcgctggccccgtcagcagccatggtcacgtccacttggaagttccaaatcccgaggttcctgcagagagcagctctctgctgtggcaccagctgctgtgttcttcagaaaatacaagttctcgccgtgtgatgtgatgttcaaaccttttcaatggaaacaggaagtgtctcgaacagcagagcagctgacatcacttcattttactgtctacatgttaaatgctgctgtacagccggtggtacagaatgccccatgcaactcgagttcgggaggagactggctggtgacggccacagctgtctcatatacaaattacaagaaaacgcccccaccggtgccccctcggaccacctccaagcctctgatctcggtgacggcgcagagcagcaccgaatccacccaggacgcctaccaggacagccgcgcacagaggatgtccccgtggccccaggacagccgcggcctctacaactccacggacagcctggacagcaacaaggccatgaacctcgcgctggagacggccgctgcccagcgccacctgccagagagccagagcagctctgtgcggaccagcgacaaggccatcctggtgtccaaggcggaggaactcctcaagagccgctgctcctccatcgggattcagatgaagacaaggggctcaccggggtccctaacctgcctgcagccctgggcctcgctgggctccggcgccgaattacacccggtgaaagtggacgtctctgtccgttcccctggatccacggcggcggccgagagctccagggttttctcgcgctctgtcttctgtgcggcacccggctctggggtggaaacggccacagattctgacacggagagccgcggtctgcgggaataccactctgtcggggtgcaagtggaagatgagaagcgacacggacgttttaaacgttctaacagcgtcacggccgccgtccaagctgacctggagctggaggggttcccaggccacatcaccacggaggacaaaggccttcagttcggctcatccttccagcggcactccgagcccagcacccccacccagtacagcgcggtgagaactgtacggacccaggggctcttcagctatagagaaaactatcggacccaagtggacacctccaccctgccccctccagacccctggctggagcccgccatcgacacggtagagactgggaggatgtctccgtgccgcagggatggctcgtggtttttgaagctgctgcacgcagagacaaagaggatggaaggctggtgcaaagagatggagagagaggcggaggagaacgacctctcggaggaaagaggtgacattggacgccgaatgttggggagatgctgccttccacgtgacccacagtccccgcagcacggctgcatggggctggtgcaagtcagcacagccgtgttccgatcgttcacatggcgtttgcatttctcatggttagggtacatttaa

SEQ ID NO: 128678 - DNA, 4093 bp, Homo sapiens
atggggaaaaaacagaacagaaaaactggaaactctaaaacgcagagtgcctctcctcctccaaaggaacgcagttcctcaccagcaacggaaaaaagctggatggagaatgactttgacgagctgagagaagaaggtttcagacgatcaaattactctgagctacgggaggacattcaaaccaaaggcaaagaagttgaaaactttgaaaaaaatttagaagaatgtataactagaataaccaatacagagaagtgcttaaaggagctgatggagctgaaaaccaaggctcgagaactacgtgaagaatgcagaagcctcaggagccgatgtgatcaactggaagaaagggtatcagcaatggaagatgaaatgaatgaaatgaagcgagaagggaagtttagagaaaaaagaataaaaagaaatgagcaaagcctccaagaaatatgggactatgtgaaaagaccaaatctacgtctgactggtgtacctgaaagtgacggggagaatggaaccaagttggaaaacactctgcaggatattatccaggagaacttccccaatctagcaaggcaggtcaatgttcagattcaggaaatacagagaacgccacaaagatactcctcgagaagagcaactccaagacacataattgtcagattcaccaaagttgaagtgaaggaaaaaatgttaagggcagccagagagaaaggtcgggttaccctcaaagggaagcccatcagactaacagcggatctctcggcagaaaccctacaagccagaagagagtgggggccaatattcaacattcttaaagaaaagaattttcaacccagaatttcatatccagccaaactaagcttcataagtgaaggagaaataaaacactttacagacaagcaaatgctgagagattttgtcaccaccaggcctgccctaaaagagctcctgaaggaagtgctaaacatggaaaggaacaaccagtaccagccgctgcaaaatcatgccaaaatacagatcaacgagacagaaagtcaacaaggatacccaggaattgaactcagctctgcaccaagcggacctaatagacatctacagaactctccacaccaaatcaacagaatatactttttttcagcaccacaccacacctattccaaaattgaccacatagttggaagtaaagctctcctcagcaaatgtaaaagaacagaaattataacaaactatctctcagaccacagtgcaatcaaactagaactcaggattaagaatctcaatcaaagccgctcaactacatggaaactgaacaacctgctcctgaatgactactgggtacataacgaaatgaaggcagaaataaagatgttctttgaaaccaacgagaacaaagacacaacataccagaatctctgggacgcattcaaagcagtgtgtagagggaaatttatagcactaaatgcccacaagagaaagcaggaaagatccaaaattgacaccctaacatcacaattaaaagaactagaaaagcaagagcaaacacattcaaaagctagcagaaggcaagaaataactaaaatcagagcagaactgaaggaaatagagacacaaaaaacccttcaaaaaatcaatgaatccaggagctggttttttgaaaggatcaacaaaattgatagaccgctagcaagactaataaagaaaaaaagagaggagaatcaaatagacacaataaaaaatgataaaggggatatcaccaccgatcccacagaaatacaaactaccatcagagaatactacaaacacctctatgcaaataaactagaaaatctagaagaaatggataaattccttgacacatacactctcccaagactaaaccaggaagaagttgaatctctgaatagaccaataacaggagctgaaattgtggcaataatcaatagtttaccaaccaaaaagagtccaggaccagatggattcacagctgaattctaccagaggtacaaggaggaactggtaccattccttctgaaactattccaatcaatagaaaaagagggaatcctccctaactcattttatgaggccagcatcattctgataccaaagccgggcagagacacaaccaaaaaagagaattttagaccaatatccttgatgaacattgatgcaaaaatcctcaataaaatactggcaaaccgaatccagcagcacatcaaaaagcttatccaccatgatcaagtgggcttcatccctgggatgcaaggctggttcaatatacgcaaatcaataaatgtaatccagcatataaacagagccaaagacaaaaaccacatgattatctcaatagatgcagaaaaagcctttgacaaaattcaacaacccttcatgctaaaaactctcaataaattaggtattgatgggacgtatttcaaaataataagagctatctatgacaaacccacagccaatatcatactgaatgggaaaaaactggaagcattccctttgaaaactggcacaagacagggatgccctctctcactgctcctattcaacatagtgttggaagttctggccagggcaatcaggcaggagaaggaaataaagggtattcagttaggaaaagaggaagtcaaattgtccctgtttgcagacgacatgattgtttatctagaaaaccccatcgtctcagcccaaaatctccttaagctgataagcaacttcagcaaagtctcaggatacaaaatcaatgtacaaaaatcacaagcattcttatacaccaacaacagacaaacagagagccaaatcatgagtgaactcccagttcacaattgcttcaaagagaataaaatacctaggaatccaacttacaagggatgtgaaggacctcttcaaggagaactacaaaccactgctcaaggaaataaaagaggatacaaacaaatggaagaacattccatgctcatgggtaggaagaatcaatatcgtgaaaatggccatactgcccaaggtaatttacagattcaatgccatccccatcaagctaccaatgactttcttcacagaattggaaaaaactactttaaagttcatatggaaccaaaaaagagcccgcatcgccaagtcaatcctaagccaaaagaacaaagctggaggcatcacactacctgacttcaaactatactacaaggctacagtaaccaaaacagcatggtactggtaccaaaacagagatatagatcaatggaacagaatagagccctcagaaataacgccgcatacctacaactatctgatctttgacaaacctgagaaaaacaagcaatggggaaaggattccctatttaataaatggtgctgggaaaactggctagccatatgtagaaaactgaaactggatcccttccttacaccttatacaaaaatcaattcaagatggattaaagatttaaacgttagacctaaaaccataaaaaccctagaagaaaacctaggcattaccattcaggacataggcgtgggcaaggacttcatgtccaaaacaccaaaagcaatggcaacaaaagccaaaattggcaaatggtacctaattaaactaaagagcttctgcacagcaaaagaaactaccatcagagtgaacaggcaacctacaacatgggagaaaattttcgcaacgtactcatctgacaaagggctaatatccagaatctacaatgaactcaaacaaatttacaagaaaaaaacaaacaaccccatcaaaaagtgggcgaaggacatgaacagacacttctcaaaagaagacatttatgcagccaaaaaatacgtgaaaaaatgctcatcatcactggccatcagagaaatgcaaatcaaaaccactatgagataccatctcacaccagttagaatggcaatcattaaaaagtcaggaaacaacagtgatctctaccttatgtctgcaggaaccagttgtttaatgggcagacactgggacagtggacaagaaacgtgtgtccaaaatgtcgtgctggacacgtgcagcccctctgaacaactcttaagagctattgctgatcttgtcccgcaaccctga

SEQ ID NO: 128679 - DNA, 3230 bp, Homo sapiens
ctttcccaagtttcaagatagctattcctaaaaatgatcatgggcatgaacaacatttttggggatatagagttccaaataatgccatggaagatacagcttatcaactggtccaccagtaccctacaagaatgcaggcccggagatgcaggatcgcgctgtcacagtggtcctcttcgcatcctctcccggcaaagagagatgctccggttaccagcggcgcgcatccccgcaggcgcctctcctctcgccgatacccacccaggcagtcccgacaggcgcgcctgcctacctggtggccggctgtcagcgaagcggcggtgcctcagccccttctcagctgctacagcgctcccagcgccatgttcccggtctccccgggcgcacgctggggaactactactggctggaagttctttgaaaccaacgagaacaaagacacaacataccagaatctctgggacgcattcaaagcagtgtgtagagggaaatttataccactaaatgcccacaagagaaagcaggaaagatccaaaattgacaccctaacatcacaattaaaagaactagaaaagcaagagcaaacacattcaaaagctagcagaaggcaagaaataactaaaatcagagcagaactgaaggaaatagagacacaaaaaacccttcaaaaaatcaatgaatccaggagctggttttttgaaaggatcaacaaaattgatagaccgctagcaagactaataaagaaaaaaagagagaagaatcaaatagacacaataaaaaatgataaaggggatatcaccaccaatcccacagaaatacaaactaccatcagagaatactacaaacacctctacgcaaaaaaactagaaaatctagaagaaatggatacattcctcgacacatacactctcccaagactaaaccaggaagaagttgaatctctgaatagaccaataacaggagctgaaattgtggcaatattcaatagtttaccaaccaaaaagagtccaggaccagatggattcacagccgaattctaccagaggtacaaggaggaactggtaccattccttctgaaaatattccaatcaatagaaaaagagggaatcctccctaactcattttatgaggccagcatcattctgataccaaagccaggcagagacacaaccaaaaaagagaattttagaccaatatccttgatgaacattgatgcaaaaatcctcaataaaatactggcaaaccgaatccagcagcacatcaaaaagcttatccaccatgatcaggtgggcttcatccctggaatgcaaggctggttcaatatacgcaaatcaataaatgtaatccagcatataaacagagccaaagacaaaaaccacatgattatctcaatagatgcagaaaaagcctttgacaaaattcaacaacccttcatgctaaaaactctcaataaattaggtattgatgggacgtatttcaaaataataagagctatctatgacaaacccacagccaatatcatactgaatgggcaaaaactggaagcattccctttgaaaactggcacaagacagggatgccctctctcaccgctcctattcaacatagtgttggaagttctggccagggcaatcaggcaggagaaggaaataaagggtattcaattaggaaaagaggaagtcaaattgtccctgtttgcagacgacatgattgtttatctagaaaaccccatcatctcagcccaaaatctccttaagctgataagcaacttcagcaaagtctcaggatacaaaatcaatgtacaaaaatcacaagcattcctatacaccaacaacagacaaacagagagccaaatcatgagtgaactcccattcacaattgcttcaaagagaataaaatacctaggaatccaacttacaagggatgtgaaggacctcttcaaggagaactacaaaccactgctcaaggaaataaaagaggatacaaacaaatggaagaacattccatgctcatgggtaggaagaatcaatatcgtgaaaatggccatactgcccaaggtaatttacagattcaatgccatccccatcaagctaccaatgactttcttcacagaattggaaaaaactactttaaagttcatatggaaccaaaaaagagcccgcatcgccaagtcaatcctaagccaaaagaacaaagctggaggcatcacactacctgacttcaaactatactacaaggctacagtaaccaaaacagcatggtactggtaccaaaacagagatatagatcaatggaacagaacagagccctcagaaataacgccacatacctacaactatctgatctttgacaaacctgagaaaaacaagcaatggggaaaggattccctatttaataaatggtgctgggaaaactggctagccatatgtagaaagctgaaactggatcccttccttacaccttatacaaaaatcaattcaagatggattaaagatttaaacgttagacctaaaaccataaaaaccctagaagaaaacctaggcagtaccattcaggacataggcgtgggcaaggacttcatgtccaaaacaccaaaagcaatggcaacaaaagccaaaattgacaaatgggatctaattaaactaaagagcttctgcacagcaaaagaaactaccatcagagtgaacaggcaacctacaacatgggagaaaattttcgcaacctactcatctgacaaaaggctaatatccagaatctacaatgaactcaaacaaatttacaagaaaaaaacaaacaaccccatcaaaaagtgggcgaaggacatgaacagacacttctcaaaagaagacatttatgcagccaaaaaacacatgaaaaaatgctcatcatcactggccatcagagaaatgcaaatcaaaaccactatgagatatcatctcacaccagttagaatggcaatcattaaaaagtcaggaaacaacagccagagaggcttttatgattctataaaaagccccacaaaggaatcctatgcagccataaaaaggaacgagatcatgtcctttgcaggctatggatggagctggacgctgttatccttagcaactaacacaggaacggaaaaccaaacactgcatattttcacttataagtgggagctgaacaatgagagcacatggatacatgaagggatgggggatagttaccctgggccattcgatgtccagtaa

SEQ ID NO: 128680 - DNA, 2815 bp, Homo sapiens
atggataaattcttcgacacatacaccctcccaagactaaaccaggaagaagttgaatctctgaatagaccaataacaggctctgaaattgaggcaataattaatagtgtaacaaccaaaaaaagtccaggaccagatggattcacagccgaattctaccagaggtacgaggaggagctgaaaaagagggaatcctccctaactcattttatgaggagcatcatcctgataccaaagcccggcagagacataacaaaaaaagagaattttagaccaatatccctgatgaacatcgatgcaaaaatcctcaataaaatactggcaaaccaaatccagcagtacatcaaaaagcttatccaccatgatcaagtgggcttcatccctgggatgcaaggctggttcaacatacgcaaatcaataaaggtaacccagcatataaacagaaccaaagacaaaaaccacatgattatctcaatagatgcagtaaaggcctttgacaaaattcaacagcgcttcatgctaaaaactctcaataaattaggtattgatgggacatatctcaaaataataagagctatctatgacaaacccacagccaatatcatactgaatgggcaaaaactggaagcattccctttgaaaactggcacaagacagggatgccctctctcaccactcctattcaacatagcgttggaagttctgtccagggcaatcaggcaggagaaggaaataaaggatattcaattaggaaaagaggaagtcaaattctccctgtttgcagatgacatgattgtatatctagaaaaccccatcgtctcagcccaaaatctccttaagctgataggcaacttcagcaaagtctcaggatacaaaatcaatgcgcaaaaatcacaagcattcttatacaccaataacagacaaacagagagccaaatcatgagtgaactcccattcacaattgcttcaaagagaataaaatatctaggaatccaacttacaatggacgtgaaggacttcttcaaggagaactacaaaccaatgctcaatgaaataaaagaggatacaaacaaatggaagaacattccatgctcatgggtaggaagaatcaatatcgtgaaaatggccatactgcccaagatccactccagagtgacagttctgctgcgctcagatactgtgctgcatattgtgaagcttgcagtgaaaattcctacaattgtcctgcttctggaggggagccccagggccttgaggaaacacaggcagaagccagggagtggttccagcaggcctcgagtgagacccagtgctgtgctggcatcaggtctgagtcaatgcagtcatagtggtggtggcaacaggggtgcttatgtcactccaccccaagctttagcagaaaaggcctttgacaaaattcaacaacccttcatgctaaaaactctcaataaattaggtattgatgggacatatctcaaaataataagagctatctatgacaaacccacagccaatatcatactgaatgggcaaaaactggaagcattccctttgaaaactggcacaagacagggatgccctctctcaccactcctattcaacatagccttggaagttctggccagggcaatcaggcaggagaaggaaataaagggtattcaattcggaaaagaggaagtcaaattgtccctgtttgcagatgacatgattgtatatctagaaaaccccattgtctcagcccaaattctccttaagctgataagcaacttcagcaaagtctcaggatacaaaatcaatgtacaaaaaccacaagcattcttacacaccaataacagacaaacagagaaccaaatcatgagtgaactcccattcacgattgcttcaaagagaataaaatacctaggaatccaacttacaagggacgtgaaggacctcttcaaggagaactacaaaccactgctcaaggaaataaaagaggatacaaacaaatggaagaacattccatgctcatgggtaggaagaatcaatatcgtgaaaatggccatactgcccaaggtaatttatagattcaatgccatccccagcaagctaccaatgactttcttcacagaattggaaaaaaatactttaaagttcatatggaaccaaaaaagagcccgcatcgccaagtcaatcctaagccaaaagaacaaagctggaggcatcacgctacctgacttcaaactatactacaaggctacagtaaccaaaacagcatggtactggtaccaaaacagagatatagatcaatggaacagaacagagccctcagaaataacgccgcatatctacaactatctgatctttgacaacaaacctgagaaaaacaagcaatggggaaaggattccatgtttaataaatggtgctgggaaaactggctagccatatgtagaaagctaaaactggatcccttccttacaccttatacaaaaatcaattcaagatggattaaagacttaaacttcagacctaaaaccataaaaaccctagaagaaaacctaggcattaccattcaggacataggcatgggcaagggcttcatgtctaaaacaccaaaagcaatggcaacaaaagacaaaattgacaaatgggatctaattaaactaaagagcttctgcacagcaaaagaaactaccatcagagtgaacaggcaacctacaaaatgggagaaaatttttcgcaacctactcatctgacaaagggctaatatccagaatctacaatgaactcaaacaaatttacaagaaaaaaacaaccccatcaaaaagtgggtga

SEQ ID NO: 128681 - DNA, 3160 bp, Homo sapiens
atggtaaagggatcaattcaacaagaggagctaactatcctaaatatttatgcacccaatacaggagcacccagattcataaagcaactcctgagtgacctacaaagagacttagactcccacacattaataatgggagactttaacaccccactgtcaacattagacagatcaacgagacagaaagtcaacaaggatacccaggaattgaactcagctctgcaccaagcagacctaatagacatctacagaactctccaccccaaatcaacagaatatacattgttttcagcaccacaccacacctattccaaaattgaccacatacttggaagtaaagctctcctcagcaaatgtaaaagaacagaaattataacaaactatctctcagaccacagtgcaatcaaactagaactcaggattaagaatctcactcaaagccgctcaactacatggaaactgaacaacctgctcctgaatgactactggagaaagcaggaaagatccaaaactgacaccctaacatcacaattaaaagaactagaaaagcaagagcaaacacattcaaaagctagcagaaggcaagaaataactaaaatcagagcagaactgaaggaaatagagacacaaaaaacccttcaaaaaatcaatgaatccaggagctggttttttgaaaggatcaacaaaattgatagaccgctagcaagactaataaagaaaaaagagaagaatcaaatagacacaataaaaaatgataaaggggatatcaccaccgatcccacagaaatacaaactaccatcagagaatactacaaacacctctacgcaaataaactagaaaatctagaagaaatggatacattcctcgacacatacactctcccaaggctaaaccaggaagaagttgaatctctgaatagaccaataacaggctctgaaattgtggcagtaatcaatagtttaccaaccaaaaagagtccaggaccagatggattcacagccgaattctaccagaggtacaaggaggaactggtaccattccttctgaaactattccaatcaatagaaaaagagggaatcctccctaactcattttatgaggccagcatcattctgataccaaagtcgggcagagacacaaccaaaaaagagaattttagaccgatatccttgatgaacattgatgcaaaaatcctcaataaaatactggcaaaccgaatccagcagcacatcaaaaagcttatccaccatgatcaagtgggcttcatccctgggatgcaaggctggttcaatatacgcaaatcaataaatgtaatccagcatataaacagagccaaagacaaaaaccacatgattatctcaatagatgcagaaaaagcctttgacaaaattcaacaacccttcatgctaaaaactctcaataaattaggtattgatgggacgtatttcaaaataataagagctatctatgacaaacccacagccaatatcatactgaatgggcaaaaactggaagcattccctttgaaaactggcacaagacagggatgccctctctcaccgctcctattcaacatagtgttggaagttctggccagggcaatcaggcaggagaaggaaataaagggtattcaattaggaaaagaggaagtcaaattgtccctgtttgcagacgacatgattgtttatctagaaaaccccattgtctcagcccaaaatctccttaagctgataagcaacttcagcaaagtctcaggatacaaaatcaatgtacaaaaatcacaagcattcttatacaccaacaacagacaaacagagagccaaatcatgagtgaactcccattcacaattgcttcaaagagaataaaatacctaggaatccaacttacaagggatgtgaaggacctcttcaaggagaactacaaaccactgctcaaggaaataaaagaggacacaaacaaatggaagaacattccatgctcatgggtaggaagaatcaatatcgtgaaaatggccatactgcccaaggtaatttacagattcaatgccatccccatcaagctaccaatgactttcttcacagaattggaaaaaactactttaaagttcatatggaaccaaaaaagagcccgcatcgccaagtcaatcctaagccaaaagaacaaagctggaggcatcacactacctgacttcaaactatactacaaggctacagtaaccaaaacagcatggtactggtaccaaaacagagatatagatcaatggaacagaacagagccctcagaaataatgccgcatatctacaactatctgatctttgacaaacctgagaaaaacaagcaatggggaaaggattccctatttaataaatggtgctgggaaaactggctagccatatgtagaaagctgaaactggatcccttccttacaccttatacaaaaatcaattcaagatggattaaagatttaaacgttagacctaaaaccataaaaaccctagaagaaaacctaggcattaccattcaggacataggcgtgggcaaggacttcatgtccaaaacaccaaaagcaatggcaacaaaagccaaaattgacaaatgggatctaattaaactaaagagcttctgcacagcaaaagaaactaccatcagagtgaacaggcaacctacaacatgggagaaaattttcgcaacctactcatctgacaaagggctaatatccagaatctacaatgaactcaaacaaatttacaagaaaaaaacaaacaaccccatcaaaaagtgggcgaaggacatgaacagacacttctcaaaagaagacatttatgcagccaaaaaaacacatgaaaaaatgctcaccatcaatggccatcagagaaatgcaaatcaaaaccacaatgagttatcatctcacaccagccaaaattcagaatgggtcgagaaatatagttaagagcaacatgaattgcttaatatcgcaaaacagtcctcaggtaccgtgtacaactgttgcaaaatatcatcctaattcccgtgtaactccagaaccacgaagtggaacaccaaaggaagacagaagatggatacttatgacttctgggaaattatacttccttattcaaaaatctactgaacacatgctgtctgggagaaaagattga

SEQ ID NO: 128682 - DNA, 8065 bp, Homo sapiens
atggatacattcctcgacacatacactctcccaagactaaaccaggaagaagttgaatctctgaatagaccaataacaggagctgaaattgtggcaataatcaatagtttaccaaccaaaaagagtccaggaccagatggattcacagctgaattctaccagaggtacaaggaggaactggtaccattccttctgcaactattccaatcaatagaaaaagagggaatcctccctaactcattttatgaggccagcatcattctgataccaaagccgggcagagagacaaccaaaaaagagaattttagaccaatatccttgatgaacattgatgcaaaaatcgtcaataaaatactggcaaaacgaatccagcagcacatcaaaaagcttatccaccatgatcaagtgggcttcatccctgggatgcaaggctggttaaatacatgcaaatcaataaatgtaatccagcatataaacagagccaaagacaaaaaccacatgattatctcaatagatgcagaaaaagcctttgacaaaattcaacaacccttcatgctaaaaactctcaagaaattaggtactgatgggacgtatttcaaaatagtaagagctatctatgacaaacccacagccaatatcatactgaatgggcaaaaactggaagcattccctttgaaaactggcacaagacagggatgccctctctcaccattcctattcaacatagtgttggaagttctggccagggccatcaggcagaaggaaataaaaggtattcagttaggaaaagaggaagtcatattgtccctgtttgcagatgacatgattgtatatctagaaaaccccattgtctcagcccagaatctccttaagctgataagcaacttcagcaaagtctcaggatacaaaaccaatgtacaaaaatcacaagcattcttatataccaataacatacaaacagggagccaaatcatgagtgacctcccattcacaattgcttcaaagagaataaaatacctaggaatccaacttacaagggacatgaaggacctcttcaagaactacaaaccactgctcactgaaatgaaacaaagaaatggaagaacattccatgctcatggaattggaaaaaactactttaaagttcataggaaccgaaaaagagcccgcatcgccaagtcaatcctaagccaaaagaacaaagctggaggcatcacactacctgacttcaaactatactacaaggctacagtaaccaaaacagcatggtactgggaccaaaacagagatatagatcaatggaacagaacagagccctcagaaataacgccacatatctacaactatctgatctttgacaaacctgagaaaaacaagcaatggggaaaggaatccctatttaataaatggtgctgggaaaactggctagccatatgtagaaagctgaaactggatcccttccttacaccttatacaaaaattaattcaagatggattaaagacttaaaccttagacctaaaaccataaaaaccctagaagaaaacctaggcattaccattcaggacataggcatgggcaaggacttcatgtctaaaacaccaaaagcaatggcaacacaagccaaaattgacaaatgggagctaattaaactaaagagcttctgcacagcaaaagaaactatcatcagagtgaacaggcaacctacaaaatgggagaaaattttcacaacctactcatctgacaaaggtctaatatccagaatctacaatgaactcaaacaaatttacaagaaaaaaaaacaaccccatcaaaaagattttgcctaccattttacagtatttgtcttctattttggagcctttttattggaagcagcagccacatccctgcatgatttgcattgcaatacaaccataaccgggcagccactcctgagtgataaccagtataacataaacgtagcagcctcactatcacctacctttgcaggtctgggtgaattatctggtggtgtgacccacacactcattcttgaagggtctgaaaccaagacaacagtaactttttcagttatatccaggtggtcttcagattatgacatacaacaggagaattatgccagtcccagtacaaatctgtcaacgtcagatgtggccaatatgatgattcaggcctttcccaaaaatctccttaagctgataagcaacttcagcaaagtctcaggatacaaaatcaatgtgcaaaaatcacaagcattcctatacaccaataacagacaaacagagagccaaatcatgagtgaactcccattcacaattgcttcaaagagaataaaatacctaggaatccaacttacaagggatgtgaaggacctcttcaaggagaactacaaaccactgctcaatgaaataaaagaggatacaaacaaatggaagaacatttcatgctcctgggtaggaagaatcaatattgtgaaaatggccatactgcccaaggaacgcagctcctcaccagcaacggaacaaagctggatggagaatgactttgatgagttgagagaagaaggcttcagacgatcaaacttctccgagctaaaggagaaagttcgaacccatcacaaacaagataaaaaccttgaaaaaaggagctggttttttgaaaagatcaacaaaatcgatagacctctagcaagactaataaagaagaaaagagagaagagtcaaataaacgcaataaaaaacgataaaggggatatcactgccgatcccacagaaatacaaactaccatcacagaatactataaacacctctatgcaaataaactagaaaatctagaagcaatggataaattccttgacacatacaccctcccaagaataaaccaggaagaagttgaatctctgaataggccaataacaggctctgaaactgaggcaataattaatagcttaccaaccaaaaaaagtccaggaccagatggattaacagctgaattctaccagaggtacaaggaggagctggtaccattccttctgaaactattccaatcaatagaaaaagagcgaatcctcccgaactcattttatgagggcatcatcctcctgataccaaagcctggcagagacaacacaaaaaaagataattttaaaccaatatccctgatgaacatggatgcaaaaatcctcaataaaatactggcaaaccgaatccagcagcacatcaaaaagcttatccaccatgatcaagtgggcttcatccctgggatgcaaggctggttcaacatatgcaaatcaataaatgtaatccagcatataaacagaaccaaagacaaaaaccacatgattatctcaacagatgcaggaaaggcctttgacaaaattcaacagcccttcatgctaaaaactctcaataaattaggtattgatgggatgaatctcaaaataataagagctatttatgacaaacccacagccaatatcatactgaatagacaaaaactggaagcattccctttgaaaactggcacaagacagggatgccctctctcaccactcctattcaacatagtgttggaagttctggccagggcaatcaggcaggagaaggaaataaagggtattcaattaggaaaagaggaagtcaaattgtccctgtttgcagatgacatgattgtatatctagaaaaccccatcgtctcagcccaaaatctccttaagctgataagcaacttcagcaaagtctcaggatacaaaatcagtgtgcaaaaatcacaagcattcttatacaccaataacagacaaacagagagccaaatcatgagtgaaatcccattcccaattgcttcaaagagaataaaatacctaggaatccaacttacaagggatgtgaaggacctctttaaggagaactgcaaaccactgctcaaggaaataaaagagaacacaaacaaatggaagaacattccatgctcatggatagaaagaatcaatattgtgaaaatggccatactccccaagaggactccattattatcgctgcctagtacattatatgaggagctgtggagacttaggtcctacttcccattgtgccctcaactttacaacatggagcagaataccacagactgggtaatttataaagaacagtgcatttggctcacagctctggagactggggagtccaagagcactgcaccagcatttggcaagggttatcccatggcagaatacatcatatggggcagattgacacctcacatggctggctactcctctgagacaaaacttccagaggaacgatcaggcagcaacatctgctgttcaccaatatccgctgttctgcagcctctgctgctgatacccaggcaaacagggtctggagtggacctccagcaaactccaacagacctgcagctgagggtcctgactgttagaaggaaaactaacaaacagaaaggacatccacaccaaaaccccatctgtacgtcaccatcatcaaagaccaaaggatcaaattcacacataacaatattaaccttaaatgtaaatgggctaaatgctccaattaaaagacacagactggcaaattggataaagagtcaagacccatcagtgtgctgtattcaggagacccatctcacgtgcagagacacacacaggatcaaaataaagggatggagggagatctaccaagcaaatggaaaacaaaaaaaggcaggggttgcaatcctagtctctgataaaacggactttaaaccaacaaagatcaaaagagacaaagaaggccattacatgatggtaaagggatcaattcaacaagaagagctaactaccctaaatatatatgcacccaatacaggagcacccagattcataaagcaagtccttagagacctacaaagagacttagactcccacacattaataatgggagactttaacaccccactgtcaacattagacagatcaacgagacagaaagttaacaaggatatccaggatttgaactcagctctgcaccaagtggacctaatagacatctacagaactctccaccccaaatcaacagaatatacattcttctcagcactacaccacatttattccaaaattgaccacatagttggaagtaaagcactcctcagcaaatataaaacaacagaaattataacaaactgtctctcagaccacagtgcaatcaaactcgaactcaggattaagaaactcactcaaaaccgctcaactacatggaaactgaacaacctgctcctgaatgactactgggtacataacaaaatgaaggcagaaataaatacattatttgaaaccaacgagaacaaagacacaacataccagaatctctgggacacattcaaagcagtgtgtagagggaaattcatagcactaaatgcccacaagagaaagcaggaaagatctaaaattgacaccctaacatcacaattaaaagaactagagaagcaagaacaaacacattcaaaagctagcagaaggcaagaaataactaagatcagagcaaaactgaaggaaatagagacacaaaaaatccttcaaaaaatcaatgaatccaggagctggttttttgaaaagatcaacaaaattgatagaccactagcaagaccaataaagaagaaaagagagaagaatcaaatagatgcaataaaaaatgataaaggggatatcaccactgatcccacagaaatacaaactaccatcagagaatactataaacacctctatgcaaataaactagaaaatctagaagaaatggataaattcctcaacacatacaccctcccaagactaaaccaggaagaagttgaatctctgaataaaccaataacaggctctgaaattgaggcaataattaatagcttaccaactaaaaaagagtccaggatcagaaggcttcacagccgaattctaccagaggtacaaggaggaaactgaaaaagagggaatcctccctaactcattttatgaggccagcatcattctgataccaaagccaggcagagacacaaccaaaaaagagaattttagaccaatatccttgatgaacattgatgcaaaaatcctcaataaaatactggcaaaccgaatccagcagcatatcaaaaagcttatccaccatgatcaagtgggcttcatccctgggatgcaaggctggttcaatatacgcaaatcaataaatgtaatccagcatataaacagagccaaagacaaaaaccacatgattatctcaatagatgcagaaaaggcctttgacaaaattcaacaacgcttcatgctaaaaaccctcaataaattaggtattgatgggacatatttcaaaataataagagctatctatgacaaacccacagccaatatcatactgaatgggcaaaaactggaagcattccctttgaaaactggcacaagacagggatgccctctctcaccactcctattcaacatagtgttggaagttctggccagggcaattaggcaggagaaggaaataaagggtattgaattaggaaaagaggaagtcaaattgtccctgtttgcagattacatgattgtatatctagaaaaccccattgtctcagcccaaaatctccttaagctgataagcaacttcagcaaagtctcaggatacaaaatcaatgtgcaaaaatcacaagcattcctatacaccaacaacagacaaacagagagccaaatcatgagtgaactcccatttacaattgcttcaaagagaataaaatacctaggaatccaacttacaagggatgtcaaggacctcttcaaggagaactacaaaccgctgctcaatgaaataaaagaggatacaaacaaatggaagaacattccatgctcatgggtaggaagaatcaatattgtgaaaatggccatactgcccaaggtaatttacagattcaatgccatccccatcaagctaccaatgcctttcttcacagaattggaaaaaactactttaaagttcatatggaaccaaaaaagagcccgcattgccaagataatcctaagccaaaagaacaaagctggaggcatcacactacctgagttcaaactatactacaaggctacaggaaccaaaacagcatggtatggtactggtaccaaaacagagatatagaccaatggaacagaacagagccctcagaaataataccacatatctacaaccatctgatctttgacaaacctgacaaaaacaagaaatggggaaatgattccctatttaataaatggtgctgggaaaactggctagccatatgtaggagaaagctgaaactggatcccttccttacaccttatacaaaaattaattcaagatggattaaagacttaaatgttagacctaaaaccataaaaaccctagaagaaaacctaggcaataccattcaggacataggcatgggcaaggacttcatgtctacaacaccaaaagcaatggcaacaaaagccaaaattgacaaatgggatctaattaaactaaagagcttctgcacagcaaaagaaactaccatcacagtgaacaggcaacctacagaatgggagaaaatttttacaatctacccatctgacaaagggctaatatccagaatctacaaagaactcaaacaaatttacaagaaaagaacaaacaaccccatcaacaagtgggtgaaggatatgaacagacacttctcaaaagaagacatttatacagccaaaaaacacgtggaaaaaacgctcatcatcactggccatcagagaaatgcaaatcaaatccacaatgagataccatctcacaccagttagagtggcaatcattaaaaagtcaggaaacaacaggtcacatttcaacatgagatttggagaggacagacacccgaatcacagcaatgggtctcagcaagcagctccatcagctgcctcagacttgtctggaaggtggcagacgtgggcaattcctgccttgctgaagagggatacactgctgagtgaatgctctgaagcagaggagcatttggtgcaactgaagttgtctgaa

SEQ ID NO: 128683 - DNA, 3986 bp, Homo sapiens
atggagaatgactttgacgagctgagagaagaaggcttcagacgatcaaattactctgagctatgggaggacattcaaaccaaaggcaaagaagttgaaaactttgaaaaaaatttagaagaatgtataactagaataaccaatacagagaagtgcttaaaggagctgatggagctgaaaaccaaggctcgagaactacatgaagaatgcagaagcctcaggagccgatgtgatcaactggaagaaagggtatcagcaatggaagatgaaatgaatgaaatgaagggagaagggaagtttagagaaaaaagaataaaaagaaacgagcaaagcctccaagaaatatgggactatgtgaaaagaccaaatctacatctgattggtgtacctgaaagtgatggggagaatggaaccaagttggaaaacactctgcaggatattatccaggagaacttccccaatctagcaaggcaggccaacgttcagattcaggaaatacagagaatgccacaaagatactcctcgagaagagcaactccaagacacataattgtcagattcaccaaagttgaaatgaaggaaaaaatattaaaggcagccagagagaaagacagatcaacgagacagaaagtcaacaaggatacccaggaattgaactcagctctgcaccaagcagacctaatagacatctacagaactctccaccccaaatcaacagaatatacatttttttcagcaccacaccacacctattccaaaattgaccacatacttggaagtaaagctctcctcagcaaatgtgaaagaacagagattataacaaactatctctcagaccacagtgcaatcaaactagaactcaggattaagaatctcactcaaaaccgctcaactacatggaaactgaacaacctgctcctgaatgactactgggtacataacgaaatgaaggcagaaataaagatgttctttgaaaccaatgagaacaaagacacaacataccagaatctctgggatgcattcaaagcagtgtgtagagggaaatttatagcactaaatgcccacaagagaaagcaggaaagatccaaaattgacaccctaacatcacaattaaaagaactagaaaagcaagagcaaacacattcaaaagctagcagaaggcaagaaataactaaaatcagagcagaactgaaggaaatagagacacaaaaaacctttcaaaaaattaatgaatccaggagctggttttttgaaaggatcaacaaaattgatagaccgctagcaagactaataaagaaaaaaagagagaagaatcaaatagacacaataaaaaatgataaaggggatatcaccaccaatcccacagaaatacaaactaccatcagagaatattacaaacacctctacgcaaataaactagaaaatctagaagaaatggataaattcctcgacacaaacaccctcccaagactaaaccaggaagaagttgaatctctgaatagaccaataacaggatctgaaattgtggcaataatcaatagtttactaaccaaaaagagtccaggaccagatggattcacagccgaattctaccagagcatcatcctgataccaaagcctggcagagacacaaccaaaaaaagagaattttagaccaatatccttgatgaacattgatgcaaaaatccttcaataaaatactggcaaaccggaatccagcagcacatcaaaaagcttatccaccatggatcaagtgggcttcatccctgggaatgcaaggctggttcaatatacggtaaatcaataaacggtaatccagcatacaaacagaaccaaagacagaaaccacatgtttatctcaatagatgcagaaaaggcctttgacaaaattcaacaacccttcctgctaaaaactctcaataaattaggtattgatgggacgtatctcaaaataataagagctatctatgacaaacccatagccaatatcatactgaatgggcaaaaactggaagcattccctttgaaaactggcacaagacagggatgccctctctcaccactcctattcaacatagtgttggaagttctggctagggcaattaggcaggagaaggaaataaagggtattcagttacaaaaagaggaagtcaaattgtccctgtttgcagacgacatgattgtatatctagaaaaccccactgtctcagcccaaaatctccttaagctgataagcaacttcagcaaagtctcaggatacaaaatcagtgtgcaaaaatcacaagcattcttctacaccaacaacagacaaacagagagccaaatcatgagtgaactcccattcacaattgcttcaaagagaataaaatacctaggaatccaacttacaagggatgtgaaggacctcttcaaggagaactacaaaccactgctcaaggaaataaaagaggatacaaacaaatggaagaatattccatgctcatgggtaggaagaatcaatattgtgaaaatggccatactgcccaaggtaatttacagattcaatgccatccccatcaagctaccaatgactttcttcacagaattggaaaaaactactttaaagttcatatggaaccaaaaaagagcccgcatcgccaagtcaatcctgagccaaaagaacaaagctggaggaggcatcatgctacctgacttcaaactatactacaaggctacagtaaccaaaacagcatggtactggtaccaaaacagagatatagatcaatggaacagaacagagccctcagaaataacgccacatatctacaactatctgatctttgacaaacctgagaaaaacaagcaatggagaaaggattccctatttaataaatggtgctgggaaaactggctagccatatgtagaaagctgaaactggatcccttccttacaccgtatacaaaaatcaattcaagatggattaaagacttaaacgttagacctaaaaccatgaaaaccctagaagaaaacctaggcatttaccattcaggacataggcatgggcaaggacttcatgtctaataaaacaccaaaagcaatggcaacaaaagccaaaattgacaaatgggatctaattaaactaaagagcttctgcacagcaaaagaaacaaccatcagagtgaacaggcaacctacaacatgggagaaaattttcacaacctactcatctgacaaagggctaatacccagaatctacaatgaactcaaacaaatttacaagaaaaaaacaaacaaccccatcaaaaagtgggcagaggatatgaacagacaattctcaaaagaagacatttatgcagccaaaaaacacatgaaaaaatgctcatcatcactggccatcagagaaatgcaaatcaaaaccacaatgagataccatctcacaccagttagaatggcaatcattaaaaagacaggaaacaacaggtgctggagaggatgtggagaaataggaacacttttacactgttggtgggactgtaaactagttcaaccattgtggaagtcagtgtggcgattcctcagggatctagaactagaaataccatttgacccagccatcccattactgggtatatacccgaatgactataaatcatgctgctataaagacacatgcacacctgggcaccctagaaagcagcccaccctgggttctataccccagaagtcacaggatcattgcgctgaagtgctaaaggacatcctgtttctagcagggactggaggagcccaggctcttctggccagtttctccttatctcaggatgttgaattcccagcaccttctgcagttattcttgagaactacaagcaaaagactgaaatgagcaccacctactggcagagcctaacagggccagccggcaaacaagaaaactgttcacagtcccagccccaagatcccaagtatacagtatggatgtgggggtttagatccaagaaacaatag

SEQ ID NO: 128684 - DNA, 5735 bp, Homo sapiens
cacaccaaaaacccatctgtacatcaccatcgtcaaagaccaaaagtagataaaaccacaaagatggggaaaaaacagaacagaaaaactggaaagtctaaaacgcagagcgcctttcctcctccaaaggaacgcagttcctcaccagcaatggaacaaagctggatggagaatgactttgacgagctgagagaagaaggcttcagacgatcaaattactctgagctacgggaggacattcaaaccaaaggcaaagaagttgaaaactttgaaaaaaatttagaagaatgtataactagaataaccaatacagagaagtgcttaaaggagctgatggagctgaaaaccaaggctcgagaactacgtgaagaatgcagaagcctcagaaattggataaagagtcaagacccatcactgtgctgtattcaggaaacccatctcatgtgcagagacacacataggctcaaaataaaaggaaggaggaagatctaccaagccaatggaaaacaaaaaaaggcaggggttgcaatcctagtctctgataaaacagactttaaaccaacaaagatcaaaagagacaaagaaggccattacataatggtaaagggatcaattcaacaagaagagctaactatcctaaaaatatatgcacccaatacaggatcaccaagattcatgaagcaagtcctgagtgacctacaaagagacttagactcccacacattaataatgggagactttaacaccccactgtcaacattagacagatcaacgagacagaaagtcaacaaggatacccaggaattgaactcagctctgcaccaagcggacctaatagacatctacagaactctccaccccaaatcaacagaatatacatttttttcagcaccacaccacacctattccaaaattgaccacatactgggaagtaaagctctcctcagcaaatgtaaaagaacagaaattataacaaactatctctcagaccacagtgcaatcaaactagaactcaggattaagaatctcactcaaaacggctcaactacatggaaactgaacaacctgctcctgaatgactactgggtacataacgaaatgaaggcagaaataaagatgttctttgaaaccaacgagaacaaagacacaacataccagaatctctgggacgcattcaaagcagtgtgtagagggaaatttatagcactaaatgcccacaagagaaagcaggaaagatccaaaattgacaccctaacatcacaattaaaagaactagaaaagcaagagcaaacacattcaaaagctagcagaaggcaagaaataactaaaatcagagcagaactgaaggaaatagagacacgaaaaacccttcaaaaaattaatgaatccaggagctggttttttgaaaggatcaacaaaattgatagaccactagcaagactaataaagaaaaaaagagagaagactcaaatagacacaataaaaaatgataaaggggatatcaccaccgatcccacagaaatacaaactaccatcagagaatactacaaacacctctacgcaaataaactagaaaatctagaagaaatggatacattcctcgacatatacactctcccaagactaaaccaggaagaagttgaatctctgaatagaccaataacaggagctgaaattgtggcaataatcaatagtttaccaaccgtgggcttcatccctgggatgcaaggctggttcaatatacgcaaatcaacaaatgtaatccagcatataaacagagccaaagacaaaaaccacatgattatctcaatagatgcagaaaaagcctttgacaaaattcaacaacccttcatgctaaaaactctcaataaattaggtattgatgggacgtatttcaaaataataagagctatctatgacaaacccacagccaatatcatactgaatgggcaaaaactggaagcattccctttgaaaactggcacaagacagggatgccctctctcaccgctcctattcaacatagtgttggaagttctggccagggcaatcaggcaggagaaggaaataaagggtattcaattaggaaaagaggaagtcaaattgtccctgtttgcagatgacatgattgtttatctagaaaaccccatcatctcagcccaaaatctccttaagctgataagcaacttcagcaaagtctcaggatacaaaatcaatgtacaaaaatcacaagcattcttatacaccaacaacagacaaacagagagccaaatcatgagtgaactcccattcacaattgcttcaaagagaataaaatacctaggaatccaacttacaagggatgtgaaggacctcttcaaggagaactacaaaccactgctcaaggaaataaaagaggatacaaacaaatggaagaacattccatgctcatgggtaggaagaatcaatatcgtgaaaatggccatactgcccaagataatttacagattcaatgccatccccatcaagctaccaatgcctttcttcacagaattggaaaaaactactttaaagttcatatggaaccaaaaaagagcccgcatcaccaagtcaatcctaagccaaaagaacaaagctggaggcatcacactacctgacttcaaactatactacaaggctacagtaaccaaaacagcatggtactggtaccaaaacagagatatagatcaatggaacagaacagagccctcagaaataatgcagcgtatctacaactatctgatctttgacaaacctgagaaaaacaagcaatgggggaaaggattccctatttaataaatggtgctgggaaaactggctagccatatgtagaaaactgaaactggaccccttccttacaccttatacaaaaattaactcaagatggattaaagacttaaacgtaagacctaaaaccataaaaaccctggaagaaaacctaggcaataccattcaggacataggcatgggcaaagacttcatgactaaaacaccagaagcaatggcaacaaaagccaaaattgacaaatgggatctaattaaactaaagagcttctgcacagcaaaagaaactaccatcagagtgaacaggcaacctacaacatgggagaaaattttcgcaacctactcatctgacaaagggctaatatccagaatctacaatgaactcaaacaaatttacaagaaaaaaacaaaaaaaccccatcaaaaagtgggcaaaggatgtgaacagacacttctcaaaagaagacatttatgcagccaaaaaacacatgaaaaaatgctcatcatcactggccatcagagaaatgcaaatcaaaaccacataccatgctggaccagatggatttacagccgaattctaccagaggtacaaggaggaactggtaccattccttctgaaactattccaatcaatagaaaaagagggaatcctccctaactcattttatgaggccagcatcatcctgataccaaagcctggtagagacacaaccaaaaaagagaattttagaccaatatccttgatgaacattgatgcaaaaatcctcaataaaatactggcaaaacgaatccagcagcacatcaaaaagcttatccaccatgatcaagtgggtttcatccctgggatgcaaggcttggttcaatatacgcaaatcaataaaggtaatccagcatataaacagagccaaagacaaaaaccacatgattatctcaatagatgcagaaaaagcctttgacaaaattcaacaacccttcatgctaaaaactctcaataaattaggtattgatgggacgtatttcaaaataataagagctatctatgacaaacccacagccaatatcatactgaatgggcaaaaactggaagcattccctttgaaaactggcacaagacagggatgccctctctcaccgctcctattcaacatagtgttggaagttctggccagggcaatcaggcaggagaaggaaataaaaggtattcaattaggaaaagaggaagtcaaattgtcccctctttgcagatgacatgattgtatatgtagaaaaccccttcgtctcagcccccatatctccctcaagctgataagcaacttcagcaaactctcaggatacaaaatcaatgtacaaaaatcacaagcattcttatacaccaataacagacaaacagagagccaaatcatgagtgaactcccattctgttattgcttcaaagagaataaaatacctaggaatccaacttacaagggatgtgaaggacctcctcaaggagaactacaaaccaactgctcaatgaaataaaaaaaggacacaaacaaatggaagaacaatccatgctcgtggataggaagaataaatattgtgaaaacggccatactgcccaaggaattggaaaaaaactactttaaagttcatatggaaccaaaaaagaacctgcatcgccaagtcaatcctaagccaaaagaacaaagctggaggcatcacactacctgacttcaaactatactacaaggctacagtaaccaaaagagcatggtactggtaccaaaacagagatatagatcaatggaacagaacagagccctcagaaataacgccgcagatctacaactatctgatctttgacaaacctgagaaaaacaagcaatggggaaaggattccctatttaataaatggtgctgggaaaactggctagccatatgtagaaagctgaaactggatcccttccttataccttatacaaaaatcaattcaagatggattaaagacttaaatgttagacctaaaaccataaaaaccctagaagaaaacctaggcattaccattcagggcataggcatgggcaaggacttcatgtctaaaacaccaaaagcaatggcaacaaaagacaaaattgacaaatgggatctaattaaactaaagagcttctgcacaagaatagcaaaggaacctaccatcagcgtgaacaggcaacctacagaatgggagaaaatgtttgcaatctgctcatctgacaaaggggtaatatccagaatctacagtgacctcaaacaaatttacaagaaaaaaacaaccaaaccccatcaaaaagtgggcaaaggacatgaacagacacttctcaaaagaagacatttatgcagccaaaaaacacatgaaaaaatgttcatcgtcactggccatcagagaaatgcaaatcaaaaccacaatgagataccatctcacaccagttagaatggcgatcattaaaaagtcaggaaacaacagggtcacatttctgaaccagaaagccacaggaaaggaaagactggtcacagacttccttcttccctggaccatttgttacgggaagttctcaggaaacaggtcagtaagtgtagagggcatcacaggacaaacttcattgctgggtttcccagaaaagagcagctctcccctactgaagacacttttagcagacgggccttcactaggaacaaatcctttcttgaccaccaatggctgcatgacttatcctgagaagatcatggggattttggatgccaggtcaacccttacactcagcaaggaagtggaagggcctcagtttcaaacactttgtaaacacagagaaatggtagtgggggcagggggtgaggaagatcttaaaattcatgttgtaatgcaagagactccggatactcaaagtaatattgaaaaagaagaacaaagataa

SEQ ID NO: 128685 - DNA, 7130 bp, Homo sapiens
tcattgtggttttgatttgcatttctctgatggccagtgatggtgagcatttttcatgtgttttttgggtgcataaatgtcttcttttgagaagtgtctattcatgtcctttgcccactttttgatggggttgtttgtttttttcttgtgaatttgtttgagttcattgtagattctggatattagccctttgtcagatgagtagattgcaaaaattttctcccattttgtgggttgcctgttcactctgatggtagtttcttttgctgtgcagaagctcttcagtttcattagatcccatttgtcaattttgtcttttgttgccattgcttttggtgttgtagacatgaagtccttgcccatgcctatgtcctgaatggtaatgcctaggttttcttctagggtttttatggttttaggtctaacgtttaagtctttaatccatcttgaattgatttttgtataaggtgtaaggaagggattcagtttcagctttctacatatggctagccagttttcccagctccatttattaaatagggaatcctttccccattgcttgtttttctcaggtttgtcaaagatcacatagttgtagatatacggtgttatttctgagggctctgttctgttccattgatctatatctctgttttggtaccagtaccatgctgttttggttactgtagccttgggcagtatggccattttcacgatattgattcttcctacccatgagcatggaatgttcttccatttgtttgtatcctcttttatttcattgagcggtgatttgtagttctccttgaggaggtacttcacgtcccttgtaaggtggattcctaggtattttattctctttgaagcaattgtgaatgggagttcgctcatgatttggctctctgtttgtctgttattggtgtataagaatgcttgtgatttttgtacattgattttctatcctgagactttgctgaagttgcttatcagcttaaggagtttttgggctgagacaatggggtgttctaaatatgcagtcatatcatctgcaaacagagatgatttgacttcttttcttcctatttgaattccctttatttctttctcttgcctgattgccctggtcagaacttccaatactatgctgaataggagtggtaagagaaggcatccttgtcttgtgctggttttcaaagggaatgctttcagcttttgccgattcagtatgatattggctgtgggttcgtcataaatagctcttattattttgagatacgttccatcaatacctagttttttgagtatttttggcatgaaggggtgttgaattttctcgaaggcctttgctgcatctattgagataatcacttggtttttgtcattggttctgttgtttcctgacctttttaatgaccgccattcctaactggtgtgagatggtatctcatttgtggttttgattttgcatttctctgatggccaatgatggatgagcattttttcatgtgttttttgggctgcataaatgtccttcttttgagaagtgtctgttcatgtgccttcgtccactttttggatggggttgtttgttttttttcttgtaaaagtgttttgagttcattgtagattctggatattagccctttgtcagatgatgtagattgcaaaaattttttctcccattttgtaggttggcctgttcactctgatggtagtttctcttttgcatgtgcagaagaagctctttagtttaaattagatcccatttgtcaattttgtcttttgttggccattgctttcgggtgttttagacatgaagtccttgcctatgcctatgtcctgaatggtaatgcctaggttttcttctagggtttttacggtttttatggtttttaggtctaacgtttaaatctttttttttaatccatcttgaatttgattttttgtataaggtgtaaggaagggatccaagtttcagctttctacatatggctaagccagtttttcccagcaccatttattaaataagggaatcctttcccccattgcttggtttttcccagggtttgtcaaagattagatagttgtagatatatgtggtgttatttctgagggctctgttctgttccattggtctatatctctgttttgggtaccagtaccatgctgttttgggttactgtaggccttgtaggtatagtttgaagtcaggtagccgtgatgcctcccagctttgttcttttgggcttagggattggacttggggcaatgtgggggctcttttttggttccatatgaactttaaagtagtttttttccaattctgtgaagaaagtcattggtagcttgatggggatggcattgaatctgtaaattaccttgggcagtatggccagtatggatgaccattttcacaatattgattcttcctatccatgagcatggaatgttcttccatttgtttgtgtcctcttttatttcggttgagcagtggtttgtagttctccttgaagaggtccttcacgtcccttgtaaggtggattcctaggtatttaattctcttggaagcaattgtgaaatgggagttcactcatgatttggctctcttgtttgtctgtgttattggtgtataggaatgcttggtgatttttgcacatcgattttgtatatttttgtatcctgagactttgctgaagttgcttatcagcttaaggagattttggggtgagacgatggggttttctagataaacaatcatgtcgtctgcaaacagggacaatttgacttcctcttttcctaattgaataccctttatttccttctcctgcctgattgcccctggcccagaacttcccaaacacctatgttgaataggagtggtgagagagggcatccctgtccttgtgccagttttcaaagggaatgcttccagtttttgcccattcagtatgatattggctgtgggtttgtcatggatagctcttattattttgaaatatatgtcccatcaatagcaaatttattaaaagtttttagcatgaagcgttgttgaatttttgtcaaagaccttttctgcatctattgagataatcatgtggtttttgtctttggttctgtttatatgctgaattaggatttattgatttgtgtatgttggaaccagtcttgcatcccagggggatggaagcccactttaatcatggtgggataagcttttttgatggtgctgctgggattcagttttgtcagtatttttattaagggatttttgccgtccaatgttcatcaaagatattggtctaaaattctcttttttttgttgtgtctctgctagactttggtatccaggatgatacttgccctcataaaatgagttagtggaggattcccgctcccttctattgattggaatagttccagaaggaatggtaccagttcctccttgtacctctggtagaaattcggctgtggaatccatctggtcctgggactctttttggtgtggtaaagctattgattattgccacaattgcagatccctgttatttggtctattcagagattcaacttcctcctggtttagtcttggaagagtgtatgtgtcgaggaatgtatccatttcttctagattttctagacacataattgtcagattcaccaaagttgaaatgaaggaaaaaatgttgagggcagccagagagaaagcattcaagcaggcctcccggagagaagatgacattgccaaggtaaccagtggcatgagagttttattcaagccaggaaccacagaggtacaggagctggccctttgctatggtggaatggccaacagaaccatctcagccctcaagaccactcagaggcagctttccaagctctggaaggaggagctgctgcaggacgtgtgtgcaggactggcagaggagctgcatctgcctcccgatgcccctggtggcatggtggacttccggtgcaccctcaccctcagcttcttcttcaagttctacctgacagtccttcagaagctgggccaagagaacctggaagacaagtgtggtaaactggaccccactttcgccagtgcaactttactgtttcagaaagaccccccagccgatgtccagctcttccaagaggtgcccaagggtcagtctgaggaggacatggtgggccggcccctgccccacctggcagcggacatgcagcctctggtgaggccgtgtactgtgacgacattcctcgctacgagaatgagctgtctctccggctggtcaccagcacccgggcccacgccaagatcaagcatcgagatgaagttcaagaatatgctgtttcctatgattgtctgcccagcctggatccctgagctgaattcggtagaacatggacccgacggtatctcctttggagctgcttgccccctgagcattgtggaaaaaaccctggtggatgctgttgctaagcttcctgcccaaaagacagaggtgttcagaggggtcctggagcagctgcgctggtttgctgggaagcaagtcaagtctgtggcgtccgttggagggaacatcatcactgccagccccatctccgacctcaaccccgtgttcatggccagtggggccaagctgacacttgtgtccagaggtgagctgcctgaagcagaggtccaggaagaaggacttgggggagaaaagtctcaccagataggtcattttctggagaaacagagctcaaagttcagtgacccagctttccctgtgatttggatccagggaagcatggagaatgtacctggtttggtggacgggaaagctggatattttctctgtagagaattcacagcaggaactgctacctgcatgccttacctagtggggcaccaggagaactgtccagatggaccacaccttcttccctggctacagaaagaccctgctgagcccggaggagatactgctctccatagagatcccctacagcagggagaaatacaaactaccatcagagaatactacaaacacctctccgcaaataaactagaaaatctagaagaaatggataaattcctcgacacatacactctcccaagactaaaccagaaagaagttgaatctctgaatagaccaataacaggagctgaaattgtgccaataatcaacagcttaccaaccaaaaagagttcaggactagatggattcacagccgaattctaccagaggtacaaggaggaactgcatataaacagaaccaaagacaaaaaccacatgattatctcaatagatgcagaaaaggcctttgacaaaattcaacaacccttcatgctaaaaactctcaataaattaggtattgatgggacgtatctcaaaataataagagctatctatgacaaacccacagccaatatcatactgaatgggcaaaaactggaagcattccctttgaaaactggcacaagacagggatgccctctctcaccactcctattcaacatagtgttggaagttctggccagggcaatcaggcaggagaaggaaataaagggtattcaattaggaaaagaggaagtcaaattgtccctgtttgcagatgacatgattgtatatctagaaaaccccattgtctcagcccaaaatccccttaagctgataagcaacttcagcaaagtctcaggatacaaaatcaatgtacaaaaatcacaagcattcttatacaccaataacagacaaacagagagccaaatcatgagtgaactcccattcacaattgcttcaaagagaataaaatacctaggaatccaacttacaagggacgtgaaggacctcttcaaggagaactacaaaccactgctcaatgaaataaaagaggatacaaacaaatggaagaacattccatgctcatgggtaggaagaatcaatatcatgaaaatggccatactgcccaaggtaatgtatagattcaatgccatccccatcaagctaccaatgcctttcttcacagaattggaaaaaactactttaaagttcatatggaaccaaaaaagagcccgcatcatcaagtcaatcctaagcccaaagaacaaagctggaggcatcacgctacctgacttcaaactatactgcaaggctacagtaaccaaaacagcatggtactggtaccaaaacagaaatatagatcaatgcaacagaacagagccctcagaaataatgccacatatctacaactatctgatctttgacaaacctgacaaaaacaagcaatggggaaaggatcccctatttaataaatggtgctgggaaaactggctagccatatgtagaaagctgaaactggatcccttccttacaccttacacaaaaattaattcaagatggattaaagacttaaacattaggcctaaaaccataaaaaccctagaagaaagcctaggcattaccattcaggacataggcatgggcaaggacttcatgtctaaaacaccaaaagcaatggcaacaaaagacaaaattgacaaatgggatctaattaaactaaagagcttctgcacagcaaaagaaactaccatcagagtggacaggcaacctacagaatgggagaaaattttcacaacctactcatctgacaaagggctaatatccagaatctacaatgaactcaaacaaatttacaagaaaaaatcaaacaaccccatcaaaaagtgggcaaagcatatgaacagatgcttctcaaaagaagacatttatgcagccaaaagacacaggctgaaagacactcctcggaagcagctgcgatttgaaggggagcgtgtgacgtggatacaggcctcaaccctcaaggagctgctggacctcaaggctcagcaccctgacgccaagctggtcgtggggaacacggagattggtaagggccagggaggctgccctggggctgccagggggtctgggggtgtttctaggtcctcttgcccatcctcacctccccctgactttacttgcctctgcaccctatccctctgccccactgactacctggagcccactggaaatccctggacactccagttcctgcaaaggcccctagctgtggagtcccacaggcctgctcagccccttgctggatgtgtgacctcagaatag

SEQ ID NO: 128686 - DNA, 476 bp, Homo sapiens
  misc_feature (1)...(476): n = a,t,c or g
cttgacncactgagaaccctcgaagngncgnggaattcgagggaaccatggaagccccagctcagtttctcttcctcctgctactctggctcccagataccaccggagaaattgtgttgacacagtctccagccaccctgtctttgtctccaggggaaagagccaccctctcctgcagggccagtcacagtgttagtagtttcttagcctggtaccagctgaaacctggccaggctcccaggctcctcatctatgatgcaaccaacagggccactggcannnnnnnnnnnnnnnnnnnnnnnnnnnnnnnnnnnnnnnnnnnnnnnnnnnnnnnnnnnnnnnnnnnnnnnnnnnnnnnnnnnnnnnnnnnnnagcaacgtagcagctggcctccggagtacagttttggcctggggaccaagctggagatcaaacgaactgcggctgcaccatctgtcttcatcttcccgccatct

SEQ ID NO: 128687 - DNA, 360 bp, Homo sapiens
gggcagggtgagcccaaacaactgggaagacatccaggagtcctcagaccacatgtggtgagcgctaagacgggagacgcctgcaatggacgcaagtgagaaacttgtttccagaacggcccaaagtacagtggaaggaggggtgcgcccctccaatcgggtaactcgcaggagagtgtcacagagcagggcagcaaggtcagcgcctacagcctcagcagccccctgacgctgagcaaagcagactacgagaaacacaaactctacgcctgcgaagtcacccatcagggcctgagctcgcccgtcacaaagagcttcaacaggggagagataatagagggagaagtgcccccgtgtatt

SEQ ID NO: 128688 - DNA, 508 bp, Homo sapiens
  misc_feature (1)...(508): n = a,t,c or g
cggccgcgtcgacgtgaataacgccctccaatcgggtaactcccaggagagtgtcacagagcaggacagcaaggacagcgcctacagcctcagcttttggggctgctaatgctctgggtccctggatccggtggggaaattgtgatgacccagactccactctcctcatctgtcacccttggacagccggcctccatctcctgcaggtctagtcaaagcctcgtacacagcgatggaaacacctacttgacttggcttcaacagaggccaggccagcctccaagacccctaatttatcacgtttttaagcggttctctggggtcccagacaggttcagtggcagtggggcagggacagatttcacactggaaaatcaggcagggtggaagcttagggatgtcggggtttattactgcatgcaaggtnacacaatttccgtgcagttttggccaggggaccaagctggagaccaaacgaactgtggccgcaccatctgtcttcatcttt

SEQ ID NO: 128689 - DNA, 1011 bp, Homo sapiens
  misc_feature (1)...(1011): n = a,t,c or g
gagcgtggtggaattcggaaaccccagcgcagcttctcttcctcctgctactctggctcccatataccagcggagaaattgtgttgacgcaggctccaggcaccctgtctttgtctccaggggaaagagccaccctctcctgcagggccagtcagactattggcagcacctacttagcctggtaccagcagagacctggccaggctcccaggttcctcatctatggtgcatccagcagggccactggcatcccagacnnnnnnnnnnnnnnnnnnnnnnnnnnnnnnnnnnnnnnnnnnnnnnnnnnnnnnnnnnnnnnnnnnnnnnnnnnnnnnnnnnnnnagcagtataataactggcctccgggagggacgttcggtccaagggaccaaggtggaaatcaagcgaactgtgggctgcacccatctgttcttcatctttcccgcccatctgatgagtcagttgaaaatctgggaactgccttctgcttgtgtgcctgtctgtaataacttcttatcccagagaggtccaaagttacagtggtaaggtggataacgcccttccaatcgggtaactcccagggagagtgtcacagagcaggacaagcaaggacagcaccctacagccttcagcagccaccctggacgcttgaggcaaagcaggactacggaggaaacacaaactcttacggcctgcggaagttcacccattcaggggccttgaggttcggcccgttcaacaaaaggagtttttcaacaggggggaggagtgtttaggagggggaggaagttgccccccaccttgcttccttcagttttccaggccttggacccccttcccattccttttgggccttttgaccctttttttccacagggggaccttacccctatttgcggtccttcaggttcatctttcacctcacccccctcctagtcccttggctttaaattatgctaatgttgggaggagaatgaataaattaaagtgaatcttttgcacctgtaaaaa

SEQ ID NO: 128690 - DNA, 657 bp, Homo sapiens
taccgaacagatttgcttggtgtgtcttacttgtggctattcatttattctcaccagggacttccttcgctgggcatctggctgggattcttgttggactaatgtacactcaagggcctctgaagaaaatcatggaagcatgtgcaggcggtttttccttcagtgttggttacccaggacggcaatactactttaatagttcaggcagctctggatatcaggattattatccgcatggcaggccagatcactatgaagaagcacccaggaactatgacacgtacacagcaggactgagtgaagaagaacagctcgagagagcattacaagccagcctctgggaccgaggaaataccagaaatagcccaccaccctacgggtttcatctctcaccagaagaaatgaggagacagcggcttcacagattcgatagccagtgaggtggcatcttgggaagacatggcctattcgtgtaattattgcccatttggctcattccccaagcccctaattcattttaattcattttaaacaaaagcagagtacaccggtattgctccagatcgctcacatcacctgggacagtcccatggcccctatgagtcaactcacagcttgcggggagtgggccttctcctggccttgttcttgctcata

SEQ ID NO: 128691 - DNA, 1312 bp, Homo sapiens
ttacatttgagtaactgtctgactacccaattgtttctcaagcatcatcagtttttccataatagcccaggaatcaggcaccaaacaagcatttgcatagacaaccctggtctgcagcggactgaggtaagaatcattaacaccactgacatcacttttggcagatccccttgcccttagggggcattccagcaggcttctagcctccagaccctgcatttctttgatgaagtgctttctctggccccggatgtcctctttgccttcccctgtaaggcactctatacccccagaatttcggtcactgtgagtgccgcctcgcttccatttccaaatatctgctattaatagccttgctgtagtgggcacgtgtgcccacatcaccaagcttgccttgctggctggctctgggactctgcgataagccgccctccggttgtctgcgatagctcctgaagcaggagagtgtctttcccaccctccgcctaacaggcggtatctgacccttccaggcagcagctccccagcctccggctgcgctggggcccggaaggacgaagcttcccggcagagaacctgggcagaggcgtccgttgggtaggcggccgcgacccgctcgctgcttctcccctagtcttcgggtcccttgaacgcaggtcgcttgtttgcccggccccaggaatccggggcgccccggatcgggaacgtgcgtgatgtaccacgtgcgcgcgaagacgtggggacgcaggcgggtcgtagagagcgtgagtttccgcgtctgtttggtccggctgctgtcgttggttgtgagcggcatctctcgccgtttccccgggctgcgggagctggcggccgggctggggctgctgggcggaggtcggcgcctcccggggggctggggtcttgtcgaagttgccgcatctccgccggaccgcacgggaacgacgtgcccacactcggaggaaggggttggcgctgtaaaactcaggagccgagaagctttaagaacagtgaggttgaagggcacaggctcttggtccttggcagcgatattaggaggcgtgcctagggaacctcggattccggggagctggacgtgaaactctcggtcccagaggctggcttgtaatgctctctcgagctgttcttcttcactcagtcctgctgtgtacgtgtcatagttcctgggtgcttcttcatagtgatctggcctgccatgcggataataatcctgatatccagagctgcctgtttcccatgtcaaaatattaacattattgatatttagaacaggagaaggagacaagtacat

SEQ ID NO: 128692 - DNA, 465 bp, Homo sapiens
  misc_feature (1)...(465): n = a,t,c or g
caccgagaagaggcagcggcggtggcncagagacgattggtgccaaacagggcagaacgcaactcagctctgggtttgtgaatagcacaatggaagaagctggactttgtgggttaagagagaaagcagatatgttgtgtaactctgaatcacatgatattcttcaacatcaagactcaaattgcagtgccacaagtaataaacatttattggaagatgaagaaggccgtgactttataacaaagaacaggagttgggtgagcccagtgcactgcacacaagagtcaagaagggagcttcctgagcaagaagtagcccctccgtctggtcagcaagctttacaattgcaacaggaacaaagaaaaagtcttaggaaaagaagttttattattgatgcaagccctaaacactctttccgactccagaggagaagctggcagctctctgtaagaaatatgctgatct

SEQ ID NO: 128693 - DNA, 723 bp, Homo sapiens
atggtggtgcggttcacttgtctagtggttccccaggggaaggccacagaaccttctcagggctgttgtgtcctgctggtgatatttgttgaagccccagccactagaagattgagagatcaaagacgccgcacttcagcttccgctttggcgtgcacaggacagagaaagagcaatgaaagaaagaagagagaaacgaagagagagagagaaagagagagacagagaaaagaagagaaaagagaagatgttttgcaagagaagttgtcatacgataatggaacccaccccagagctgagttgcgttctgccctgtttggcaccaatcgtcttggcgccaccgccgctgcctcttctcggtgttacctctcccctacgccacgaggtgacttccgcagcaaaaccggcagagtaccctcacggaagctcatggacttaacgcggggccctataactctggcgaccaatcgctgcatgccaagtaccacacgtgaccggaggaggttgactccgccatccactcttcctaacactaccaacctatcttggggagtgcgggaggacggacacggacacaaggttgtactaagaaagcttgaaaggtccaaagacactaacaatgcagtggacgtcgatgttcctgatgttttctggtttgaaaaattaagacagatggaagagtacatctgctgttggaagaccagttggagcagggaaggctga

SEQ ID NO: 128694 - DNA, 541 bp, Homo sapiens
tgaagtcacctcgtggcgtaggggagaggtaacaccgagaagaggcagcggcggtggcgccaatgaccgattggtgccaaacagggcagaacgcaactcagctctggggtgggttcctgtccagaggggtagagaagagtggctgagggcgcgccctgaatctcagcgggaagagtgcgaccccgagggcgcgctagtttgtgaatagcacaatggaagaagctggactttgtgggttaagagagaaagcagatatgttgtgtaactcgtgaatcacatgatattcttcaacatcaagactcaaattgcagtgccacaagtaataaacatttattggaagatgaagaaggccgtgactttataacaaaagaacaggagttgggtgagcccagtgcacttcacacaagagtcaagaagggaacttcctgagccagaagtagcccctcccgtctggtcagcaagctttacaatgcaacaggaacaaagaaaaaggcctaaggaataatcctttgctctttggttggaggtggccacatactgg

SEQ ID NO: 128695 - DNA, 690 bp, Homo sapiens
atggtggtgcggttcacttgtctagtggttccccaggggaaggccacagaaccttctcagggctgttgtgtcctgctggtgatatttgttgaagccccagccactagaagattgagagatcaaagacgccgcacttcagcttccgctttggcgtgcacaggacagagaaagagcaatgaaagaaagaagagagaaacgaagagagagagagaaagagagagacagagaaaagaagagaaaagagaagatgttttgcaagagaagttgtcatacgataatggaacccaccccagagctgagttgcgttctgccctgtttggcaccaatcgtcttggcgccaccgccgctgcctcttctcggtgttacctctcccctacgccacgaggtgacttccgcagcaaaaccggcagagtaccctcacggaagctcatggacttaacgcggggccctataactctggcgaccaatcgctgcatgccaagtaccacacgtgaccggaggaggttgactccgccatccactcttcctaacactaccaacctatcttggggagtgcgggagggacccaaccaggatcctgagccctcactttctccctgcgttcctcatgatccatttgactataatgcagaaagtttgtttagctactggctggtatctgtaactcctatgacagctcacactccttga

SEQ ID NO: 128696 - DNA, 1743 bp, Homo sapiens
atgtgcctgcagccgccgtgtgcaagcgcagggagagcccggaaggtaggggcgcgcggggcgcagacctcggggatggacgcgggggacaccgcggccgcggcagaacggcccagcccgccaggtgacagcttcgccgtgagcgctgcctgggctcggaagggcatcgaggagtggatcgggagacagcgctgcccgggcggtgtctcgggaccccgacagctgcggttggcgggcaccataggccgaagcacccggatgtcctgtgagctccggaactctgcacggggctttcaggcagtctgcgtggaactcgcgcaagcccaaggcagctccccttccgtggcccagaagtcagaactgcccccccgcacctccaatcccactcgatctcgctcccatgagccggaagccatccacatcccacaccgaaagccccaaggcgtggacccggcctccttccacttccttgacaccccaatcgccaaggtctcagagctccagcaacggctccggggcacccaggacgggagcaagcactttgtgaggccccccaaggcccagggcaaaagtgtggcccccctcgggcacaagaagcacaagcaccgagccaaggagagccagcagggctgccggggcctgcaggcaccactggcctcaggtggccctgtcctggggcgggagcacctgcgggagctgcccgccttggtggtgtatgagagccaggccgggcagccggcccaggcttccactacccagtcagtgttgccacagataggggaccagccccgcccatctctctgcatccaggagctccagtgcgacgtgtccatggaggaggacagccggcaggagtggaccttcaccctgtatgactttgacaacaacggcaaggtcacccgagagatggttggatcagagcaccttcttgtgatgtcacaaatcggggcctttctagccttcttaaccttggaggttctgctcagcagctgctactggcgtctcgtcctcttggctctgggtctggggcactggaagccttggagcatggcaagtccagagcaccctgggagccctggctgcatgggacccataacccagtgcacggcaaggacccagcaggaagcaccagccactggccccgacctcccgcacccaggacctgacgggcacttagatgggcaaacagaggcacggagcaggggcctggctggcccagggctgcacgttcttgagcatgccgtcacgggcacctctcgcttgtctcttgtgcctgtcagggagtcaggagacatcgccttccatcctgaccaaccaggtctggctgtccttcgagtccccgttgatctctggaattcaggcattagcttccgaagccttttaacaatcattattcaattcatgacctcggatgtttggggaccacctcaaaatcaacaacctgcccctgagtcttcatcatcaggatctcctcctgagaaaaaccaaataactaaagtacagatgctgggtggctgccaggtcatgtataagtgcttgctcaacatcattcccaaggacccagcactctctaagatgttcggcagcacggaaggtagtgctgatcccacatgtaagcaagcaagcggatccttgagcgctttcatgggtaagaacgtcataaacaacgtgcatccattcgcccccagggaagcccaaaaggtcctcaggttcttgaggccacctggaaccacttccacctaa

SEQ ID NO: 128697 - DNA, 806 bp, Homo sapiens
gtggcagcccctcggcttgtcgccggagctgagaaccaagagctcgaaggggccatatgacactcctcccggacccctggacacacacagccctggggactggatgccttggagcatggcaagtccagagcaccctgggagccctggctgcatgggacccataacccagtgcacggcaaggacccagcaggaagcaccagccactggccccgacctcccgcacccaggacctgacaggcacctgcccccacacagtggaataaaatacaaactccagcatgaccacgcgggagcttcagcagtactggcagaaccagaaatgccgctggaagcacgtcaaactgctctttgagatcgctttcagctcgcatcgaggagagaaaagtctctagagtttgtggtgtaccaaatcatcgtcatctcagactgggagctttgacaacaacaaggccgtcctggaacggcgctattccgactctcgcgaagctcccagcaaagcgctgctgaagacgttcagggaggagatcgaagacgtggagtttcccaggaagcacctgactggggaacttcgctgaggagatgatctgtgcagcgtcggcgcgccctgcaggagtacctgggcctgctctacgccactccgctgcgtgcgccgctcccgggagttccctggacttcctcacgcggccggatgtgcgcgaggctttcgtgctgcctgcgggccggccagtacccgcgcgccctggagctgctcgtgcgcgtcgtgccgctgcaggagaacgtcaccgcccacctgccctgcgcgtcgc

SEQ ID NO: 128698 - DNA, 560 bp, Homo sapiens; identical to SEQ ID NO: 116600

SEQ ID NO: 128699 - DNA, 1690 bp, Homo sapiens
atgtcaaatgatggaagatccaggaatcgggacaggcgctacgatgaggtcccaagcgacctgccctatcaagataccaccataagaacccacccaactcttcatgacagtgagcgggcagtgagcgctgatcccttgccaccaccccctctcccattacagccaccattcggcccagacttctactcaagtgacacagaagaaccagctatagcgccagatctcaaaccagtaaggcgctttgtccctgactcctggaagaactttttcagagggaagaaaaaggaccccgaatgggataagccggtgtctgatatcaggtacatctccgatggagtggagtgttcaccaccagcctctccagcaagaccaaaccaccgttcgcccctcaactcctgcaaagatccctacggcgggtcagaaggaacctttagttcccggaaagaggctgacgcagtgtttccccgggatccctatggatctctagaccgacacacacaaacagttcgaacatacagtgagaaggtggaggagtataacctgagatactcctacatgaagtcgtgggcaggcctgctgagaatactgggtgtggtggagctgcttttgggggccggtgtctttgcttgtgtcacagcttacattcacaaggacagtgagtggtacaacttgtttggatattcacaaccgtatggcatgggaggcgttggtggattgggcagtatgtatgggggctattactacactggccctaagaccccttttgtactcgtggttgctggattagcttggatcaccaccattattattctggttcttggcatgtccatgtattaccggaccattcttctggactctaattggtggcccctaactgaatttggaattaacgttgccttgtttattttgtatatggccgcagccataagtctaatgtgaatgataccaacccgaggtggcctctgctactatccgttatttaatacaccagtgaatgcagtgttctgccgggtagaaggaggacagatagctgcaatgatcttcctgtttgtcaccatgatagtttatctcattagtgctttggtttgcctaaagttatggaggcatgaggcagctcggagacatagagaatatatggaacaacaggagataaatgagccatcattgtcatcgaaaaggaaaatgcttaaatcgacgcgggttcacacaactcgcaacaagtggattcgaagtagccagtgtggcccacaccgtgactcctggaatatttcacagattgaatccagcccccgtctccccgggatatccaaagggacttccacacgcggactcaccggcgccgctagaaggactctcagccggaaactcagcccgacactcctctccgccgctttaggggcgccccggaagtcattccgccgcgccctgcggccacgccgaaacgttccggatgctgcagagtgcagctgccggagcggggcgctcaggtgcagggcatggcctccgctgagttggggcgcggaaagggacggtgttccagctggaattcgcagagaaccggaaagagtgatcgccattcgctctcgggaaggtcgaaggctctgcagccatcgacctgggttctgaggagctcgatctggtttttctacttctaaaaggttgggatgaaggaccctggccacagaagtaa

SEQ ID NO: 128700 - DNA, 1110 bp, Homo sapiens
atgcgcgtgccgggggccgtggatggccatggatggccccgccgggccgcgtatctctcggggacctgcggccaacactgtcttttagagccggggatgggggagtggagggggccctgttgccctagaggcctcgggacccttcccttgcccacccccactcgggccgcggcgggcaggagcagtctgcggagttctggcccatctgtcactctgtcccgggacgctgtgatccacggcggtgggggagggggaagggggagggacaagcatggctcgggtgaagttttaaactctgttcttctctcttgcctttctttggggacattctcccctttgggatatgtcctggacttcgcaggctgcgagaacttgttgacaagtgaaagctcggtagagccccggcttggtttgtggtctgcttattttttgcaaagtgactgttcctatttgcgctggtccttatcggtgcccctttgggggacttcggcactgatcagcgcgctgacagccgccgtccgggctgcgggaaaatggggcgcgccctccggggggcgagtggctgtgtccttgctaatttcctccgtaacctttaaactctcgctggaagctaccgccgcggctggtcacgtgaggcgagccctgggctgctggggaaaaatttcctcggctgggagccgggaccgggccggcggccggcgagggactgccccgcgcccgagactgggaacctgggagggcagggccggagcgctgggccccggggcgcggcccagctgggacacccgcgaagacggcggcggtgaagaggtcggctccgctgccggggagctggggattatgcaaatggggaaagaaaacctccgccctcgcccttctgccaagtcaagtctgggaatttgtaggtattgtgtgggtaaaggttatcattgcctgcggcttaaaagcctaaaaaggcttaaaggcgaggaaggaggcagtcccctggaaaaacaggatatcaagtgcagcaaacacgtcccaaaaatgatccgaaaagttctagggccatctcctaagaacaggcaaagcctttgcctgcaaccgctctggagcttcctaatacagtaa

SEQ ID NO: 128701 - DNA, 543 bp, Homo sapiens
atgggggtcagggacccacttgaggaggcagtctgtgccttagcagagcttcagcactgtgctgggagatttgctgctctgttcagagccagcaggcaggaacgtttaagtctgctgaagctgtgcccacagctgccccttcccccacgtgctctatcccagggatataagcctctgattggggctgctggctttctttcagagatgcactgcccagagaggaggaatatagagaggcagtctggccacagtgactttagagctgtggtgggctctgcccagtttgaacttcccagaggcgttgtttacactgtgaggggaaaactgcctactcaagcctcagtaatggcaaacgcccctccccgcaccaggctccagcatctcaggtcgacttcagactgctgtgctggcagtgagaatttcaagccagtggatcttagcttgctgggctccgtgggggtgggatccactgagctagaccacttggctccctggcttcagcccgctttccaggggagtgaatggttctatctcacattctaa

SEQ ID NO: 128702 - DNA, 487 bp, Homo sapiens
ctagagtcgatccttaggctttatcaagttctcaagctgtgttttcagctctatcaggtcatttatgttcttcgctaaactggttattctagttagcaattcctctaaccttttttcaaggttcttagcttccttgcattgggttagaacacactcctttagctctgagaagtttgttattacccaccttctgaaacctacttctgtcaattcgtcaaactcattctctgtccagttttgttcccttgctggcaaggagttgtgatccagccgaagctctcctgtatgaggtgtctgtcgacccctgctgcgaggtgtctcccagtaaggatacatgggggtcagggatccacttgaggaagcagtctgtcccttagcagaacttgagcactgtgctgggagatctgctgctctcttcagagccggcaggcaggaacgtttaagtctgctgaagctgcgcccacagctgcccctttctccaagtgct

SEQ ID NO: 128703 - DNA, 1938 bp, Homo sapiens
tcagactgctgtgctggcagtgagaatttcaagccagtggttcttagcttgctgggctctgtgggagtgggacccactgaacatgaccacttggctccctggcttcagccccctttccaggggagtgaacggttctgtctcactggggttccaggtgccactggttgccacacaggcctggtttttctgaggcccctctctgccagggcatgagatgggctggcgtctcagtggcaaggcccttatggaaccacatgggtctctgggtatcttaggtgggtagatatgagggaggggccagatcagatcagtgtggtctggagaggacaagagttggtggattctgagaacactcagcagggatgaagagaaggggcagccaagaggctggaggacgagctgagccttgagctcagaggagggtagagaaactaagcccaggggagaatgaggagccccagtgggggatgaggagttaggtcccatggtattatcccttttttctctgtcatgtaacactggagaaggaggtaagaagtttacccaaagccccaggaccaaagtggtccatgttgtctcctgatggtgctcagcttcagccttggcagaagggcaggccctggagaaactggtgtggataggaaggagctgagtatcagcttcatgtgggggtttggggaggtggcaaggggtgaggggagaggagaaagcagaaaacagcaaaattgtgtcattggccttaaaggaagtctttttaatctctgggtcccccacgcacaactcaatggtactgtcgtaataatggcgtaagtcagattcgcactttcgatcttcctgcactgtcatcttcacctcttgtagtgtgtgtgagtgttttcccaggggggccgtctgcccccagccggccacactgcatgtctgccctggcttcacctgggccttgttgctaggtagcctgaggggctgcacagctctggtccgcttggcctttctctccagctggtggggaagaggcaagaaagtccaggtcagccaacgaacttctgggccccgacacagtgatggggctgcacaatcttccctctcctctgaggcataggaactaaccaagaggccaggatggaaaggagggaagggccggcattccagggggagtggaaccaactgcagtagcatgatgtcgttggagaagttcttaggattataggctggatgggggatgggtcttttcacagggataaactgctgggtcggctcctgttctttgatattgtgggcccccaaggtgacatttatggagcttccccaacagtgagcagctgtcagcacgaagtcgtctcgtatcaggaagccaccgcacctcttcagagacttctgatcccagatcataagataagccatgtaggggcgggagtggggcttggcctcatgtcccccgatgatctcccctgaaggaaaagtctgtctgcttgtgggcacccatggaatctgctgggtgggcacctgcttagtggctccagaactcctgggcatttgggagcctgggatagcctggagttgggagtggcctggaggaaggggcttcaatttcctgctctgcatctgccctgggcagcaggaggaaggccagcagaagcaggattggttgcatcttctcaggaaggctgccctggttggagctgctgttgtttcctccttgctctcttttagctccccactgcctctgcctgatgacgtcctctgggtgcttgtgtgagaatcatgcagtgaccacatcatcacccacagctgatgactcagagtggaccacctattcagcccagagcaggaacccaagcctatgaagtgaattgtaggatgtggtatcagccagtagaggtactggagcaccagaaacctgagttcccagtgatagaaccgccaatgcctcatggccat

SEQ ID NO: 128704 - DNA, 1683 bp, Homo sapiens
atgaaggcagaaataaagatgttctttgaaaccaacgagaacaaagacacaacataccagaatctctgggacacattcaaagcagtgtgtacagggaaatttatagcactaaatgcccacaagagaaagcaggaaagatccaaaattgacaccctaacatcacaattaaaagaactagaaaagcaagagcaaacacattcaaaagctagcagaaggcaagaaataactaaaatcagagcagaactgaaggaaatagagacacaaaaaacccttccaaaaattaatgaatccaggagctggttttttgaaaggatcaacaaaattgatagaccgctagcaagactaataaagaaaaaaagagagaagaatcaaatagacacaataaaaaatgataaaggagatatcaccaccgatcccacagaaatacaaactaccatcagagaatactacaaacacctctacgcaaataaactagaaaatctagaagaaatggataaattcctcgaaacatacactctccaaagactaagccagggagaggttgaatctctgaacagaccaataacaggatctgaaattgtggcaataatcaatagtttaccaaccaaaaagagtccaggaccagatggattcacagccgaattctaccagagaatagctattcttccagacgggagtctacggatcctaaatgcttccaaatcagacgagggaaagtacgtttgccgaggggaaaacgtctttggttctgctgaaattatagcttcgctatctgtaaaagaacctacaaggatagaacttactcctaaaagaacagaattgacagtgggagaaagcattgtccttaattgcaaagcaattcacgatgctagtttggatgtcactttctactggactctgaaaggacagcctattgatttcgaggaagagggtggacattttgaaagcatcagggccccatatgaagtaatgttatttggggaaaacatgctacctgacctagacctcagacccccaggcccacctgggatagtaattgttgaggaaataaccgaaagtacggccacactgtcctggagcccagcagctgacaaccacagcccaatctcctcctacaaccttcaagctcgcagcccattttccctgggctggcaaacagtaaagacagctctgaagagagcagcagatctcccagcgcagcgctcaagccctgctaagggacagactgcctcctcaagtgggtccctgacccccatgcctcctgactgggacacaactcccagcagggagttgtcaccgacacctcataaaggagagctctggctggcatctggtcaccaacatcgaagaccaaagatagataaatccacaaagatgaggaaaaaacagcacaaaaaggctgaaaattccaaaaaccagaacacctcttctcctccaaaggatcacaactcctcgccagcaagggaacaaaactggacggagaatgaatatgatgaattgacagaagcaggcatcagaagtgcaatcaaactagaactcaggattgagaaactcactcgaaaccacacaactacatggaaactgaaaaacctgctcctgaatgactactgggtaaataatgaaattaaggcagaaataaataagttctttgaaatcaatgagaacaaagagacaacatactag

SEQ ID NO: 128705 - DNA, 1320 bp, Homo sapiens
atggacagtgaagtccaggctgatgatgaagtctcagatgaaaacggggaacttattggaaactggggcaaaggaggcatgggggtcagcgacccacttgaggaggcagtctgtcccttagcagagcttgagcgctctgctgggagatctgctgctctcttcagagccagcaggcaggaatgtttaagtctgctgaagctgacccaacagctgccccttcccccagaggtacggcattcagatctcctttcaagagccctgctcagaggaggagcatcatttgctgacagtctacagctgcaaaaccttcagatccaccgtggcacccatgccaaggttgtgcttaccccaggccagtggcaaagtacagtgagagaactagagctgggctattcctgcctgacagggaacctctcctatgtgcagtctgtgctctggggctccccatcagcctggggctcccctggtccttccattgcctccacctgtcaacaggctaagaagggagttacagtgctggttggggtgattgacctggactatcaagatgaaatcagactactactacacaatggaggtaaggaagagtatgtgtggaatacaggagataccttagggtgtctcttagtattaccataccctgtgattaagatcaatgagaaactacaacaacccaatccaggcaggactacaggtggtccagacccttcaggaatgaagattagcagcggcattagattctcacaggaatgtgaacctattgtgaactgcatatatgagggatctaggttgcatgctccttatgagaatctaatacctgatgatctgaggtggaacagttgcatcctgaaaccatcactcctcctccccctgtttgtggaaaaattgtgttccctgaaactggtctttggcgccaaaaaggttggggaccactggatattaggaaaccaaaagaagaaaaatactcaatgtgggccaaaatatggaaaaacagagtctcatgagcttttggtggagagaattgttttggtggatactgggatgttcctccacccagattccccttcaacagaggatgggttgtcccagccactggaagtgcagtcagcagtcagccttcagtgtcagctgcttcagagattgcctcatgctacagagaggagcctcaccaactattttggcccaatttgggacaactctgaaggctccagagcttctcaaggagacacggcaaccatccgatttctcaatcttttccccacctttcccgcctttctattccacaaagccgccatagtcatcctgggccgttctcaatga

SEQ ID NO: 128706 - DNA, 430 bp, Homo sapiens
  misc_feature (1)...(430): n = a,t,c or g
ttagcttgctgggctccttgggggtgggacccaccgagccagaccacttggctccctggctgcagccccttttccaggagagtgaacggttagcggctnnnnnnnnnnnnnnnnnnnnnnnnngcgctggcttttgattacattatttttctctgtttcctattttcaattgtattgatttctgctctaatttttattatttcatttcctgtgcttactttggatttgactgcctcctaagatggatatctaaatgattgcttttggatcattcttttctaatacaggcattgaatgctatgcatttcttccaggcactgcttttgctgcatctcacaaatttacatatattgtgttgttattgtcagtcagttaaaatgggtaacaccatcggttgtgccttcctgtacgttctccgggacaggacatc

SEQ ID NO: 128707 - DNA, 637 bp, Homo sapiens
tcagctattcatacttgtgtatgcttcacgaagttctcgtgctgtgtttttcagctccatcaggtcacttatgttcttctctaaactggttattctagttagtatttcctctaaccttttttcaaggttcttagcttttctgaattgggttagaacatgctcctttagctcagaggagtttgttattacccaccttctgaagcctccttctgtaaattcgtcaaactcattctccatccagttttgttctcttgctggcaaggagttgtgatcctttgcaggagaaaaggtgttctggtttttggaattttcagcctttttgcactggtttttcctcatcttcatggatttatctacctttggtctttgatgctggtgaccttcggatggggtttttgtgtggatgtcctttttgttgatgttgacgctattcctttcagatgtctgttgacccctgctggaaggtctctcccactccggaggcacaggggtcagggacccacttgaggaggcagtctgtcccttagcagaacttgagcactgtgctgggagatctgctgctctcttcagagccagcaggcaggaacgtttaagtgtcctgaagctgtgcccacagctgccccttcccccaggtgct

SEQ ID NO: 128708 - DNA, 446 bp, Homo sapiens
ctcgagcatcccaagttgtcttcagactgctgtgctggcagcaagaatttcaagccagtggatcttagcttgctgggctccgtgggggtgggatctgctgagctagaccacttggctccctggcttcagcccccctttccagaggagtaaatggttctgtctcactggcattccaggtgccactggggtatgaaaaaaaactacctgcagctagctcggtgtctgcccaaatggctgcccagttttgtgtttgaaacccaaggcccttgtgatgttagcacccaagggactctcctggtctatgggttgcaaagaccatgggaaaagcatagtatctaggccagatagcaccatccctcacagcatggtccttcacagcttcctttggctaggggagggagttccccaaccccttgtgcttctcggatgaggcaacaccccaccct

SEQ ID NO: 128709 - DNA, 337 bp, Homo sapiens
ggaggatcgcagcgcatttcggccaagacagcctcacacgcttcaccctttacacgcacggtcacttgccccgcgcagccccaccccccccagccctcctagccctgacacacagctgggactctcaggtccgaccagcggtcctgaatccgctcccacggcacgggaaatccttcgtggcgaagcagcaggtggggaagcagcagcccctgcgctgcctcatctacatagaagtcgccctatccgtgatgtcaccgacagtgcctttcccagtccccgtctgcctttctgccgctcagcctaccaacccgctgccggagccggcagggggaagtga

SEQ ID NO: 128710 - DNA, 729 bp, Homo sapiens
atggctcgttatgccaggggcacgggctccctgcccccaaccccctttgatttctgtgggatggagagggcagagtctctgagtcctgcacggagtgaccattgggaagggttctggaggggctcaggtggagccacggacaggagtggcagtgaagggcagatggcctgggggactcaggcttgggccccacccagcctggggagtgggggtagtcattcttgtgtagcctttggttgcatggacccaaagtttacagaagaagaccctggaggagggaagcctaatctggccccctacaccatcctagagtggctgccctgctgtctacccaaccacacccttgccctgccctgctttcccttccttcaggacacgtctcccttgatgtcaaccgcttgcctgtgggctcaagggactgctgccagccgcccccgctgtctgctgccatcctgtgcccccactctgagtctgcgaggtggccttacccgccagctgcctggtaaaggtgttggtggtttctatcgcgttgactttctggcatctaagtgtggagctcctgtgttccacccaagggaggaccgatggcataaggcgaccgaggcaagtaccaaaaccagtgccgttagcccctgctccaacagcgccattgccatagaccatgatgtaaataatgctcgcctgagtgtttcagtgcatgatttcagcccttatatgtggaaagcctga

SEQ ID NO: 128711 - DNA, 400 bp, Homo sapiens; identical to SEQ ID NO: 116690

SEQ ID NO: 128712 - DNA, 1308 bp, Homo sapiens
tcaccagtcttgactgtggttagaagaggtgtgaaaagggagtttttttctactgggtacaaaacggcctggagtttttctaagcctgcacaaaaaaggcttgctatcatcataaccatcatcgttatcatcatcatcatcatcatcagacaaagccgtaacagcaggaactgaaagttctacaggctgtacaggaagcaaggcagcatctttccggggaagcctcaggaagcttttactcatggcagaaggcaaagctggagggagacaccttatgtggctcatttcgattttcactatcacaaccaagcctgcttgctgtctttctcttcctccgcccttaaaccttagggacttcttttctctctcagcctttgaaggtggtatcatttcaggaggagagaatattgatgccctccttccattctgcccttcctcatgggatagcagctgtaccttggatgtgacactgctgagaataccgggacaacagtcatcctggtggcggaacatggttccaccccaggaaaagcaaaccaaggagatcaagggttgctgtacctttacttcagttgagctgtcagcccagacaaattccagaggggacgtgtgctccagtgaaggtcccagaaagcgtaagttctccatgggattataagccagaaaaggaagcgcactcctaagactatatctatctaatgcgtggtgcgtgtgcgtaaaagtgttgaggatattttctacagcgagcgcatacatcacacgaagggattcttctttagggccggtttggaccttccttaatttttcttttgggtcccctggagaaattccaacccctttcttcttttttcccgtttttccccttcccttagttgcgtggttttgcccagcttcattttgtttaccccaatgtccttttggtcccttcagaaccttctcccccccctcattccggggatgcgcattgctctcccccgaaaacgtttccggcttgggcatgcgtgtttgtgcccccagccttttccatccatgcatcctgcatcccactacccccactgtagcgcccactcctctgattcctggcccagcagcttgacctccggtcctcctctcaagcgtgcaagtcacacccccggaatccgtagatgtgcatctgtgccccgtgccccactcctgatctttgagaaattttcggatgtttcgatgggctcgggaacattcggttaataagctgagaactggagttagaccctctctatagctgcttcccatcaaggaacatgtggccagggttagcagatgttccat

SEQ ID NO: 128713 - DNA, 384 bp, Homo sapiens
atggagtggggcacggggcacagatgcacatctacggattccgggggtgtgacttgcacgcttgagaggaggaccggaggtcaagctgctgggccaggaatcagaggagtgggcgctacagtgggggacccgctcgatagcccctgcttcgccggcccggacgatgtagagggcgcgctcctcatccatggccgcaggtgcgggggagccgcggccgctctgcgcgcccaagccgctgcctccagcaaccggcgcctcacggccgcccctgacaaggcccaggactcggtcgaggcctggctagcggaccgaggcggagtcaggcccaaggccctgcttgctctcctgcctctccctccctcggagaactgtccagtcttttaa

SEQ ID NO: 128714 - DNA, 511 bp, Homo sapiens
ggtcaatgcccgcgtacgttatcttggatcctccagagcggccgcggctcccccgcacctgcggccatggatgaggattgcgccctctacatcgtccgggccggcgaagcaggggctatcgagcgggtcctgagggattacagcgacaagcatagggctactttcaaatttgaatcaacagatgaagataaaagaaagaaactctgtgaaggcatatttaaagtccttataaaggacatcccaacaacatgtcaagtgtcctgcctggaagtactccgcattctctccagagacaaaaaggttttagttcctgtgacaactaaggaaaatatgcagatactgctgcgactagccaagctaaatgagttagatgattctttggagaaagtatcagagttcccagttattgtggagtcattaaaatgtctgtgtaatatagtgttcaacagtcagatggcacagcagctcagcctggaacttaatcttgctgcaaagctctgtaaccttctga

SEQ ID NO: 128715 - DNA, 762 bp, Homo sapiens
atgcagtcgagctgctgcacagatgcacacccaggaaagaagggctatgtctccacaaatgcaggagctgttccaggggcagctaacttcctccaaatgttccccagagcaatctgccgtctggagacccacttggacggaggcatccactccagcagccagggccaggtcaacggggacaacctgcaggcagacagcattgccacagaagaaagaattgtccagcatcagaataataatggccacaaccacgccctctgcctagagcgtcacacaaattgcaaccgcctgcagataatgcaggaatcaaagactacagtcactggacgccaggtgggtcatttcacaaatgatgccctgaaatccggccacccagctgaacgcatggaactaaatccatttcccaccaactgcctcaggtacgcacagtgtgctcgaggcactgcagacactcagagacagccaagtcccagggtacatcaggatcccagccctgccattctgcactccttccatctcctcatgaacatgggccgcagcacctccttcagctcccttctcatcgatgtcacccagacactgctccattcaactgtgatgctgtcaaggcatgccctgggcacgcaacagcagctctggaacatccctacctgtcagggcgccaaagccctccctccccaactcatctcccgaagctgcccgctgggcgtggctacacagtgtgtgcactgccaaagggccctggagaacgttctgcagtaa

SEQ ID NO: 128716 - DNA, 413 bp, Homo sapiens; identical to SEQ ID NO: 122730

SEQ ID NO: 128717 - DNA, 2448 bp, Homo sapiens; identical to SEQ ID NO: 121935

SEQ ID NO: 128718 - DNA, 1587 bp, Homo sapiens; identical to SEQ ID NO: 123063

SEQ ID NO: 128719 - DNA, 4729 bp, Homo sapiens; identical to SEQ ID NO: 121970

SEQ ID NO: 128720 - DNA, 1569 bp, Homo sapiens; identical to SEQ ID NO: 124178

SEQ ID NO: 128721 - DNA, 1430 bp, Homo sapiens
gcccaaaatctccttaagctgataagcaacttcagcaaagtctcaggatacaaaatcaatgtacaaaaatcacaagcattcttatacaccaacaacagacaaacagagagccaaatcatgagtgaactcccattcacaattgcttcaaagagaataagatacctaggaatccaacttacaagggatgtgaaggacctcttcaaggagaactacaaaccactgctcaaggaaataaaagaggatacaaacaaatggaagaacattccacgctcatgggtaggaagactcaatatcgtgaaaatggtcatactgcccaaggtaatttatagattcaatgccatccccatcaagctaccaatgactttcttcacagaattggaaaaaactactttaaagttcatatggaatcaaaaaagagcccccattgccaagtcaatcctaagtcaaaagaacaaagctggaggcatcacactacctgacttcaaactatactacaaggctacagtaaccaaaacagcatggcactggtaccaaaacagagatatagaccaatggaacagaacagagccctcagaaataataccacatatctacaaccatctgatctttgacacacctgacaaaaacaagaaatggggaaaggattccctatttaacaaattgtgctgggaaaactggctagccatatgtagaaagctgaaactggatcccttctttacaccttatacaaaaattaattcaagatggattaaagacttacacgttagacctaaaaccataaaaaccctagaagaaaacctaggcaataccattcaggacatagggataggcaaggactttatgactaaaacacaaaaagcaatggcaacaaacgccgaaatacacaaatgggatctcattaaactaaagcacttctgcacagcaaaagaaactaccatcagagtgaacaggcaacctaccaaatgggagaacatttttgcaatctactcatctgacaaacggctaatatccagaatctacaaagaactcaaacatatttacaaaagaaaaacaaacaaccccatcaacaagtgggcgaaggatatgaacagacacttctcaaaagaagacatttatgcagccaacagacacatgaaaaaatgctcatcatcactggccatcagagaaatgcaaatcaaaaccacaatgagatatcatctcacaccagttagaatggcgatcattaaaaagtcaggaaacaacaggtgctggagaggatgtggagaaataggaacactgcaaactatcacaaggacaaaaatccaaacactgcatgttctcaatcataggtgggaattgaacaatgagaacacttggacacaggaaggggaacatcacactctggggcctgttgtggggtgggggaggggggagggacagcattaggagat

SEQ ID NO: 128722 - DNA, 576 bp, Homo sapiens
atgggcaaggacttcatgtctaaaacaccaaaagcaatggcaacaaaagccaaaattgacaaatgggatctaattaaactaaagagcttctgcagagcaaaagaaactaccatcagagtgaacaggccacctacagaatgggagaaaatttttgcaatctacccatctgacaaagggctaatatccagaatctacaaagaactcaaactaatttacaagaaaaaaacaaacaaccccatcaaaaagtgggcaaaggacatgaacagacacttctcaaaagaatacatttatgcagccaaaagagacatgaaaaaatgctcatcatcactggccatcagagaaatgcaaatcaaaaccacaatgagataccatctcacaccagttagaatggcgatcatcaaaaagtcaggaaacaacagggcccatgaacaaagtggccatggtgccagggatggaggttacacatgggctgagcaacatggacttccactcaccaaggctgacctgtccacagccactgctgagtgcctagagcagagaccaacactgagccctcatatggcactatttctcagg

SEQ ID NO: 128723 - DNA, 3325 bp, Homo sapiens; identical to SEQ ID NO: 124194

SEQ ID NO: 128724 - DNA, 2195 bp, Homo sapiens
atgcagaacaagggaattgatgcaaaaatcctcaataaaatactggcaaaacaaatccagcagcacatcaaaaagcttatgcaccatgatcaagtgggcttcatccctgggatgcaaggctggttcaatatacgcaaatcaataaatgtaatccagcatataaacagagccaaagacaaaaaccacatgattatctcaacagatgcagaaaaagcctttgacaaaattcaacaacccttcatgctaaaaactctcaataaattaggtattgatgggatgtatttcaaaataataagagctgtctatgacaaacccacagccaatatcatactgaatgggcaaaaactggaagcattccctttgaaaactggcacaagacagggatgccctctctcaccactcctattcaacatagtgttggaagttctggccagggcaattaggcaggagaaggaaataaagggtattcaattaggaaaagaggaagtcaaattgtccctgtttgcagacgacatgattgtatgtctagaaaaccccattgtctcagcccaaaatctccttaagctgataagcaacttcagcaaagtctcaggatacaaaatcaatgtacaaaaatcacaagcattcttatacaccaacaacagacaaacagagagccaaatcatgagtgaactcccattcacaattgcttcaaagagaataaaatacctaggaatccaacttacaagggatgtgaacgacctcttcaaggagaactacaaaccactgctcaaggaaataaaagaggatacaaacaaatggaaaaacattccatgctcatgggtaggaagaatcaatatcatgaaaatggccataatgcccaaggtaatttacagattcaatgccatccccataaagctaccaatgactttcttcacagaattggaaaaaactactttaaagttcatatggaaccaaaaaagagcccgcatcaccaagtcaatcctaagccaaaagaacaaagctggaggcatcacactacctgacttcaaactatactacaaggctacagtaaccaaaacagcatggtactggtaccaaaacagagatatagatcaatggaacagaacagagccctcagaaataacaccgcatatctacaactatctgatctttgacaaacctgagaaaaacaagcaatggggaaaggattccctatttaataaatggtgctgggaaaactggctagccatatggagaaagctgaaactggatcccttccttacaccttatgcaaaaatcaattcaagatggattaaagatttaaatgttagacctaaaaccataaaaaccctagaagaaaacctaggcaataccattcaggacataggcatgggcaaggacttcatgtccaaaacaccaaaagcaatggcaacaaaagacaaaattgacaaatgggatctaattaaactaaagagcttctgcacagcaaaagaaactaccatcagagtgaacaggcaacctacaaaatgggagaaaattttcgcaacctactcatctgacaaagggctaatatccagaatctacaatgaactcaaacaaatttacaagaaaaaaacaaacaaccccatcaaaaagtgggcgaaggacatgaacagacacttctcaaaagaagacatttatgcagccaaaaaacacatgaaaaaatgctcatcatcactggccatcagagaaatgcaaatcaaaaccacaatgagataccatctcacaccagttagaatggcaatcattaaaaagacaggaaacaacaggtgctggagaggatgtggagaaataggaacacttttacactgttggtgggactgtaaactagttcaaccattgtggaagtcagtgtggcgattcctcagggatctagaactagaaataccatttgacccagccatcccattactgggtatatacccgaatgactataaatcatgctgctataaagacacatgcacacctgggcaccctagaaagcagcccaccctgggttctataccccagaagtcacaggatcattgcgctgaagtgctaaaggacatcctgtttctagcagggactggaggagcccaggctcttctggccagtttctccttatctcaggatgttgaattcccagcaccttctgcagttattcttgagaactacaagcaaaagactgaaatgag

SEQ ID NO: 128725 - DNA, 3165 bp, Homo sapiens
atgaacaaggtgattctaaaatctatatggaaatgccatggaccaagaagagccaaaataaacctgaaaaagaacaagaataagagtttcctgaagtgtggcctatggagactagcattagaatcactggaggagcttaaagatatagagacagggatagggcctgagattctgactttgttcttaactcttgaaatgagaagcgtgaatccgtggtggtttcatgacctgcataatcacactacctgtttttctgtcacagattgccttctctcagcacagcaattttatggacctggtcctggatgttcagttcctgtaccagctaaccagtcattttggactcgagaggaatattctaacttaaagctccccagagcatctcataaagctgtggtcaatggaaacattatgtgggttgttggaggatatatgttcaaccactcagattataacatggttctagccaccatgtatgtgttcggtggtttcaatagtctcctcctcagcgacatcctggtattcacctcggaacagtgtgatgcgcatcggagtgaagccgcttgtttagcagcaggacctggtattcggtgtctcttgaccatgacagatgtgaccagcacacagattgttacagctgcacagccaacaccaatgactgccactggtgcaatgaccattgtgtccccaggaaccacagctgctcagaaggccaggtatgagaattgccccaaggataaccccatgtactactgtaacaagaagaccagctgcaggagctgtgccctggaccagaactgccagtgggagccccggaatcaggagtgcattgccctgcccgaaaatatctgtggcattggctggcatttggttggaaactcatgtttgaaaattactactgccaaggagaattatgacaatgctaaattgttctgtaggaaccacaatgcccttttggcttctcttacaacccagaagaaggtagaatttgtccttaagcagctgcgaataatgcagtcatctcagagcatggcccgtgtcaccgtgtgttctcagtcctcgcatgagagcctggttgacactggttctctctgctttggggaccgtatctggctgtgcgctatgtggagggctgagctcgtgtcttcctggaacaccagtactctgggactgaaggctgctgcctgcatcaacccactcaatggtagtgtctgtggaaggcctgcaaaccacagtgctaagcagtgccggacaccatgtgccttgaggacagcatgtggagattgcaccagcggcagctctgagtgcatgtggtgcagcaacatgaagcagtgtgtggactccaatgcctatgtggcctccttcccttttggccagtgtatggaatggtatacgatgagcacctgcccccctgaaaattgttcaggctactgtacctgtagtcattgcttggagcaaccaggctgtggctggtgtactgatcccagcaatactggcaaagggaaatgcatagagggttcctataaaggaccagtgaagatgccttcgcaagcccctacaggaaatttctatccacagcccctgctcaattccagcatgtgtctagaggacagcagatacaactggtctttcattcactgtccagagaataaaatacctaggaatccaacttacaagggacgtgaaggacctcttcaaggagaactacaaaccactgctcaacgaaataaaagagggcacaaacaaatggaagaacattccatgctcatggatagaagaatcaatatggtgaaaaaggtaatttatagattcaataccatccccatcaagctgccaatgactttcttcacagaattggaaaaaactactttaaagttcatatggaaccaaaaaagagcccacatcgccaagtcaatcctaagccaaaagaacaaagctggaggcatcacactacctgacttcagactatactacaaggctacagtaaccaaaacagcatggtactggtaccaaaacagagatttagaccaacggaacagaacagagccttcagaaataataccacacatctacaactatctgatctttgacaaacctgacaaaaacaagaaatggggaaaggatttcctatttaacaaatggtgctgggaaaactggctagccatatgtagaaagctgaaactggatcccttccttacactttatacaaaaattaattcaagatggattaaagacttaaatgttagacctaaaaccataaaaaccctagaagagaacctaggcaataccattcaggacacaggcatgggcaaggacttcatgactaaaacaccgaaagcaatggtaacaaaagctaaaattgacaaatgggatctaattaaactaaagagcttctgcacagcaaaagaaactaccatcagagtgaacaggaaacctacagaatgggagaaaatttttgcaacctactcatctgacaaagggctaatatccagaatctacaaagaactcaaacaaatttacaagaaaaaaacaaacaaccccatcaaaaagtgggcaaaggatatgaacagacacttctcaaaagaagacatttatgcagccaacagacacgtgaaaaaatgctcatcatcactggccatcagagaaatgcaaatcaaaaccaccatgagatatcatctcacaccagttagaatggcgatcattaaaaagtcaggaaacaacgggtgctggagaggatgtggagaaataggaacacttttatactgttggtgggactgtaaactagctcaaccattgtggaagtcagtgtggcgattcctcagggatctagaactagaaataccatttgacccagccatcccattactgggtatatacccaaaggaatataaatcatgctgctacaaagacacatgcacacgtatgtttattgaggcactactcacaatagcaaagacttggaaccaacccaaatgtccaacaatgatagactggattaagaaaatgtggcacatatacactgtggaatactatgcagccataaaaaatgatgagttcatgtcctttgtagggacatggatgaagctggaaaccatcattctcagcaaactatcgcaaggacaaaaaaccaaacacagcatgttctcactcataggtgggaattga

SEQ ID NO: 128726 - DNA, 2101 bp, Homo sapiens; identical to SEQ ID NO: 121518

SEQ ID NO: 128727 - DNA, 1073 bp, Homo sapiens
atggccatactgcccaaggtagtttatagattcaatgccatccccatcaagctaccaatgacttccttcacagaattggaaaaacctactttaaagttcatgtggaaacacaaaagagcccgcattgccaagacaatcctaagccaaaagaacaaagctggaggcatcacgctacctgacttcaaacaatactacaaggctacagcaaccaaaacagcatggtactggtaccaaaacagagatatagaccaatggaacagaacagaaccctcaaaaataataccacacatctacaaccatctgatatttgacaaacctgacaaaaacaagaaatggggaaaggattccctatttaataaatggtgctgggaaaactggctagccatatgtagaaagctgaaactggatcccctccttacaccttatacaaaaattaattcaagatggattaaagacttacatgttagacctaaaaccataaaaaacctagaagaaaacctaggcaataccattcaggccacaggcatgggcaaggacttcatgactaaaacaccaaaagcaattgcagcaaaagccaaaattgacaagtgggatctaattaaactaaagggcttctgcacagcaaaagaaactaccatcagagtgaacaggcaacctacaaaatgggagaaaatttttgcaatctactcatctgacaaagggctaatatccagaatctacaaagaacttaaacaaatttacaagaaaaaatcaaacaaccccatcaaaaagtgggtgaaggataacagacacttctcaaaagaagacatttatgcagccaacagacacatgaaaaaatgctcatcatcactggccatcagagaaatgcaaatcaaaaccacaatgagataccatctcacaccagttagaatggcgatcattaaaaagtcaggaaacaacagaggaacgtgcagccttgtggtggtgaagaaacttgtcaaagggcacagactgagctcttctgttaagaggctgccattgccagagggtgtagatggattggagctgctcaaagccactgacagtggcgggag

SEQ ID NO: 128728 - DNA, 3507 bp, Homo sapiens
atggtaaagggatcaattcaacaagaggagctaactatcctaaatatttatgcacccaatacaggagcacccagattcataaagcaagtcctcagtgacctacaaagagacttagactcccacacattaataatgggagactttaacaccccactgtcaacattagacagatcaacgagacagaaagtcaacaaggatacccaggaattgaactcagctctgcaccaagcagacctaatagacatctacagaactcttcaccccaaatcaacagaatatacatttttttcagcaccacaccacacctattccaaaattgaccacatagttggaagtaaagctctcctcagcaaatgtaaaagaacagaaattataacaaactatctctcagaccacagtgcaatcaaactagaactcaggattaagaatctcactcaaagccgctcaactacatggaaactgaacaacctgctcctgaatgactactgggtacataacgaaatgaaggcagaaataaagatgttctttgaaaccaacgagaacaaagacaccacataccagaatctctgggacgcattcaaagcagtgtgtagagggaaatttatagcactaaacgtctacaagagaaagcaggaaagatccaaaattgacaccctaacatcacaattaaaagaactagaaaagcaagagcaaacacattcaaaagctagcagaaggcaagaaataactaaaatcagagcagaactgaaggaaatagagacacaaaaaacccttcaaaaaatcaatgaatccaggagctggttttttgaaaggatcaacaaaattgatagaccactagcaagactaataaagaaaaaaagagagaagaatcaaatagacacaataaaaaatgataaaggggatatcaccaccgatcccacagaaatacaaactaccatcagagaatactacaaacacctctatgcaaataaactagaaaatctagaagaaatggatacattcctcgacacatacactctcccaagactaaaccaggaagaagttgaatctctgaatagaccaataacaggctctgaaattgtggcaataatcaatagtttactaaccaaaaagagtccaggaccagatggattcacagccgaattctaccagaggtacaaggaggaactggtaccattccttctgaaactattccaatcaatagaaaaagagggaatcctccctaactcattttatgaggccagcatcattctgataccaaagccgggcagagacacaaccaaaaaagagaattttagaccaatatccttgatgaacattgatgcaaaaatcctcaataaaatactggcaaaccgaatccagcagcacatcaaaaagcttatccaccatgatcaagtgggcttcatccctgggatgcaaggctggttcaatatacgcaaatcgataaatgtaatccagcatataaacagagccaaagacaaaagccacatgattatctcaatagatgcagaaaaagcctttgacaaaattcaacaacccttcatgctaaaaactctcaataaattaggtattgatgggacgtatttcaaaataataagagctatctatgacaaacccacagccaatatcatactgaatgggcaaaaactggaagcattccctttgaaaactggcacaagacagggatgccctctctcaccgctcctattcaacatagtgttggaagttctggccagggcaatcaggcaggagaaggaaataaagggtattcaattaggaaaagaggaagtcaaattgtccctgtttgcagacgacatgattgtttatctagaaaaccccatcgtctcagcccaaaatctccttaagctgataagcaacttcagcaaagtctcaggatacaaaatcaatgtacaaaagtcacaagcattcttatacaccaacaacagacaaacagagagccaaatcatgggtgaactcccattcataattgcttcaaagagaataaaatacctaggaatccaacttacaagggatgtgaaggacctcttcaaggagaactacaaaccactgctcaaggaaataaaagaggagacaaacaaatggaagaacattccatgctcatgggtaggaagaatcaatatcgtgaaaatggccatactgcccaaggtaatttacagattcaatgccatccccatcaagctaccaatgactttcttcacagaattggaaaaaactactttaaagttcatatggaaccaaaaaagagcccgcatcgccaagtcaatcctaagccaaaagaacaaagctggaggcatcacactacctgacttcaaactatactacaaggctacagtaaccaaaacagcatggtactggtaccaaaacagagatatagatcaatggaacagaacagagccctcagaaataacgccgcatatctacaactatctgatctttgacaaacctgagaaaaacaagcaatggggaaaggattccctatttaataaatggtgctgggaaaactggctagccatatgtagaaagctgaaactggatcccttccttacaccttatacaaaaatcaattcaagatggattaaagatttaaacgttagacctaaaaccataaaaaccctagaagaaaacctaggcattaccattcaggacataggcgtgggcaaggacttcatgtccaaaacaccaaaaacaatggcaacaaaagccaaaattgacaaatgggatctaattaaactaaagagcttctgcacagcaaaagaaactaccatcagagtgaacaggcaacgtacaacatgggagaaaattttcgcaacctactcatctgacaaagggctaatatccagaatctacaatgaactcaaacaaatttacaagaaaaaaacaaacaaccccatcaaaaagtgggtgaaggacatgaacagacacttctcaaaagaagacatttatgcagccaaaaaacacatgaagaaatgctcatcatcactggccatcagagaaatgcaaatcaaaaccactatgagatatcatctcacaccagttagaatggcaatcattaaaaagtcaggaaacaacaggtgctggagaggatgtggagaaataggaacacttttacactgttggtgggactgtaaactagttcaaccattgtggaagtcagtgtggcgattcctcagggatctagaactagaaataccatttgacccagacatcccattactggctgcagggccaggttctgcagggttgcggctcagtatggtgggtgcatcaccaccatcagtgacaactggtccaggccatttgctccttatgcatgattatcttgataattggactgctgagaggacagaaagcatttccatgctgctggatcataggctctgctgtaagggaacaagtaattatgcaggcactcaccatgcacacttgaccagcacagcgttgaagaacaggtctcacatttccaccttgttgatgaaagcagcttgg

SEQ ID NO: 128729 - DNA, 1935 bp, Homo sapiens; identical to SEQ ID NO: 124339

SEQ ID NO: 128730 - DNA, 3303 bp, Homo sapiens
atgggagactttaacaccctactgtcagcattagacagatcaacgagacagaaagttaacaaggatattcaggaattgaactcagctctgcaccaagcagacctaatagacatctacagaactctccaccccaaatcaacagaatatacattcttctcagcaccacaccgcacttattccaaaattgaccacttagttggaagtaaagcactcctcaggaaatgtaaaagaacagaaattataacaaactgtctctcagaccacagtgcaatcaaactagaactcaggattaagaaactcactcaaaaccactcaactacatggcaactgaacaacctgctcttgaatgactactgggtacataacgaaatgaaggcagaaataaagatgttctttgaaaccaatgaaaacaaagacacaacataccagaatctctggtatgtcaaagataccagaatctctggtatgctctggtatgtgaaagcagtgtgtagagggaaatttatagcactaaatgcccacaagagaaagcaggaaagatctaaaattgacaccctaacatcacaattaaaagaactagagaagcaagagcaaacacattcaaaaactagcagaaggcaagaaataactaagatcagagcagaactgaaggaaatagagacacaaaaaacccttcaaaaaatcaatgaatgcaggagctggttttttgaaaagatcaacaaaattgatagaccgctagcaagactaattaagaagaaaagagagaagaatcaaatagatgcaataaaaaatgacaaaggggatatcatcaccgatcccacagaaatacaaactaccatcagagaatactataaacacctctacggaaataaactagaaaatctagaagaaatggataaattcctggacacatacaccctcccaagactaaaccaggaagaagttgaatctctgaatagaccaataacaggctctgaaattgaggcaataattaatagcttaccaaccaaaaaaagtccaggaccagatggattcacagccgaattctaccagaggtacaaggaggagctgagaataaaatacctaggaattcaacttacaagggacgtgaaggaccttttcaaggagaactacaaaccactgctcaatgaaataaaagaggatacaaacaaatggaagaacattccatgctcatgggtaggaagaatcaatatcatgaaaatggccatactgcccaaggtaatttatagattcaatgccatccccatcaagctaccaatgactttcttcacagaattggaaaaaactactttaaagttcatatggaaccaaaaaagagcccgcatcgccaagtcaatcctaagccaaaagaacaaagctggaggcatcacgctacctgacttcaaactatactacaaggctacagtaaccaaaacagcatggtactggtaccaaaacagagatacagatcaatggaacagaacagagccctcagaaataatgctgcatatctacaaccatctgatctttgacaaacctgacaaaaacaagcaatggggaaaggattccctatttaataaatggtgctgggaaaactggctagccatatgtagaaagctgaaactggatcccttccttataccttatacaaaaattaattcaagatggattaaagacttaaacgttagacctaaaaccataaaatccctagaagaagacctaggcaataccattcaggacataggcatgggcaaggacttcatgtctaaaacaccaaaagcaatggcaacaaaagccaaaattgacaaatgggatctaattaaactaaagagcttctgcacagcaaaagaaactaccatcagagtgaacaggcaacctacagaatgggagaaattttttgcaatctactcttctgacaaagggctcatatccagaaggtacaatgaactcaaacaaatttacaagaaaaaaacaaacagccccatcaaaaagtggacaaaggatatgaacagacacttctcaaaagaagacatttatgcagccaaaagacacatgaaaaaatgctcatcatcactggccatcagagaaatgcaaatcaaaaccacaatgagataccatctcacaccagttagaatggcgatcattaaaaagtcaggaaacaacaggtgctggagaggatgtggagaaataggaacacttttacactgttgggtggactgttctattattgtcaaggtcccatcttcacttcaagctcatttacagttatcagggaaagaggttgatgtgaactcagaagtccatgttcaggaaatggctgaagttcgtaaagatgatgttgtaacagtgactgaattctaccagacattcaaagaagaattggtaccaatcctattgacactattccgcaagacagagaaagaaggaacactccctaattcatcctatgaagctagcatcaccctaataccaaaaccaggaaaggatacaaccaaaaaagaaaactacaggctgatatccctgatgaacacagacgctaaaattcttaacaaaatactagctaaccgaatccaacaacatatcaaaaagacaatccaccatgatcaagtgggttccataccagggatggagggatggtttaacatatgcaagtcaataaatgtgatacaccacataaacagaattaaaaacaaaaatcacatgatcatctcaatagatgcagaaaaagcattagacaaaatccagcatctctttatgattaaaactctcagcaaaatcggcatacaagggacatacctcaatgtaataaaagccatctatgacaaacccacagctaacataatactgaatggggaaaagttgaaagcattccctctgagaaatgaaacaagacaaggatgccctctctcaccactcctcttcaacacagtactgaaagtcctagccagagcagtcagacaagagaaggaaataaagggtatccaaattggtaaagaggaagtcatactgtcactgtttgctgatgatatgattgtttacctcaaaaaccctaaagactcctctagaaagctcctagaactgataaaaggattcaacaaagtttccagatacaaaattaatgtacacaaatcagtagctcttctaaacaccaacagcaaccaagcagagaatcaaatcaataactcaaccccttttacaatagctgcaaaaaaaaatgaagtacttaggaatatacctagccaaggaggtgaaagacctctacaaggaaaactacaaaacattgctgaaagaaatcatagatga

SEQ ID NO: 128731 - DNA, 3147 bp, Homo sapiens; identical to SEQ ID NO: 124344

SEQ ID NO: 128732 - DNA, 2748 bp, Homo sapiens; identical to SEQ ID NO: 116383

SEQ ID NO: 128733 - DNA, 2745 bp, Homo sapiens
atgaagaagcagcacgccctcactcttcacacgaaacaggaacaccaaggtgtgtttgtgtgcacgcacatgcatgtgtctgaacacatgagtgtctactggaggctggagccagctgtaccaggttcacaggagccagttatgcacatctttttccagctccatgttcagcaacttcatgttggcagcttgaaactgactgtgatgagagtatttatgggactgacctttttttttaggaagtatttagagggcaaagctgaaagcaagatgttggagtgcagggagaagagatcagagcagcctactcactggcaggctaggctccaggaggaaagtcctcaggacctgggagaggtggaccctcatctccaggcccaggaacaggacaggtgctatccatgcttgatgggtttctcagatggtattttgaaaaatggtttgcttctgtgttcaaatgttttgcaaaagaagaagaaaaacaagcaatcctgctggtattttcgactagatgaggaagggaaatgggccctttatgcaggcctgccagaggtatttaaagataacaggaagggggaaaacagttggatgctgatttctcgttggtactatgcatataatagatgttcagtagatgcagttggaggaaggtgtaacaataaaagcaggacatcaagtctagccttcccgcggatcgtaatgaatggaactgcgggagctgtctccgctaaaattaactggaaacaacaacttgatgtggggatctcagggacagtcacacttcacgatgcctcactggcgacctcagggacagtcacacttcacgatgcctcactggcgacctcagggacagtcacacttcacgatgcctcactggcgatctcagggacaatcacgcttcatgataccgcacatcctgtgatggttgagttattacaaagcatcaagaaggcaacaaatttttcagcctctattgagtttgcaggtaacgtaaatgaaagttgggaagtcaaattgtcactgtttgcagatgacatgattgtatatctagaaaaccccattgtctcagcccaaaatctccttaagctgataagcaacttcagcaaagtctcaggatacaaaatcaatgtacaaaaatcacaagcattcttatacaccaatagcagacaaacagagagccaaatcatgagtgaactcccattcacaattgcttcaaagagaataaaatacctaggaatccaccttacaagggatgtgaaggacctcttcaaggagaactacaaaccactgctcaatgaaattaaagaggatacaaacaaatggaagaacattccatgctcgtgggtaggaagaatcaatatcgtgaaaatggccatactgcccaaggtaatttatagattcaatgccatccccatcaagctaccaatgactttcttcacagaattggaaaaaactactttaaagttcatatggaaccaaaaaagaacccgcatcgccaagtcaatcctaagccaaaagaacaaagctggaggcatcacgctgcctgacttcaaactatactacaaggctacagtaaccaaaacagcatggtactggtaccaaaacagagatatagatcaatggaacagaacagagccctcagaaataatgccacatatctacaactatctgatctttgacaaacctgagaaaaacaagcaatggggaaaggattccctatttaataaatggtgctgggaaaacagtctagccatatgtagaaagctgaaactggatcccttccttacaccttatacaaaaatcaattcaagatggattaaagacttaaacgttagacctaaaaccataaaaaccctagaagaaaacctaagcattaccattcaggacataggcacgggcaaggacttcatgtctaaaacaccaatagcaatggcaacaaaagccaaaattgacaaatgggatctcattaaactaaacagcttctgcacagcaaaagaaactaccatcagagtgaacaggcagcccacaaaatgggagaatatttttgcaacctactcatctgacaaagggctaatatccagaatctacaatgaactcaaacaaatttacaagaaaaaaacaaacaaccccatcaaagagtgggcaaaggacatgaacagacacttctcaaaagaagacatttatgcagccaaaaaacacatgaaaaaatgctcaccatcactggccatcagagaaatgcaaatcaaaaccacaatgagatatcatctcacaccagttagaatggcgatcattaaaaagtcaggaaacaacagatgcttgagaggatgtggagaaataggaacacttttacactgttggtgggactgtaaactagttcgaccattgtggaagtcagtgtggcgattcctcagggatctagaactagaaataccatttgacccagccatcccattactggatatacacccaaaggactataaatcatgctgctataaagacacatgcacactggggacaccctgtcctccactcgcccttacctgggaagttgtcctaaggaggatatgccgggcaatgcagtggccactagccagcgtccttggagcactcaaaatgtgggtagtccgaagggagagcaatcgagaaagccttggggaaatgaatgagtacgatccttcttccttcaggcatcaccctgcccatcagcccagccacctacccaactgtccatacgaagttttctaa

SEQ ID NO: 128734 - DNA, 3267 bp, Homo sapiens
atggggaaaaaacagagcggaaaaactggaaactctaaaaagcagagcgcctctcctcctccaaaggaacacagttcctcaccagcaatggaacaaagctggatggagaatgactttgacgagatcaacaaaattgatagactgctagcaagattaataaagaagaaaggagagaagaatcaaatagacacaacaaaaaatgatataggggatatcaccaccaatcccacagaaatacaaactaccatcagagaatactataaacacctctacacaaataaactagaaaatctagaagaaatggataaatttctcgacacatacaccctcccaacaataaaccaggaagaaattgaatctctgaatagaacaataacaggatctgaaattctggcaataatcaatagcttaccaacgaaaaagagtccaggaccagatggattcacagccgaattctaccagaggtacaaggaggagctggtaccattccttctgaaactattccaatcaatagaaaaagagggaatcctccttaactcattttatgaggccagcatcatcctgataccaaagccgggcagagacacaaccaaaaaagagaattttagaccaatatccttgatgaacattgatgcaaaaatcttcaataaaatactggcaaaccgaatccagcagcacatcaaaaagcttatccaccatgatcaagtgggcttcatccctgggatgcaaggctggttcaatatacgcaaatcaataaatgtaatccagcatgtaaacagaaccaaagacaaaaaccgcatgattatctcaatagatgcagaaaaggcctttgacaaaattcaacaacccttcatgctaaaaactctcaataaattaggtattgatgggacgtatctcaaaataataagagctatctatgacaaacacacagccaatatcatactgaatgggcaaaaactggaagcattccctttgaaaactggcacaagacagggatgccctctctcaccactcctattcaacatagtgttggaagttctggccagggcaattaggcaggagaaggaaataaagggtattcaattaggaaaagaggaagtcaaattgtccctgtttgcagatgacatgattatatatctagaaaaccccatcgtctcagcccaaaatctccttaagctgataagcaactttagcaaagtctcaagatacaaaatcagtgtacaaataccacaagcattcttatacaccaataacaggcaaacagagagccaaatcatgagtgaactcccattcacaattgcttcaaagagaataaaatacctaggaatccaacttacaagggatgtgaaggacctcttcaaggagaactacaaaccactgctcaatgaaataaaagaggatacaaagaaatggaagaatattccatgctcatgggcaggaagaatcaatatcgtgaaaatggccatactgcccaagaattggaaaaaaactactttaaagttcatatggaaccaaaaaagagcccgcatcgccaagtcaatcctaagccaaaagaacaaagctggaggcatcacgctacctgacttcaaactatactacaaggctacagcaaccaaaacagcatggtactggtaccaaaacagagatctagatcaatggaacagaacagagccctcagaaataacaccacatatctacaactatctgatctttgacaaacctgacaaaaataagcaatggggaaaggattccctatttaataaatggtgctgtgaaaactggctagccatatgtagaaagctgaaactggatcccttccttacaccttatacaaaaattaattcaagatggattaaagacttaaacattagacctaaaaccataaaaaccctagaagaaaacctaggcattaccattcaggacataggcatgggcaaggacttcatgtctaaaacaccaaaagcaatggcaacaaaagccaaaattgacaaatgggatctaattaaacaagagagcttctgcacagcaaaagaaactaccatcagagtgaacaggcaacctacaaaatgggagaaaattttcgcaacctactcatctgacaaagggctaatatccagaatctacagtgaactcaaacaaatttacaagaaaaaaacaaacaaccccatcaaaaagtgggcgaaggacatgaacagacacttctcaaaagaagacatttatgcagccaaaaaacacatgaaaaaatgcccatcatcactggccatcagagaaatgcaaatcaaaaccacaatgagataccatctcacaccagttagaatggccatcattaaaaagtcaggaaacaacaggtgctggagaggatgtggagaaataggaacacttttacactgttggtgggactgtaaactagttcaaccattgtggaagtcagtgtggcgattcctcagggatctagaactagaaataccatttgacccagccatcccattactgggcatacacccaaaggactataaatcatgctgctataacgacacatgcacacctgttatctctggtctgaaggtacttaagaaagtagctgagcccctcagtccaggccatggtctcatggtcagtcttgcagtcttgtccccatttctgcttcctggggcaacggaaagtaagaccgccataggaatgttggaatttctggttctggaagtggggccatcggcaatgaaaatctgcatgaagcagggaggaatttgtgctggagtagtgccccaaatccaaggtatactggacttaaaagtccttgaaatttctctgcaacttgcttcagcttctttgttttaccacaatgctctcctcaactactgttttagcaattcagtgtcaggaatggaattaagagacacagggtcacatgtggtatctgcaaaaagcaacaccacaaaaacgcatacacagggagaggggcccagagaatcttgggtgtggcagggtcaaagtagcagtttctgggacattgttcttcagtttggctttcaagaagccctttcagctgaagtaggaaattccacatttattcttattttcccgcctatccctcctatccctttgaccagtggttctcagtgtgatcactggagccacaccatcactattccttgcgaacttgatagaaatgtaaattctctggctctatcccagacccatggaaacagaaactctgagctccttccatcaaaaagtggaatccagttgtctacccttcacaactga

SEQ ID NO: 128735 - DNA, 2985 bp, Homo sapiens; identical to SEQ ID NO: 121567

SEQ ID NO: 128736 - DNA, 3105 bp, Homo sapiens; identical to SEQ ID NO: 128668

SEQ ID NO: 128737 - DNA, 1443 bp, Homo sapiens
atggccagtaaacaggaatttgagaaatttgtgttgttgttattgccaaaaccatttatcttcatggagtcatctgagttctccacaagcaaagatggatggagaagtaaaagaaaagccatgggtgccatagctgagaggaagagcaagaatgaacagaatggtgatgggaagaagacactggagcccttcccagcagaatccaatggggaagaagagacaagggtcttgaattactttccatcccatttgtacagagtcagaactgaattggaaaaaactactataaagttcatatggaaccaaaaaagagcccatattgcaaagtcaatcctaagccaaaagaacaaagctggaggcatcacgctacctgacttcaaactatactacaaggctacagtaaccaaaacagcatggtacttgtaccaaaacagagatatagaccaatggaacagaacagagccctcagaaataatgctgcatatgtacaactatttgatctttgacaaacctgacaaaaacaagcaatggggaaaggattccctatttaataaatggtgccgggaaaactggctagccatatatagaaagctgaaactggatcccttccttacaccttatacaaaaattaatttaatgtggattaaagacttacatgttagaccgaaaaccatagaaaccctagaagaaaacctaggcaataccattcaggacataggcatgggcaaggacttcatgtctaaaacaccaaaagcaatggcaacaaaagccaaaattgacaaatgggatctaattaaactaaagagcttctgcacagcagaagaaaccaccatcagagtgaacaggcaacctacagaatgggagaaaatttttgcaatctactcatctgacaaagggctaatatccagaatctacaatgaactccaacaaatttacaagaaaaaaacaaacaaccccatcaaaaagtgggcaaaggatatgaacagacacttctcaaaagaagacatttatgcagccaaaagacacatgaaaaaatgctcatcatcactggccatcagagaaatgcaaatcaaaaccacaatgagataccatctcacaccagttagaatggcgatcattaaaaagtcaggaaacaacaggtgctggagaggatgtggagaaataggaacacttttatatggttggtgggactgtaaactagttcaaccattgtggaagacagtgtggcgattcctcaaggatctagaactagaaatagcatttgacccagccatcccattactgggtatatacccaaaggattataaatcatgctgctatcaagacacgtgcacaccagaggagcctcagcccacggccatcaccaacacaggcccatggggagtactgccaggcttccaccaatgttcatttaaagcccaagtgctctttagtcagcttatg

SEQ ID NO: 128738 - DNA, 3726 bp, Homo sapiens; identical to SEQ ID NO: 124355

SEQ ID NO: 128739 - DNA, 1841 bp, Homo sapiens
aaccaatgacaaaaaccacatgattacctcagtagatggagaaaaggcctttgacaaaattcaacagcccttcatgctaaaaactctcaataaactagtgttggaagttctggccagggcaatcaggcaagagaaaggaataaagggtattcaattaggaaaagaggaagtcaaattgtccctgtttgcagatgacatgattgtatatttagaaaaccccatcgtctcagcccaaaatctccttaagctgataagcaacttcaacaaagtctcaggatacaaaatcaatgtgcaaaaatctcaagcattcgtatacaccaataacagacaaacagagagccaaatcatgagtgaactcccattcacaattgcttcaaagagaataaaatacctaggaatccaacttacaagggacgtgaaggacttctttaaggagaactacaaaccactgctcaacgaaataaaagaggacacaaacaaatggaagaaaattccatgctcatgggtaggaagaatcaatattgtgaaaatggccatactgcccaaggtaatttatagattcaatgccatccccatcaagctaccaatgactttcttcacaaaattggaaaaaactactttaaagttcatatggaaccaaaaaagagcccacattgccaagacaatcctaagccaaaagaacaaagctggaagcatcgcgctacctgacttcaaactatactggaaggccacagtaaccaaaacagcgtggtattggtaccaaaacagagatatagatcaatggaacagaatagagccctcagaaataataccacatatctacaaccatctgatctttgacaaacctgacaaaaacaagaaatggggaaaggattccctatttaataaatggtgctgggaaaactggctagccatatgtagaaagctgaaactggatcccttccttacaccttatacaaaaattaattcaagatggattaaagacttaaatgttagacctaaaaccataaaaaccctagaagaaaacctaggtaatactattcaggccatgggcatgggcaaggacttcatgactgaaacaccaaaagcaatggcaacaaaagccaaaattgacaaatgggatctaattaaactaaagagcttctgcacagcaaaagaaactaccatcagagtgaacaggcaacctacagaatgggagaaaatttttacaatctacccatctgacaaagggctaatatccagaatctacaatgaactcaaacaaattaacaagaaaaaatcaaacaatcccatcaataagtgggcaaaggatatgaacagacgcttctcaaaagaagacatttatgcagccaacagacacatgaaaaaatgctcatcatcactggccatcagagaaatgcaaatcaaaaccacaatgagataccatctcacaccagttagaatggcgatcattaaaaagtcaggaaacaacaggtgctggagagcatgtggagaaataggaacggttggatataaaaacgatagacaagaaacacaacgaacaaggaaattacataatatcttagaggataagccctatggggaaataaatcaaattttccttcaagttggacagcggaagaatggatatgcaagacctcaaaaaagttgccttccatgtaacattttccagtatgtgttccagaaaaaaatgaaagagaaaaccaagaaagagaaaaaatggaatctaggaaacacaagaattaagccagagaaaggcaaagaaaacatgggaggaacagttcttcccccttcctctcccatcatctgggttgaatatgagccaccagtatcatccccca

SEQ ID NO: 128740 - DNA, 744 bp, Homo sapiens
atggctggttatgaacaacagaggcaaagtagccagaggggggctgacttaatttggactggcaggagcagagtgcaggccctggtggagagccagcaagaaagcaggacttactcctacaaccacaaagaactaagtcccaccaacaatctgaatgaacttggaaacaaattctctctccaagccagaaaggaagtgctcagtcatccttggtgttctcatgatggaaaagtggtactgacggctgagaccttccaagataggcacaaaactgggcagaagtgggcctcaacgcccattctggctgcacttaaggagctcttcagcccgccgctgcaccgtggtagcccttctctgggctggccgaggccggagccggctccctccacttgcggggaggtgtggagggagacgcaccggctggaactggggctgcgcacggcgcttgcgggccacttagagttccgggccccggggtgtgatgttacccttcctgttacatggctgcagcaagagagaatgagagagaagcgaaagcataaaccccttataaaaccatcagatctcatgagacttacttactaccataagaatgccaacagacgtgaaaaaatgctcatcatcgctggccatcagagaaatgcaaatcaaaaccacaaatgtgatatcatctcacaccagttagaatgccgatcattaagaagtcaggaaacaacaggtgctggagaggatgtggagaaatag

SEQ ID NO: 128741 - DNA, 3591 bp, Homo sapiens
atggaggaagatctaccaagcaaatggaaaacaaaaaaaggcaggggttgcaatcctagtctcgataaaacagactttaaaccaacaaagatcaaaagagacaaagaaggccattacataatggtaaagggatcaattcaacaagaggagctaactatcctaaatatttatgcacccaatacaggagcacccagattcataaagcaagtcctgagtgacctacaaagagacttagactcccacacattaataatgggagactttaacaccccactgtcaacattagacagattaatgagacagaaagtcaacaaggatacccaggaattgaactcagctctgcaccaagtggacctaatagacatctacagaactctccaccccaaatcaacagaatatacatttttttcagcaccacaccacacctattccaaaattgaccacatacttggaagtaaagctctcctcagcaaatgtaaaagaacagaaattataacaaactatctctcagaccacagtgcaatcaaactagaactcaggattaagaatctcactcaaagccgctcaactacatggaaactgaacaacctgctcctgaatgactactgggtacataacgaaatgaaggcagaaataaagatgttctttgaaaccaacgagaacaaagacaccacataccagaatctctgggacgcattcaaagcagtgtgtagagggaaatttatagcactaaatgcctacaagagaaagcaggaaagatccaaaattgacaccctaacatcacaattaaaagaactagaaaagcaagagcaaacacgttcaaaagctagcagaaggcaagaaataactaaaatcagagcagaactgaaggaaatagagacacaaaagacccttcaaaaaatcaatgaatccaggagctggttttttgaaaggatcaacaaaattgatagaccgttagcaagactaataaagaaaaaaagagagaagaatcaaatagacacaataaaaaatgataaaggggatatcaccactgatcccacagaaatacaaactaccatcagagaatactacaaacacctctacgcaaataaactagaaaatctagaagaaatggatacattcctcgacacatacactctcccaagactaaaccaggaagaagttgaatctctgaatagaccaataacaggatctgaaattgtggcaataatcaatagtttaccaaccaaaaagagtccaggaccagatggattcacagccgaattctaccagaggtacaaggaggaactgcatataaacagagccaaagacaaaaaccacatgattatctcaatagatgcagaaaaagcctttgacaaaattcaacaacccttcatgctaaaaactctcaataaattaggtattgatgggacgtatttcaaaataataagagctatttatgacaaacccacagccaatatcatactgaatgggcaaaaactggaagcattccctttgaaaactggcacaagacagggatgccctctctcaccgctcctattcaacatagtgttggaagttctggccagggcaatcaggcaggagaaggaaataaagggtattcaattaggaaaagaggaagtcaaattgtccctgtttgcagacgacatgattgtttatctagaaaaccccatcgtctcagcccaaaatctccttaagctgataagcaacttcagcaaagtctcaggatacaaaatcaatgtacaaaaatcacaagcattcttatacaacaacaacagacaaacagagagccaaatcatgagtgaactcccattcacaattgcttcaaagagaataaaatacctaggaatccaacttacaagggatgtgaaggacctcttcaaggagaactacaaaccactgctcaaggaaataaaagaggacacaaacaaatggaagaacattccgtgctcatgggtaggaagaatcaatatcgtgaaaatggccatactgcccaaggtaatttacagattcaatgccatccccatcaagctaccaatgactttcttcacagaattggaaaaaactactttaaagttcatatggaaccaaaaaagagcccgcatcgccaagtcaatcctaagccaaaagaacaaagctggaggcatcacactacctgacttcaaactatactacaaggctacagtaaccaaaacagcatggtactggtaccaaaacagagatatagatcaatggaacagaacagagccctcagaaataatgccgcatatctacaactatctgatctttgacaaacctgagaaaaacaagcaatggggaaaggattccctatttaataaatggtgctgggaaaactggctagccatatgtagaaagctgaaactggatcccttccttacgccttatacaaaaatcaattcaagatggattaaagatttaaacattagacctaaaaccataaaaaccctagaagaaaacctaggcattaccattcaggacataggcgtgggcaaggacttcatgtccaaaacaccaaaagcaatggcaacaaaagccaaaattgacaaatgggatctaattaaactaaagagcttctgcacagcaaaagaaactaccatcagagtgaacaggcaacctacaacatgggagaaaattttcgcaacctactcatctgacaaagggctaatatccagaatctacaatgaactcaaacaaatttacaagaaaaaaacaaacaaccccatcaaaaagtgggcaaaggacatgagcagacacttctcaaaagaagacatttatgcagccaaaaaacacatgaaaaaatgctcatcatcactggccatcagagaaatgcaaatcaaaaccactatgagatatcatctcacaccagttagaacggcaatcattaaaaagtcaggaaacaacaggtgctggagaggatgtggagaaataggaacacttttacactgttggtgggaccgtaaactagttcaaccattgtggaagtcagtgtggcgattcctcagggatctagaactagaaataccatttgacccagccatcccattactgggtatatacccaaaggactataaatcatgctgctataaagacacatgcacacacctttcaggatcctcagacgctcctggcatctgggagctgctagttggaggggccagtgactgtacccatttgctggacgtcaagcatgatgtttgcatcttgggttccctatgtgatttcacccttgcagcaattttgcaagctgagcagaacagtaaggcactaattctgcggggttggcttcgatggacttcaggttctgtgcaacgctggcccaagctgctcagagccatggtgctcagcggagtgtgtacactcctcctgtgggctgaggacgcgccacggtcccagcacagcacagtgcatgctgtgaaactaagacttgaacgtcagtggaaggtcagtgctgaagctgagtccaagcggccacgaatcgtaaaaatgtccagaggaattcagcactcctctaggagaattatgcaacaggaaaacccaatggacccaaatcaattcagcaactttttttaa

SEQ ID NO: 128742 - DNA, 5569 bp, Homo sapiens
atgaaggcagaaataaagatgttctttgaaaccaacgagaacaaagacacagcataccagaatctctgggacgcattcaaagcagtgtgtagagggaaatgtatagcactaaatgcccacaagagaaagcaggaaagatccaaaattgacaccctaacatcacaattaaaagtactagaaaagcaagagcaaacacattcaaaagctagcagaaggcaagaaataactaaaatcagagcagaactgaaggaaatagagacacaaaaaacacttcaaaaaatcaatgaatccaggagctgtttttttgaaagcatcaacaaaattgatagaccactagcaagactaataaagaaaaaaagagagaagaatcaaatagacacaataaaaaatgataaaggggatatcaccaccgatcccacagacatacaaactaccatcagagaatactacaaacacctctacgcaaataaactagaaaatctagaagaaatggataaattcctcgacacatacactctcccaagactaaaccaggaagaagttgaatctctgaatagaccaataacaggagctgaaattgtggcaataatcaatagtttaccaaccaaaaagagtccaggaccagatggattcacagccgaattctaccagaggtacaaggaggaactggtaccattccttctgaaactattccaatcaatagaaaaagagggaatcctccctaactcattttatgaggccagcatcattctgataccaaagccgggtagagacacaaccaaaaaagagaattttagaccaatatccttgatgaacattgatgcaaaaatcctcaataaaatactggcaaaccgaatccagcagcacatcaaaaagcttatccaccatgatcaagtgggcttcatctctgggatgcaaggctggttcaatatacgcaaatcaataaatgtaatccagcatataaacagagccaaagacaaaaaccacatgattatctcaatagatgcagaaaaagcctttgacaaaattcaacaacccttcatgctaaaaactctcaataaattagtgttggaagttctggccagggcaatcaggcaggagaaggaaataaagggtattcaattaggaaaagaggaagtcaaattgtccctgtttgcagacgacatgattgtttatctagaaaagcccatcgtctcagcccaaaatctccttaagctgataagcaacttcagcatagtctcaggatacaaaatcaatgtacaaaaatcacaagcattcttatacaccaacaacagacaaacagagagccaaatcatgagtgaactcccattcacaattgcttcaaagagaataaaatacctaggaatccaacttacaagggatgtgaaggacctcttcaaggagaactacaaaccactgctcaaggaaataaaagaggacacaaacaaatggaagaacattccatgctcatgggtaggaagaatcaatgtcatgaaaatggccatactgcccaaggtaatttacagattcaatgccatccccatcaagctaccaatgactttcttcacagaattggaaaaaactactttaaagttcatatggaaccaaaaaagagcccgcatcgccaagtcaatcctaagccaaaagaacaaagctggaggcatcacactacctgacttcaaactatactacaagtctacagtaaccaaaacagcatggtactggtaccaaaacagagatatagatcaatggaacagaacagagccctcagaaataacgccacatacctacaactatctgatctttgacaaacctgagaaaaacaagcaatggggaaaggattccctatttaataaatggtgctgggaaaactggctagccatatgtagaaagctgaaactggatcccttccttacaccttatagaaaaatcaattcaagatggattaaagatttaaacgttagacctaaaaccataaaaaccctagaagaaaacctaggcattaccattcaggacataggcgtgggcaaggacttcatgtccaaaacaccaaaagcaatggcaaccaaagccaaaattgacaaatgggatctaattaaactaaagagcttctgcacagcaaaagaaactaccatcagagtgaacaggcaacctacaaaatgggagaacattttcgcaacctactcatctgacaaagggctaatatccagaatctacaatgaactcaaacaaatttacaagaaaaaaacaaacaaccccatcaaaaagtgggtgaaggacatgaacagacacttctcaaaagaagacatttatgcagccaaaaaatacatgaaaaaatgctcatcatcactggccatcagagaaatgcaaatcaaaaccactatgagatatcatctcacaccagttagaatggcaatcattaaaaagtcaggaaacaacaggtgctggagaggatgtggagaaataggaacacttttacactgttggtgggactgtaaactagttcaaccattgtggaagtcagtgtggcgattcctcagggatctagaactagaaataccatttgacccagccatcccattactgggtatatacctaaaagattataaatcatgctgctataaagacacatgcacacgatctcatccaggataccacattgcatttagtcatcaggtcttcttaggctttgctaacattttcctcattttggatgaccttgaaagttctgagtactggtcaggcctatgcatgctttgtgatgaatttgtagccacagtgcagtgcttgggcgaaaagacatatgcccagtgtggattggcagcagatggtgctcatcagaatgcattgaacagtaatccaagccctcatgaagccatcattagcaaagcctttcctactgatggtgtgggccctgcccatgggggcgtgggacctgttgcatggatgatctggtttgtaggagagccagagaggtggcaggagtctcagactggaagccccaccctgagggatggtctggcagacaggccatccttgaagggcagcagccagcagccccaggcagagggagagaaaaaagaagcagcacagacacctgtagaaatagcactaatttggcctgatttaaattcaggtgctaacttgtggcagtcctgtgaatgtcaggctcagggcctgaggagttgcttgtggcctcactcacagggaaggcatgcatctgatggaagaactcagccacagccaaccccagcagtagaacccactctggaggtcaagggctccttgagggcagggacttactgcatggtagaccctgagcagcctgtcctccagggcaggagagaatgcagcacatggctattggagtccaagtcattcacctgctggttatttgacagggacttcctgagtgcctactcgagagaaacagaaccaatagagggtgtgtgtgtggacagaaaaagggagagggagagggagagggaaattgtattgaaggaattggctgatgcagttatagcagctggaaagtccaacatctgcagggttccacttcttggaccacctgcagggccatctcacagcattgtgaacattccttcaggctcctatttggggaaggagaaccttgtgggaaaatgtgccctgaatgtgagtgtgaatgtgaatgtgcaatttattgctgatgtggtagatgggactgaggcaaaaggacctggtggagaatggaaaagaaccagtgacaaaaaccacgatttctcaatagacgccaaaaaggccttcggcaaaattcaacaacgcttcatgctaaaagcactcaataaactaggtattgatggaacatatctcaaaataataagagctatctatgacaaacccacagcaaatatcataccgaatgggcaaaaactggaagcattccctttgaaaactggcacaacacagggatgccctttctcaccactcctattcaacatagtgttggaagttctggccagggtaatcaggcaggagaaggaaataaagggtactcaattaggaaaagaggaagtcacattgtccctgtttgcagatgacatgattgtatatctacaaaaccccattgtctcagcccaaaatctccttaagctgataggcaacttcagcaaagtctcaggatacaaaatcaatgtgcaaaaatcacaagcattcttatacaccaataacagacaaacagagagccaaatcatgagtgaactcccattcacaattgcttcaaagagaataaaatacctaggaatccaacttacaagggacgtgaaggacctcttcaaggagaactacaaaccactgctcaaggagataaaagaggatacaaacaaatggaagaacattccatgctcatgggtaggaagaatcaatatcgtgaaaatggccatactgcccaaggtaatttatcgattcaatgccatccccatcaagctaccaatgactttcttcacagaattggaaaaaactactttaaagttcaaatggaaccaaaaaagagcctgcattgccaagtcaatcctaagccaaaagaacaaagctggaggcatcatgctacccgacttcaaactatactacaaggctacagtaatcaaaacagcatggtactggtaccaaaacagagatatagaccaatggaacagaacagagccctcagaaataatgccgcatatctacaactatctgatcttcgacaaacctgaccaaaacaagcaatggggaaaggattccctatttaataaatggtactgggaaaactgcctagccatatgtagaaagctgaaactagatcccttccttacaccttatacaaaaattaattcaagatggattaaagacttaaatgttagacttaaaaccataaaagccctagaagaaaacctaggcaataccattcaggacataggcatgggcaaggacttcatgtctaaaacaccaaaagcaatggcaacaaaagacaaaattgacaaatgggatctaattaaaccaaagagcttctgcacagcaaaagaaactaccatcagagtgaacaggcaacctacaaaatgggagaaaattttcgcaacctactcatctgacaaagggctaatatccagaaactacaatgaactcaaacaaatttacaagaaaaaaacaatcggccccatcaaaaagtgggcagaggatatgaacaggcacttctcaaaagaagacacttatgcagccaaaaaacacatgaaaaaatgctcatcatcactggccatcagagaaatgcaaatcaaaaccacaatgagataccatctcacaccagttagaatggtgatcattaaaaagtcaggaaacaacaggtgctggagaggatgtggagaaacaggaacactttcacactgttggtgggactgtaaactaatcaaccattgtggaatttttgagagattaaggaccgaagactggtggggactcataaatgatacaagtaaagtattagccacaacagaagaaaaaggggtgcccaaacgcataatcttgaaatttgatgtctgtgctgtcattaatagca

SEQ ID NO: 128743 - DNA, 8177 bp, Homo sapiens
atgaatgaaatgaagcgagaagagaagtttagagaaaaaagaataaaaagaaacgaacaaagcctccaagaaatatgggactatgtgaaaagaccaaatctatgtctgattggtgtacctgaaagtgacggggagaatggaaccaagttggaaaacactctgcaggatattatccaggagaacttccccaatctagcaaggcaggccgacattcaaattcaggaaatacagagaacaccacaaagatactcctcgagaagagcaactccaagacacataattgtcagagtcaccaaagttgaaatgaaggaagaaatgttaagggcagccagagagaaagaaatacaaactaccatcagagaatactataaacacctctatgcaaataaactagaaagtctagaagaaatggataaattcctcaacacatacacctttccaagactaaaccacgtagaagttgaatctctgaatagaccaataacaggctctgaaattgaggcaataattaatagcttaccaacaaaaaaaagtccaggaccagatggattcacagccgaattctaccagaggtacaaggaggagcaggtaccattcattctgaaactattccaatcaatagaaaaagagggaatcctccctaactcattttatgaggccagcatcatcctgataccaaagccgggcagagacacaaccaaaaaagagaattttagaccaatatctttgatgaatattgacgcaaaaatcctcaataaaatactggcaaaccgaatccaggaacacatcaaaaagcttatccaccatgatcaagtgggcttcatccctgggatgcaaagctggttcaacatacaaaaatcaataaatgtaatccagcatataaacagaaccaaagacaaaaaccgcatgattatctcaatagatgcagaaaaggcctttgacaaaattcaacaacccttcatgctaaaaactctcaataaattaggtattgatgggacgtatctcaaaatagtaagagctatctatgacaaacccacagccaatatcatactgaatgggcaaaaactggaagcattccctttgaaaactggcacaagacagggatgccctctctcaccactcctattcaacatagtgttggaagttctggccagggcaattaggcaggagaaggaaataaagggtattcaattaggaaaagaggaagtcaaattgtccctgtttgcagatgacatgactctgtatctagaaaaccccattgtctcagcccaaaatctccttaagctgataagcaacttcagcaacatctcaggatacaaaattaatgtacaaaaatcacaagcattcttatacaccaacaacagacaaacagagagacaaatcatgagtgaattcccattcacaattgcttcaaagggaataaaatacctaggaatccaacttacaaggtatgtgaaggacctcttcaagaagaactacaaaccactgctcaatgaaataaaagaggatacaaacaaatggagtaacattccatgctcatgggtaggaagaatcaatattgtgaaaatggccatactgcccaaggtaatttacagattcaatgccatccccatcaagctaccaatgactttcttcacagaattggaaaaaactactttaaagttcatatggaaccaaaaaagagcccgcatcaccaagtcaatcctaagccaaaagaacaaagctggaggcatcacactacctgacttcaaactatactacaaggctacagtaaccaaaacagcatggtactggtaccaaaacagagatatagatcaatggaacagaacagagacctcagaaataatgccacgtatctacaactatctgatctttgacaaacctgagaaaaacaagccatggggaaaggattccctatttaataaatggtgctgggaaaactggctagccatatgtagaaagctgaaactggatccctttcttacacgttatacaaaaattaattcaagatggattaaacacttacatgttagacctaaaaccataaaaaccctagaagaaaacctaggcattaccattcagggcataggcatgggcaaggacttcatgtctaaaacaccaaaagcaatggaaacaaaagccaaaattgacaaatgggatctaattaaactaaagagcttctgcacagcaaaagaaactaccatcagagtgaacaggcaacctacaaaatgggagaaaatttttgcaagctactcatctgacaaagggctaatatccagaatctacaatgaactgagacaaatttacaagaaaaaatcaaacaaccccatcaaaaagtgggtgaaggatatgaacagacacttctcaaaagaagacatttatgcagctaaaaaacacatgaaaaaatgctcatcatcactggccatcagagaaatgcaaatcaaaaccacaatgagataccatctcacaccagttagaatggcgatcattaaaaagtcaggaaacgacaggtgctgtagaggatgtggagaaataggaacacttttacactgttggtgggactgtaaactagttcaaccattgtggaagtcagtgtggcgattcctcagggatctagaactagaaataccatttgacccagccatcccattactgggtatatacccaaacgactataaatcatgctgctataaagacacatgcacattgagtctaccagaaatccgcaactgcccaacgaaaagtgtcccagtccccttctctgttgatgaaactcagtatcatgttgaagatactagtcctgtaagctggcaagtaaaagttctaggcaagcatatacatcagggaagcagctatgaagatgtttggctgcctcagcgcatgcaaggaaaactaacaaacagaaaggacatccacaccaaaaacccatctgtacatcaccatcatcaaagaccaaaagtagataaaaccacaaagatggggaaaaaacagaacagaaaaactggaaactctaaaaagcagagcgcctctcctcctccaaaggaacgcagttcctcaccagcaatgcaacaaagctggacggagaatgactttgacgagctgagagaagaaggcttcagacgatcaaattactctgagctacgggaggacattcaaaccaaaggcaaagaagttgaaaactttgaaaaaaatttagaagaatgtataactagaataaccaatacagagaagtgcttaaaggagctgatggagctgaaaaccaaggctcgagaactacgtgaagaatgcagaagcctcaggagccaatgcgatcaactggaagaaagggtatcagcaatggaagatgaaatgaatgaaatgaagcaagaagggaagtttagagaaaaaagaataaaaagaaacgagcaaagcctccaagaaatatgggactatgtgaaaagaccaaatctacgtctgattggtgtacctgaaagtgatgcggagaatggaaccaagttggaaaacactctgcaggatattatccaggagactttccccaatctagcaaggcaggccaacgttcagattcaggaaatacagagaacgccacaaagatactcctcgagaagagcaactccaagacacataattgtcagattcaccaaagttgaaatgaaggaaaaaatgttaagggcagccagagagaaaggtcgagttaccctcaaagggaagcccatcagactaacagcggatctctcggcagaaaccctacaagccagaagagagtgggggccaatattgaacattcttaaagaaaagaattttcaacccagaatttcatatccagccaaactaagcttcataagtgaaggagaaataaaatactttacagacaagcaaatgctgaccgattttgtcaccagcaggcctgccctaaaagagctcctgaaggaagcgctaaacatggaaaggaacaaccggtaccagccactgcaaaatcatgccaaaatgtaaagaccatcgagactaggaagaaactgcatcaactaacgagcaaaatcaccagctaacatcataatgacaggatcaaattcacacataacaatattaactttaaatgtaaatggactaaattctccaattaaaagacacagactggcaagttggataaagagtcaagacccatcagtgtgctgtattcaggaaacccatctcatgtgcagagacacacataggctcaaaataaaaggatggaggaagatctaccaagcaaatggaaaacaaaaaaaggcaggggttgcaatcctagtctctgataaaacagactttaaaccaacaaagatcaaaagagacaaagaaggccattacatgatggtaaagggatcaattcaacaagaggagctaactatcctaaatatgtatgcacccaatacaggagcacccagattcataaagcaagtcctgagtgacctacaaagagacttagactcccacacattaataatgggagactttaacaccccactgtcaacattagacagatcaacgagacagaaagtcaacaaggatacccaggaattgaactcagctctgcaccaagcagacctaatagacatctacagaactctccaccccaaatcaacagaatatacatttttttcagcaccacaccacagctattccaaaattgaccacatacttggaagtgaagctctcctcagcaaatgtaaaagaacagaaattataacaaactatctctcagaccacagtgcaatcaaactagaactcaggattaagaatctcactcaaagccgctcaactacatggaaactgaacaacctgctcctgaatgactactgggtacataacgaaatgaaggcagaaataaagatgttctttgaaaccaacgagaacaaagacacaacataccagaatctctaggacgcattcaaagcagtgtgtagagggaaatttatagcactaaatgcccacaagagaaagcaggaaagatccaaaattgacaccctaacatcacaattaaaagaactagaaaagcaagagcaaacacattcaaaagctagcagaaggcaagaaataactaaaatcagagcagaactgaaggaaatagagacacaaaaaacccttcaaaaaatcaatgaatccaggagctggttttttgaaaggatcaacaaaattgatagaccgctagcaagactaataaagaaaaaaagagagaagaatcaaatagacacaataaaaaatgataaaggggatatccaccaccgatctcacagaaatacaaactaccatcagggaatactacaaacacctctacgcaaataaactagaaaatctagaagaaatggataaattcctcgacacatacactctcccaagactaaaccaggaagaagttgaatctctgaatagaccgataacaggagctgaaattgtggcaataatcaatagcttaccaaccaaaaggagtgcaggaccagatggattcacagctgaattctaccagaggtacaaggaggaactggtaccattccttctgaaactattccaatcaatagaaaaagagggaatcctccctaactcattttgtgaggccagcatcattctgataccaaagccaggcagagacacaacaaaaaaagagaattttagaccaatatccttgatgaacattgatgcaaaaatcctcaataaaatactggcaaaacgaatccagcagcacatcaaaaagcttatccaccatgatcaagtgggcttcatccctgggatgcaaggctggttcaatatacgcaaatcaataaatgtaatccagcatatcaacagagccaaagacaaaaaccacatgattatctcaatagatgcagaaaaggcctttgacaaaattcaacaacacttcatgctaaaaactctcaatagattaggtattgatgggacgtatttcaaaataataagagctatctatgacaaacccacagccaatatcatactgaatgggcaaaaactggaagcattccctttgaaaactggcacaagacaaggatgccctctctcaccactcctattcaacatagtgttggaagttctggccagggcaattaggcaggagaaggaaataaaaggtattcaattaggaaaagaggaggtcaaattgtgcctgtttgcagacgacatgattgtgtatctagaaaaccccattgtctcagcccaaaatctccttaagctgataagcaacttcagcaaagtctcaggatacaaaatcaatggacaaaaatcacaagcattcttatacaccaacaacagacaaacagagagccaaatcatgagtgaactcccattcacaattgcgtcaaagagaataaaatacctaggaatccaacttacaagggatgtgaaggacctcttcaaggagaactacaaaccactgctcaacaaaataaaagaggatacaaagaaatggaagaacattttcattccatgcttatgggtaggaagaatcaatatcgtgaaaatggccatactgcccaagggaatttatagattcaatgccatccccatcaagctaccaatgactttcttcacagtactggaaaaaactactttaaagttcatatggaaccaaaaaagagcccgcattgccaagtcaatcctaagccaaaagaacaaagctggaggcatcacgctacctgacttcaaactattctacaaggctacagtaaccaaaacagcacggtactggtaccaaaatggagatatagatcaatggaatggaagagaccccttagaaataacgccacatatctacaactatctgatcttcgacaaacctgagaaaaacaagcaatggggaaaggattccctatttaataaatggtgctgggaaaactggctagccatatatggaaagctgaaaatggatcccttccctacaccttatacaaaaattaattcaagatggattaaagacttaaactttagacctaaaaccataaaaaccctagaagaaaacctaggcattaccattcaggacataggcatgggcaaggactttatgtctaaaacaccaaaagcaatggcaacaaaagccaaaattgacaaatgggatctaattaaactaaatagcttctgcacagcaaaagaaactaccatcagagtgaacaggcaacctacagaatgggagaaaatttttgcaatctactcatctgacaaagggctaatatccagaatctacaatgaactcaaacaaatttacaagaaaaaagcaaacaaccccatcaaaaagtgggcaaaggacatgaacagacactcctcaaaagaagacatttacgcagccaaaaaacacatgaaaaaatgctcatccatcattggccatcagagaaatgcaaaatcaaaaccacaaatgagataccatctcacaccagttagaatggcaatcattaaaaagtcaggaaacaacaggtgcttggagaggatgtggagaaataggaacacttttacacttgttggtgggacatgtaaactagttcaaccattgtggaagtcagtgtggcgattcctcagggatctagaactagaaataccatttgacccagccatcccattactgggtatatacccaaaggactataaatcatgctgctataaagacacatgcacacgtttgtttattgtggcattattcacacaatagcaaagacttggagccaacccaaatgtccaacaatgatagactggattaagaaaatgtggccacatatacaccatggaatactatgcaagccataaaaaaatgatgagtttatgtcctctgtcgggacgtggatgaagctggaaaccatcattctcagcaaactatcgcaaggacaaaaaaccaaacagtgcatgttctcactcataggtgggaattgaacaatgagaacacatggacacagggaaggggaacatcaccacactggggcctgttgtggggtggagggaggcggggagggatagcattaggagagatacctaatattaaatgatgagttcatgggtgtagcacaccagcatggcacatgtatacatatgtaacaaacctgcacgttgtgcacatgtaccctaaaacttaaaagtataatataaaaaataaattcttacttgaattgtgcaatttgtagaactttaataaaaaaatgatacatctt

SEQ ID NO: 128744 - DNA, 2415 bp, Homo sapiens
  misc_feature (1)...(2415): n = a,t,c or g
ccgtcttcttgttttttaccccccccggcgaaaaggggattttcttccaaaggcgattaaattggggaacccccagggtttttcccctccccacgttgttaaacccccggcccggggaatttaattttgggggccccataaaaaaactaatacctccgccagcccgcggacgtaaacttggatcctttaaaacggccccccctttttttttggnnnnnnnnnnnnnaacctgtttatttcgggcttatgattaactaactgcaaggtctatttgcaggaaaggccaagaatcccctccttgccgttgtcacccacatccacagagcagccctagtgcacaggtgcagccactgccacccacggcacacgggaacaggacccatcgctcgcaggcctgctctcctgcccagggagatgccacgtgtgtctgtccggcagattcatggcaccggttcccaagcagctacgggagggcttagatttgtttggtggtccccagggcctttccctcggaggcttgggcgcatccccacagcccccaaggggatggggggctcttgccacggggcccaaattccacagctcgcacggctgggggcccttcccgtggcccatggggaaggaagccaagtatttccagaggtggcttggaggcccctgggtggcggggagaggaacagggagagcatgagacagacccacagggctgaggccaaccctgcttttatttcacaagagcttctcgatggcttgacaggagcttcgggtttcaggatggagtccggcctcggcccccgcgaacacttgatgtcctccagcacagccatgtcccacgagaaggtcaggagggcagagggcaccagcccgcactcgttcaaggccaggttctcgtcctcggacagcttctgccctcccgaggccagcagctcaaaaggcagccagtcgctctgcacgggcctcccggacgaacccgtacaccgcccccaagccgctcccgagcgtagaaagtgccctgcaggaggcagccatcggggaggcgcacgcgcagcagcgtgtaagttgtacttgcgcagcccccgctgctcctccttctcccgcatggccttggtccgcagcacgctcagccgctccaccgcctcggacctgagcctctgctcccgcttgatctcctctgctgtgaggttgaagaagtccccaggcagttcgaactgcgaggccaggggcgagggctggaagacgcggcgctgcctgtccagcttggcgcgcacggccctccgcagccagcagctgttccttgtgcctctccaggctctggggctgggccaaggtggtctcgctcagcacgtagaactcctcggggtcctctacagcgtggcaggacatgggtgtcacctgatcctgggcgggaagcaacaccttctggaacccaatggcctcaaaaaactcgtgggtcccttccaggcagttaatgcgctcctgaaacaccttgttctgcagcttgatcttccggtacttctcctcctcggggtgcaggtggatgttgtccaggtaccgtcccaccagccctggaagggcacaattaaccacagcggtggggaagccacagtgccggaagagtggagagccagagctgaagggccgcagtgccagcagggggctcctgcggggtgctccctcggcgttggcgggcagcgtggacctccaggcctgcccccgatcccggtccctggtctttgttgaacgtgtagatcttcatgaatggaggcggccactgggtcggtggagaagtgcaagagaatggcctccttgatgcaggcgtcccgctggtccttcctcagggtggccccagtgagcggacaggtgaagtacacgccaggcacagccaggtgggcagagccttcctctctgggctcagataccacgttggtccctggggcctcggggctcccgctgacggtggcttcggcttgaagttcctttctcacctggtttcggatggtgtcctgcgatgtgggggccccaggcccgggactgcttctgctccagccgggctaagagcagcagcggctgccatctgtgccctcattggtgggtccctggcggggcggcctgggggctggctggttgggcttctctttgtgggccttttcccccacggactctttgagcttctgaccgggtcccgcgctcttgaacttgatgtcggccttgaactcctgaaagaatttcttcatggtggcggctcggtcttgcggcggggggacgcgggggcggggaggcacggggcccagtcggggacggggccgccggagaccagccaccggaagaaaataaaaaaaaaaaaaaaaaaaaaaaaaatttacctcgccgccggaagtcccgccttcccctggcctgccacgtgacaatcgacta

SEQ ID NO: 128745 - DNA, 822 bp, Homo sapiens
atggctgagactgagctccacagggactttctttctgcagcattgtggaaaaatcccccagaccttgcgtctctgtccctgcccttgctgggctacatcgctgctctggtgaaggcagctgccttcacagctgctgtgtccctgatgaacaagaaatggccaggaccctgcactgagtgcctgcggacatatttagacagcacgtggcctctgctggcactgtctggggacagcagaaaagagtactggggagtggacatgggaagattctatgtaaaattcaacaaaagtgaactttcaaaagagcccatagggccctcccaggcctgccaggccagctcacagctccagtccactggtccaccctacaaggctcctaccacctggataccacagcaggcctgcccttgcccaggcagcagccagccgccctcctactgctctggcactctgcagtctccattgctgctctcctaccgctctgtctccatcgccaccaccaaccacagcaaggcagtgtacccggccctcaatagcgcccccaaccaacgcccccaccccctctccatgggcagtccagccccgcccccagagagcgccctcaacaaccccctccccactgccagcagtgtagcaccctatagtgaccctaacccgtcccccaccaccagcattgcagccccaaatagtgcccccaacccgctccccactgtgggcagtgcagccatggatagtgtccccaaccagctcccagatgcaggcaatgatgccctggatatcacgcccgcccccgtcccccacaggcagagtagcaccggatag

SEQ ID NO: 128746 - DNA, 2789 bp, Homo sapiens
atggcagcggtgaggaagcagctgccgcggggtgtgcttgggtacggaggctcaggagctctgctcagcactgcggctgccgacacgtccttgctgttgggctcccttcaggagagaaagtccgcgtccgcgggccctggctatctccggagctccgtggcagcctggtccgggctgtggctgactggagcctcggaggcacactcggtcgtcttggcctgcttctctcgcaaggatgtggaagcttccctgagtgtaggtctccccgtccacccagacgcctcctgcgctcggcgtttggatgctgcagacggagtggcaggaggctctcctcgtctaccccagtccacggatggctggagattaaccgctcacagtctaccccagtccacggatggctggagattaactgctcacagtctacccccgcccacggatggctggagattaaccgctcacagtctaccccagtccacggatggctggagattaaccgctcacagtctacccccgcccacggatggctggagattaaccactcacagtctaccccagtccacggatggctggagattaaccgctcacagtctaccccagtccacggatggctggagattaaccgctcacagtctaccccagtccacggatggctggagattaaccattcacagtctaccccagtccacggatgcctggagattaaccgctcacagtctaccccagcccatggatggctggagctgcaggagtgcccagtggtgcgtggccaagagactgtggtgctcaaacaccccaacatcaagcagcctggcacttgtacctacccttctcacagcgccttcccttcaaactcctttgtgatccaccgagcagctcacagtaacatcaccttgggaaacacaggaaacccaaccacattccggttccccatgatgcagagaccagccctaatgactgcaattacggctccgtttaacagacaactgactggatgttacaatggagctgtcagccccactgaattaatcctgctggaggaccattttcatctgttgctcctgttccaggcaaacagccctggccgagcgcagcgccccgccgtgcacaacacgctcctggagctgaatcgcgcaccgcccggaggcggcgtggagaaaccgagcacgggagccagcagcggacgcatcgttcgatgccaaaccgatatgtgggaacggaaaacaaagcgaaagctgccactctccattctctcagagtcttctggaagcttccgtccagcaagtcaggaacccgtgttattacagctcttggattcacacgctcatcccggccccgcgtgtcaccgcgagtggactcacaccctcatcccgaccccgcgtgtcaccgcgagtggattcacagcctcatcccgaccccgcgtgtcaccgcgagtggattcacacgctcatcccgaccccacgtgtcaccgcgagtgggttcacacgctcatcccgaccccgcgtgtcaccgcgagtggactcacacgctcatcccgaccctgcgtgtcaccgcgagtggactcacaccctcatcccgaccccgcgtgtcaccgcgagtggattcacacactcatcccgaccctgcgtgtcaccgcgagtggattcacacgctcatcccgaccccgcgtgtcaccgcgagtggactcacaccctcatcccgaccccgcgtgtcaccgcgagtggattcacacactcatcccgaccccgcgtgtcaccgtgagtggactcacaccctcatcccgaccccgcgtgtcaccgcgagtggattcacacgctcatcccggccccgcgtgtcaccgcgaggggactcacaccctcatcccgaccccacgtgtcaccgcgagtggactcacacgctcatcccgaccccgcgtgtcacagcaagcgggttcacagcctcatcccgaccctgcgtgtcaccgcgagtggattcacacgctcatcccgagccccgcgtgttatcgcgcagtgggctcacaccctcatcccgaccccgcatgtcaccgcgagtgggttcacaccctcatcccgaccccgcgtgtcaccacgagtgggttcacaccctcatcccgaccccgcgtgtcaccgcgagtgggttcacagcctcatcccgaccccgcgtgtcaccgcgagtggattcacacgctcatcccgaccctgcgtgtcaccacgagtgggttcacagcctcatcccgaccccgcgtgtcaccgcgagtggattcacaccctcatcccgaccccgcgtgtcaccgcgagtggactcacacgctcatcccgaccccgcgtgtcaccgcgagtgggttcacagcgtcatcccgaccccacgtgtcaccgcgagtggactcacacgctcatcccgaccccgcgtgtcaccgcgagtggattcacagcctcatcccgaccccgcgtgtcaccgcgagtggactcacacgctcatcccgaccccgcgtgtcaccgcgagtgggttcacagcctcatcccgaccccgcgtgtcaccgcgagtggattcacacgctcatcccgatcccgcgtgtcaccgcgagtgggttcacagcctcatcccgaccccacatgtcaccgcgagtgggttcacacgctcatcccgaccccgcgtgtcaccgcgagtggattcacacgctcatcccgaccccgcgtgtcaccgcgagtgggttcacagcctcatcccgaccccgcgtgtcaccgcgagtggattcacacgctcatcccgaccccacatgttcacgtgtttaa

SEQ ID NO: 128747 - DNA, 440 bp, Homo sapiens
aaggcaggagaggaacactgagtctgggaggcgattctcagctctcacctgggccagtctgcacgtggccacggaaagaaaatattgggcctcaaacctggctcagacgctgcttccttacgaaaatctagcctagtcttccccaccctctgcccggcttcgttccgcagaatgagcccgcgcggttaacatgatcgccgtagggacttccaactctcggttctaccaggaaatagggccaaggcctacgcgtaggctcccacccccataccagcagagacaaagccgtagccgtagaagagcgtcgtggtggctgcagcaacttccagacgtgggtccctccacgcccgcctcccgaccccacttactaggccttttcatattggctgtagaaggaagcacaaacacatcaacctgcctccgcacgaaacgtcgacccg

SEQ ID NO: 128748 - DNA, 659 bp, Homo sapiens
tgctaaatggataatgccagtactctcttgtggaaggtattaccagaacaagggatgtagttctgatcattttctccttgataatgtagttctggtcattttttccttgataggtgattgaagcctccgatgttgtcctagaggtgttggatgccagagatcctcttggttgcagatgtcctcaggtagaagaggccattgtccagagtggacagaaaaagctggtacttatattaaataaatcaggtgagtaaagagggtaccctttgtcttctgtgtacatgggtgaggtacgaggaaacagtctgatagtcactgaagactgattagatccaactctgatctcagcaaagccagagtacgtgcactttgccagagacagtgctaggcagtggggagccaggtgacttttacaactgactcaactggtttctactattcttttgccattcagtatttaccatcttttaaataaagagtgtaagctgctatacccagcttattgtgtagtatatttcatctaggaagtgatgacagtgtgacaaattccccacacctacacaatgtcgggtattagttcaagagtgaaataaattggaacgtatgtgacaaaatatttaaatgaaatgcataattatgcatctgagtttgagcggcaa

SEQ ID NO: 128749 - DNA, 890 bp, Homo sapiens
  misc_feature (1)...(890): n = a,t,c or g
atgctttgggccccagagtggtgtatactggcactggtgttagcaggtccaggcaggccaattcctgggactccagctggcttgctggagtgccaggaatggcagcagtggatcgagcaggncgggagtcgggcgtggagggacccacgtctggaagttgctgcagccaccacgacgctcttctacggctacggctttgtctctgctgagttaaagaaagcaagtaaacgcatgacctgccataagcggtataaaatccaaaaagaaggctccagaacatcatcgaaaaataagaggggaggctaagaagcggggtcacaacaagcctaggaaagacccaggagttccaaacagtgctcccctttaaggaggctcttcttgagggaagctgagctaaggaaacagaggcttgaagaactaaaacagcagcagaaacttgacaggcagaaggaactagaaaagaaaagaaaacttgaaacctaatcctggatatttaagccatcaaatgtgggaccctatggaaaaaggagtttgggctttgcaaaactgagaaacaaagcccaggtcgggcaaacagaattcaaagaagctgtactgccaagaacttaaaaaggtgattgaagcctccgatgttgtcctagaggtgttggatgccagagatcctcttggttgcagatgtcctcaggtaggaagaggccattgtcccagagtggacagaaaaagctggtactttatatttaaataaatcagatctgggtaccaaaggaggatttgggagagctggctaaaattattttgaaggaaagatttgcccaacagtgggtgtttcagagcctcaaccaaaacccaaagggttaaagggaagataaccaaggtatcctttattagtg

SEQ ID NO: 128750 - DNA, 3206 bp, Homo sapiens
ccttggcctgagaagggtccaatcagaggcgagctggctaccagcaacccctgaagcttggcctgataagacgagcaagaccaattggattcttcttctgaggatttggtcttgggaaactgaataccgagagcctcagaaatctgtgccttctttcccgaagcctgacccaaaggccaaggctggagtctcacctcggcaccaggctccctcctccagtaggccacaaggaactcaaactggggccccaggtcctccagctcaataaccaggtggaagccatctttggtgatctccatcccaggtcgggtaaggatggctgttggcaagacaacaggagagtcaaagccagccccagacagggttgatttcccaagaacagaagggcccacacagatagtctctacaccctggttactggtgatggagttatacttgcctttcagacccagatactgcaggaccagaagggccaccctgatcactggtcttggattggaaaggggtggggcatgttctgggctaaatctgccttccctggggtcagtgtgagaggtgacagcatgctggcagtcctcacagccctcgctcactctgggcgcgtcctctgcctgggctcccactttggccgcacttgaggagcccttcagcccaccgctgcactgcgggagcccctttctgggctggccaagactggagccggctccctcagcccctccatgggctcctgtgcggcccgagcctccccaacaaggaccaccctctgctccagggcgcccaatcccatcgaccacccaagggctgaggagtgcggacgcagggcgcaggactggcacgcagctccaccggcagcccgcgaaggtctgcagcttcactcctgaagccagcgagaccacgagcccaccaggaggaacgaacaactccagacgcgccgccttaagagctgtaacactcaccgtgaagatctgcagcttcactccagaaggaagaaactctgaacacatccgaacatcagaagggacagactccagacgcgccaccttaagagctgtaacactcaccgcgagggtctgcggcttcattcttgaagtcagtgagatcaagaacccaccaattccggacacaagtggacactcagaagaaaggcagttcctacagggagttttcagagaacaaagcctttccccatcgcgtccctcatcagagaagtgtttatgcctgcttgttgaagagctacctgaggagggctccaggacgccactgcggccgccgtgatggccgtaacggcacgaggcctgcgctccgccgccgccgcgtagctgtgtacatgtgtctttatagcagcatgatttataatcttttgggtatatacccagtaatgggattgctgagtcaaatggtatttctagttctagatccttgaggaatcgccacactgtcttccacaatggttgaactagtttacagtcccaccaacagtgtaaaagtgttcctatttctccacatcctctccaacacctgttgtttcctgactttttaatgattgccattctaactggtatgagatggtatctcattgtgattttgatttgcatttctctgatgaccagtgatgatgagcattttttcatgtgtctgttggctgcataaatgtctccgtttgagaagtgtctgttcatatcctttgcccactttttgatggttttttttttcttgtaaatttgtttgagttctttgtagaatctggatattagtcctttgtcagatgggtagattgcaaaatttttctcccattctgtaggttgcctgttcactctgatggtagtttcttctgctgtgcagaagctctttaggttaattatatcccatttgtcaattttggcttttgttgccattgcttttggtgttttagtcatgaagtccttgcccatgcctatgtcctgaatggtattgcctaggttttcttctaggacttttatggctttaggtctaacatttaagtctttaatccatcttgaattgatttttgtataaggtgtaaggaagggatccagtttcagctttctacatatggctagccagttttcccagcaccatttattaaatagggaatcctttccccattgcttgtttttctcaggtttgtcaaagatcagatagttgtagatatgcggcattatttctgagggctctgttctgttccattgatctatatctctgttttggtaccagtaccatgctgtttcggttactgtagccttgtagtatagtttgaatagtgatgcctccagctttattcttgctttgttcttttggcttaggattgacttggcgatgcgggctcttttttgattccatatgaactttaaagtagttttttccagttctgtgaagaaagtcgttggtagcttgatgggggtggcattgaatctataaattaccttgggtagtatggccattttcatgatattgattcttcctatccatgagcatggaatgttcttccatttgtttgtatcctcttttatttcattgagcagtggtttgtagttctccttgaagaggtccttcacatcccttgtaagttggattcctaggtattttattctctttgaagcaattgtgaatgggagttcactcatgatttggctccctgtttgtctgttattggtgtataagaatgactgtgatttttgcacattgattttgtatcctgagactttgctgaagttgcttatcagcttaaggagattttgggctgagacaatggggttttctagatatacaatcatgtcatctgcaaacagggacaatttgacttcctcttttcctaattgaataccctttatttccttctcctgcctgattgccctggccagaacttccaacattgagtttctattaaagggatgcttcaggatgctccaggctgaggtctgtgagcccaatgtggccctgacacgaaggttgtatggcacagtggccgtgatgtcatcagtgacatcacactcaggaccttcagtgagtgagcaccagctgctggggatccagatgtggctcgtgtacaggctctcgtactcctctgctccgaagcgtgatattcttgccacattggtcatttctccaaaatgctgagcactttttgccttaggacctttgactaactgttcactccatctcaaacgctctgcccctgctgttcgcat

SEQ ID NO: 128751 - DNA, 2874 bp, Homo sapiens
ctactttgccgttcgcacttctacggtgcccttgagcttctcctcgctgtcgttttcaaagtacatcagcttggactggcggaggacaaaccagcgcttcttccaatttctcctggacagcgtggaggagccccccccttttttgtggagccagccttgcttgagggcctcctgcttggagcggaaccacaagaaggtttcatccttgaggacgcaccagcggcgtttccaagagttcatcaggccacctttcatgtacagaaagctgtggaaatacggcagagtgacacagctgtacacagagtcacgccggtatgaaagctcatcatctgtatcaaacctggaatcaaagtcctcttcactatcttcaaacgaggactgcgccccctcagagctgaaccggtaggcacccgagctgttgtaggtccccacagagcagcggtagtcgggggaccactggctgccgtaggagttggagaaggtcacgctgctgccggaagtgatggcaccgtcctcatagtcatcctggtcgtagtcgtagtcgccgtctggggagggcaagtccccagcgttctggggcatgcagtaggtggactcgccgctggaggagttgtgtaggctcccggagtcctgcactgatggggcgagcagcaccgtgctgtccgcactggggctggtgggcaccaccgtgtcgttcatgtatgggtcctcctctgaagagtcatcgctggtccggatgccacttgttcgctggtctgagtggccgtgctcgctggggttgggggagtccttgaaggcgtcgtcgtcggcttcgaagccctcatcgacctcctcctctgggtagggctggctgaagttgaagttgggcttctcctcgcatgcgctctcagccagctcgctggaaaattcgcttcccaccgacagggaccgctcgatattccggacacactcgtcgatctcgtcgaaattgagggactcgaggaactcctgggccgccctgcacgcttcctcctccagcctgcggagctcctggtcccgccgctcctgcagcttctgcagggaagcctcggtcagcgacagctcctgctgctccttcatgcgctgcaggtcctcgatttctttctccagacggaggatctcttccacctgcttattttccttctgtttctccagttcacgggtcagttcagcttccttctggctcttctgcaaggcttcgagttcttgctgcttcctcgtttcttcttcctgctgggcgcggagctcggcttctcttcgctctctctctctttctctttcttcttcctcccgtttcttcttttcttcctcttcctgtttcttcttttcttcttgctcccttttctctgccagcaattgtctgtaaactctccgagcaatctgacctctgagttgcttctggaaaactatggctgcctttttcaggtgcaaaaatctcctcctcagaaggaatgctctgtaattcttctgtattatcaccacacaataaaggacctttctgtattgttttcgtgctaagaagcccaagacatgggcccgaatcaccatggccgcgtggctcacttcctcttccctccgcttctccagtttctgttccaaggattctcgaagaaagaccttggtcttccccagctgccactcgctgttggaggcatcatagagctgcagcaggctcgtgcacttccctcggacgtcctcaggcagagccagattcctcatcagcactttatacccagctttgcggattctcacagtctccagcatccctgagtaccgcagctggttcagcacaaccgcctggtcaaactggtctggcatcctgcgatcacaatcacgagggggtagatctggatttccattggtggttttcttttcggctgcaatttccttttcttcccgtacatatccttcagccaccgaggcattcagcagagagagggaagcacttctgtattccatcattccagccctctcgcaagcagcaatgcggttccggacctgaggacccacatttgtaaacaaatgcacagaggagtgaaaggggctgacaacctggataattctaagaagtcctaactcgcaagttgatgcttctgccctctctatccttccattaatcttgtccatatcattcaccagttctgtctctttgaatatcttctcatcaggtccccagttgagcgcgtcttctctgaactcttgtagtaatccaggaatgtgggtgagtacaaaccaccgtttcttcagtttcagtgaagacatctttggactgttcttcacctctttgtgcaaccatcctctcacgatgaattcctggccctccactctggtgtcccctttggacctctgcagcagggttatccagtggtgcatctcctccggcgtgtcggcgttgcagtgcagcacccggttggccgtgatgatcacaaacgagttgggtctatcagggctgtcagaggcacacacagaatcaatcagccccacatccaaggtgcccacagcattctgtgggtttgcctgctcatcatgcatctcctggatctcctggtccgtggacgcgtggacctgactcagcacgctgaaccactggaaaccttgagctaaacacagggtgccgattggtgtatttacaatccttgagctagacataaaggttctccacgtcctcaccagagcagctagtggatcccgcaccagggctgcaggtggagctgcctgccagtcctgcgccgtgcgctcgcattccttagcccttaggtggtcgatgggactgggcgccgtggagcagggggcggtgctcgtcagggaggctccggccgcacaggagcccatggagtgggtgggaggctcaggcat

SEQ ID NO: 128752 - DNA, 630 bp, Homo sapiens
ctagatacaaaggttctccacgtccccaccagactcaggagcccagctggcttcacctagtggatcctgcaccagggctgcaggtggagctgcctgccagtcctgcgccgtgcgctcgcattcgtcagcccttgggtggtcgttgggactgggcgccgtggagcagggggtggtgctcgtcggggaggctcgggcagcacaggagcccatggagtgggtgggaggctcaggcatggcgggctgcaggtcccaagccctgccccgcgggaaggcagctaaggcccggcgagaaatcgagcacagcgccggtgggccggcactgctgggggatccagtacactctccgcagccactggcccgggtgctaagtccctcattcctcggggccagcggggctggctggctgctccggaactccagctggcccgcaagcgccgcacgcagccccggttcccgctcgcgcctctccctccacacctccctgcaagctgagggagtgggctccagccttggccagcccagaaaggggctcccacagtgcaggtgggggctgaagggctcctcaaatgccgccaaagtgggagcccaggcaggggaggtgcaagcgagggctctgaggactgccagcat

SEQ ID NO: 128753 - DNA, 383 bp, Homo sapiens
tcagcttgcatggaggtgtggagggagaggcgcgagcgggaactgaggctgcgcagggcccttgagggctagctggacttccgggtgggcgtgggcttggcggccccgcactcggagcagccagctggcccgggccttagctgccttcccgcggggcagggctcgggacctgcagcccgccatgcctgagcctcccaccccctccgtgggctccggagcggccggagcctccccgatgagcgccaccgcctgctccacagcgcccagtcccatcgaccacccaagggctgaggagtgcgggcgcagggcgcgggactgacaggcagctccacctgtagccccagtgcgggatccactgggtgaagccagctgggctcctgagt

SEQ ID NO: 128754 - DNA, 1098 bp, Homo sapiens
atggaagactcaggagcccagctggcttcacctagtggatcccgcaccggggctgcaggtggagctgcctgccagtcccgtgccgtgcgctcgcattgctcagcccttgggtggtcgatgggactgggtgccgtggagcagggggtggtgctcgtccgggaggctctggccgcacaggagctcatggagtgggtgggaggctcaggcatggcgggctgcaggtcccgagccctgccccgcgggaaggcagctaaggcccggccaacaccctttggtcacatgaataaaagtcaagccctttctttgctcattgctcagcctctgggtattaatctgctgagctggtggccacctaaatacaatcgtcctgttcccctcattggtctctccggtctcctgattccagccacattttgcctgggggagacccgtgactccaggcatgctatcaggacaacttcaacccgaggggagatcagctctcccgcaacctggtgccgctctctgacagcacaacagaacctaaggggctacaggatgattcaaggaacagtgtgctacaggacctcggtagcccaccagtggctagaaaacaatgcactggaaggcacccttaatgtcctggcatatgcacagggccagttcccagaagcagacccgcactgggacccaaacaaggaagcccaactacagcaactgcagaggtaccaagaggcactcctgcaagttttgagaaaaggagagaaaaaggcattcaatatgggaaacatttcagaggtgcttcagagagcagatgaaagctgtagccagttttatgagagactctatgaggccttccagctttgcagtccatttgaccctgaggctactgagaaccagtgcatggtaaacgcagtgtttgtagggcaaacccagggagacatcaggcgaaagctgcaaaagctagagtgtttcactggcatgaatgtcactcaggttttagaagtggccaccaaggtgtacactaactgtgaggaggagactcagggaaaaggccaatttgctggtggcagcacttatggaaaggggggcgaatgtcccaagacgaagtggatgtag

SEQ ID NO: 128755 - DNA, 780 bp, Homo sapiens; identical to SEQ ID NO: 125568

SEQ ID NO: 128756 - DNA, 936 bp, Homo sapiens
atgtctactagggtagtgcaaagggaaaatgtaggattggagccccagattccccactggggcattcctagtggagccatgagaagagggccaccatcctccaggccccagagtggtagttccaccaacagcttgcactgtgcatttggaaaagccacagactcaggagcccagctggcttcacccagtggatcctgcacctgggctgcaggtggagctgcctgcaagtccggcgccctgcgcccgaactcctcagcccttgggtggtcgatgggattcggcgccgtggagcagggggtggcgctcctcggggaggctcgggcgcacaggagcccatggagagggtgggaggctcaggcatggcgggctgcaggtcccgagccctgccccgcgggaaggcagctaaggcccggggatacgtgtcttctggccagctctcttcctgcttctgctatcttgctgacgcacgctgctggcacaattggccttgtcccttggactgggcctgagaaaggaggagttattcatcccccaccagcttccaggcccccggaaagactttcagtccccccaacaacacatgggaattatgggaatacaattcaagatgagatttgggtggggacacagaaccaaaccatatcaggtacccagaatgccttcactgaaaatcagtacactccagctcgtcttcagacaatgattaaaaccaccgtgcaggaacaatggcaagcctttagcccgattgggagtggcaatgtgcgcctcactggatcaggagtgcagcagacaccctgctggatccggaggggtagaagtcagctgcgggtctgcgacggcagcaaacagcagtggtggacagcaagcgaaagctcagctcgagccctaacaaacacggaccagaaaagtgtgcagttccaagatttaatagagtga

SEQ ID NO: 128757 - DNA, 996 bp, Homo sapiens
atggcagaaggtaaaggagaagcaggcaccttcttcacagggtggcagactggaccaccagaaaggcagattgtggttggaatatgttccatggcaaagaaatccaaatccaaaccaatgaaggaaattcttgaacggatctccttatttaaatatatcacagtagtagtatttgaagaggagggcagggctcgggacctgcagcctgctatgcctgagcctcccacccactccatgggctcctgtgcggcccgagcctccccaacgagcaccaccccctgctccacggcgcccagtcccatcgaccacccaagggctgaggagtgcgagcacacggcgcgtgactggcaggcagctccacctgcagccctggtgcgggatccactgggtgaagccagctgggctcctgagtctggtggggacgtggagaacctttatgtccagctcagggattgtaaatacaccaatcagcaccctgtgtctagctcagggtttgtgaatgcaccaatggacactctgtatctagctactctggtggggccttggagaacctttatgtctagttcagggattgtaaatacaccaattggcactctgtatctagctcaaggattgcagccactggactccagcaactcgaggaagaggcagccattgataccagacctagaattcactaaaggtcaatgccttcaggaattttcatctgatttgatgattgatgccctccccatcatgagccccaggaagtctcccatgccacgagcagagggtttaataggcaagagggaagggagaaaacagaaggaagaagctccccagtacagagacagagggtggggggctccaaagccacgaaaggaggtggcaagtgtggtggacaccagccagtggagctatatttacccgttttatcagatatcttttgatattgcaaggcagttgtttcaggtagaccagcttgcagacaggagagctgagagcaaaatgcagtga

SEQ ID NO: 128758 - DNA, 3342 bp, Homo sapiens; identical to SEQ ID NO: 117636

SEQ ID NO: 128759 - DNA, 901 bp, Homo sapiens; identical to SEQ ID NO: 125576

SEQ ID NO: 128760 - DNA, 1200 bp, Homo sapiens
atgaagccgtgggccctcaaggtgagtgtcacagctcttaaggtggcgcgtctggagtttgttcctcctgatgttcggatgtgttcagagtttcttccttgtggagtgaagctgcagaccttcgcggtgagtgttacagctcttaaggcggcgcgtctggagttgttcgtttctcccggtgggctcgtggtctcgctggcttcaggagtgaagctgcagactttcccagtgagtgttacagctcataaaagcagtgtggacccaaggagtgagcagcagcaagatttattgcaaagagcgaaagaacaaaccttccacactgtggaaggggaccggagcgggtccccgccagactcaggagcccagctggcttcacccagtggatcccgcaccagggctgcaggtggagctgcctgccagtcccgcgccctgcgcccgcactcttcagcccttgggtggtctatgggactgggcgccgtggagcagggggcggtgctcatcagggaggctcgggccgcacatgagcccatggagcgggtgggaggctcaggcatggcgggctgcaggtcccgagccctgccccgcgagaaggcagctaaggcccggcgagaaaccgagggcagcgccgctgtatcaggctggctttctggaatagctcagtggccaaagattgatcacgaagggtttagagctgtgaaaatgccccaggctgcttggctcctgaaagctgttacctttatagatcttactacactttcaggtgatgatacatcttccaacattcaaaggctctgttataaagccaaatacccaatccgggaagatctcttaaaagctttaaatatgcatgataaagtggccgctggatttccagctggacagactcatttgaagacacgattagaagagatcagattggctgtggaagatggagctacagaaatcgacgtggtaattaacagaagcttggtgctgacaggccagtgggaagggcatactccccagttgtttattcagcattaccatgcaacatatgacacagcagactgttccttccttctggtaatgctttgttgttgtggctttggtgcctacattcctgaggtcttcctttctgtttctgattacccctgcgtctcatttgcaagctccttcacctcctctgtcatccctgaagtgtccatgtttctcagaatctga

SEQ ID NO: 128761 - DNA, 2302 bp, Homo sapiens
cctgcgatcacaatcacgagggggtagatctggatttccattggtggttttcttttcggctgcaatttccttttcggcgctgtgctctgtttctcgctgggccttagctgccttcccgtggagcaaggttcgggacctgcagcccgccatgcctgagcctcccacccactccatgggctcctgtgcggccggagcctccctgacgagcaccgccccctgctccacggcgcccagtcccatcgaccacctaagggctaaggaatgcgagcgcacggcgcaggactggcaggcagctccacctgcagccctggtgcgggatccactaggtgaagccagctgggctcctgagtctggaactaacatttccattacacctggaaatgccacatttgtgacccgggtgcagggacaggcttggtttgcctcatgtatcactggtcatgatatgtctagtttaaaaacttccagtgtcgtggtattaaggagacaatctgaggcacttctaccagccaatttgacatgcaattggcaagattcttctgcccttgccaccttagaaagtgccctgtcccaggtcagacacaaaagattcacatttacacttatggtctttacaggctcagccatagtcattatggcaactgttagcattgctgttgtatctattactgaatcagtacaaacaactgcttttgtagataatctggccaaaaatatatgtgatgaacttctcctacaggacatggatgaagctggaaaccaacattctcagcaaaataacacaagaacagaaaaccaaacaccacatgttctcactcataagtgggagttgaacaatgagaacatacggatacagggaggggaacattacatactggggcctgttggtggcaggttgccaacatccaaactcgctgttgattgccagctcctgctccttgcagcagcccagcatgctctctgctggtgccaaaatacccttccaccaaaccccgctaacttctggaactgtcctagagggtttcctaccctagcaagtgagcttgcctatgtcagccctaaccttgctcttgtcattcagctgagccagaggaaaaaatttgagctattctggggtggtctacagagaaccatcttctttcccttcagtgttctcagaatattgactgttgatgaacaagccaatgatgtgagtgtggctgcagcaaggacccttcaaattttcagagatgacatgattgtatatctagaaaaccccattgtctcagcccaaaatctccttaagctgataagcaacttcagcaaaatctcaggatacaaaatcaatgtacaaaaatcacaagcattcttatacaccaacaacagacaaacagagagccaaatcatgagtgaactcccattcacaactgcttcaaagagaataaaatacctaggaatccaacttacaagggatgtgaaggacctcttcaaggagaactacaaatcactgctcaaggaaataaaagaggatacaaacaaatggaagaacattccatgctcatgggtaggaaaaatcaatatcgtgaaaatggccatactgcccaaggtaatttacagattcagtgccatccccatcaagctaccaatgactttcttcacagaattggaaaaaactactttaaagttcatatggaaccaaaaaagagcccacactgccaagtcaatcctaagtcaaaagaacaaagctggaggcatcacactacctgacttcaaactatactacaaggctacagtaaccaaaacagcatggtactggtaccaaaacagagatatagatcaatggaacagaacagagccctcagaaataacgctgcttatctacaactatctgatctttgacaaacctgagaaaaacaagcaatggggaaaggattccctatttaataaatggtgctgggaaaactggctagccatatgtaggaagctgaaactggatcccttccttataccttatacaaaaatcaattcaagatggattaaagacttaaatgttagacctaaaaccataaaaaccctagaagaaaacctaggcattaccattcaggacataggcatgggcaaggacttcttgtctaaaacaccaaaagcaatggcaacaaaagacaaaattgacaaatgggatctgattaaactaaagagcttctgcacagccaaagaaactaccatcagagtgaacaggcaacctacaaaatgggaaaaaattttcgcaacctactcatgtgaaaaagggctaatatccagaatctacaatgaactcaaataa

SEQ ID NO: 128762 - DNA, 1165 bp, Homo sapiens
  misc_feature (1)...(1165): n = a,t,c or g
ggcccgctccaacatcagaatggtaacagctttcaggagcctaccagccggcagctccggagctgcacgcgccagtgtccgcgcacaatcggggcaccgagctcgaccttagctggatctccaaaatacaagtgaatcacccggcagttctgaaggcgtgcggaacaaatccaggctcgcagaactcgtgaaaaaggactggcaggctgcttggctcctgaaagctgttacctttatagatcttactacactttcaggtgatgatacatctttcaacatttaaaggctctgttataaagccgggtacccaatccgggaagatctcttaaaagctttaaatatgcatgataaaggcattacttacagccgccgtttgtgttttatcccgcccgggtgttgtgatgctgtaaaaggcacttcaaggcctgcaggcttgttaatatccctgtgggcatcagtngggccgctggattttccagctgggacagactcattttgaagacacgattagaagagattcagattggctgtggaagatgggagcctacagaaaatcgacgtgggtaattaacagaagcttgggtgcctgacaggcccagtgggaaagccctgtatgatgagattcgtcagtttccgcaaggcctgtggggaggcttcatcttaaaactatattagccgacaggagaacttggaactcttactaatgtctataaagccagtatgatagcaatgatggcaggatcagatttttattaagacctctactggaaaagaaacagtaaatgccaccttcccggtagctatagtaatgctgcgggccattagagatttcttctggaaaactggaaacaagatagggtttataccagcaggaggcatccgcagtgcaaaggattcccttgcttggctctctcttgtaaaggaggagcttggagatgagtggctgaagccagaactctttcgaataggtgccagtactctgctctcggacattgagaggcagatttaccatcatgtgactggaagatatgcagcttatcatgatcttccaatgtcttaaatcagtcaccagttccagaaaagttctttacgacaatgtttaaaaattatttttctacgtaattgctaaaattatttacattaaaaaattgggcagtaggtaaaa

SEQ ID NO: 128763 - DNA, 1451 bp, Homo sapiens
atggccatactgcccaaggtaatttacagattcaatgccatcaccatcaagctaccaatgactttcttcacagaattggaaaaaaacaactttaaatttcatatggaaccaaaaagagcccacatagccaagacaatcctaagccaaaagaacaaagctggaggcatcacactacctgacttcaaactatactacaaggctacagcaaccaaaacagcatgggacatggatgaaactggaaaccatcattctcagcaaagcaacacaagaagagaagaccaaacaccacatgttctcactcataagtgggagatgagcaatgagaacacatggacacagggaggggaacatcacatgccagggcctgttgggggtaatatacagcaaattcccagctgtgctggctatgagaagagactccttctgtttgggaaaagtggagggacaagcaaaagggactttgtcttgcactttaggtaccagtgtgtccggaattggtgggtttttgggtctcactgacttcaagaatgaagccgcggaccctcacggagtgaagctgcagaccttcacggtgagtgttacagttcttaaaggcagcgtgtccggagtttgttccttctggtgttccgatgtgttcggagtatcttccttctggtgggttcgtggtctcgctggcttcaggagtgaagctgcagacattcccagtgagtgttacagctcttaatgcactgcgtctggagttgttcgttcctcccggtgggctcatggtctcgctggcttcaggagtgaagctgcagatcttcacggtgagtgttacagctcataaaagcagtgtggacccaaagacccttgggtggtcgatgggactgggcgccgtggagcagggggcggcgctcgttcggggaggctcgggctgcacagaagcccatggagggggtgggaggctcaggcatggcgggctgcaggtcccggagccctgccccgcgggaaggcagctaaggccccggcgagaaatcgagcgcagcgccggtgggctggcactgctgggggacccagtacacccttcacagccgctggcccgggtgctaagtcccttattgcccggggccagcagggccagccagctgcttccgagtgcggggcccgccaagcccacgcccacccggaactccagctggcccgcaggcgccgcacgcagccccggttcccgctcgcgtttctccctccacacctccctgcaagctgagggagtgggctccggccttggccagcccagaaaggggctcccacagtgcagcggtgggctgaagggctcctcaggtgctgccaaagtgggagcccaggcagaggaggcaccgagagcgagcgagggcggtgcggacttccagcacgctgtcacctctcaatgggaccatctagtttcaggaaaacaagctcagggctcccactga

SEQ ID NO: 128764 - DNA, 589 bp, Homo sapiens
cagacaccatcctcgacatgcggtccaagcgcgtccgttccctgctgggccgctcgctggagctcaacggggcagtggagccgagtgaaggggcccccagggctccaccaggccctgcagggctcagtggtggggagtcgctgctggtgaaacagatcgaggagcagataaagaggaacgcggcaggcaaagatggcaaagagcgcttgggcggctcagtgctggggcagatccccttcctgcagaactgcgaggacgaagacagcgacgaggacgatgagctggacagcgtgcagcacaagaagcagcgtgtgaagctcccatccaaggctctggtgcccgaaatggaagacgaggatgaggaagacgactctgaggatgctatcaatgagtttgatttcctgggctcacgagaggatggggaaggggctccagaccctcggcggtgcactgtggatgggagcccccatgagctggaaagccgtcgggtcaaactccaaggcattctggctgacctgcgggatgtggatgggctgcccccaaaagtgactggcccgcctcctggcacaccccagccccggccacatga

SEQ ID NO: 128765 - DNA, 1599 bp, Homo sapiens
atgcggctcacccgctgccaggctgccctggcggccgccatcaccctcaaccttctggtcctcttctatgtctcgtggctgcagcaccagcctaggaattcccgggcccgggggccccgtcgtgcctctgctgccggcccccgtgtatccctgcccccgcatcccctaacgtgcgtctggcgctgctccaggccggccatggaccggccacccgcagcctcgcgcccggagactacggtggccaccgagtttgtggccttagtacttgatggggcgcgggctgaggcacatgccttgctggagcgcatggtggaggcgctccgcgcagtaagcgcacgtctggtggccgccccggttgccacggccaaccctgccaggtgcctggccctgaacgtcagcttgcgagagtggaccgcccgctatggcgcagcccccgccgcgccccgctgcgacgccctggacggagatgctgtggtgctcctgcgcgcccgcgacctcttcaacctctcggcgcccctggcccggccggtgggcaccagcctctttctgcagaccgcccttcgcggctgggcggtgcagctgctggacttgaccttcgccgcggcgcgccagcccccgctggccacggcccacgcgcgctggaaggctgagcgcgagggacgcgctcggcggtcggcgctgctccgcgcgctgggcatccgcatagtgagctgggaaggcgggcggctggagtggttcgcctgcaacaagaagaaccaacgctgcatgggaaccgggattgctgtatattttccttccccgtatcatagtttaagttcctttggcttctcctcagacgtcttcatcatggacactatcgggggcggggaggtgagcctgggggacttggcagatctcaccgtcaccaacgacaacgacctcagctgcgatctcccatccaaggctctggtgcccgaaatggaagacgaggatgaggaagacgactctgaggatgctatcaatgagtttgatttcctgggctcaggagaggatggggaaggggctccagaccctcggcggtgcactgtggatgggagcccccatgagctggggtctctctaccggacggatatgtttcctgagaggagggtagccaaggagagcaggaggcccaggtcatggccgccggcccctcaccccttccctggaaaatccccatggagacgcaggcagtcctggctcttcctgaagtggggccgccagccctccagggcgggcgtccagctctggctggcctcaaggagggaacaggatgaggacccagtcggggagaggcagagtggatcaggtacgtcagattatgtcaccccgctgctcgaaagtgatacgactttggtcgcggtacccgtcatagggaggaagggcagaaacctacaaaaagccttcatggggaaattatttgatcatctgcttggaacccagagctataccacctgtgctggagaccggccagccaaatcttcagtctcggtggggacaaggagacagcgccatctggtgcttgagggtgtggccaatgaatgtggaggggagtgtcctaaggttggcagcctcttttga

SEQ ID NO: 128766 - DNA, 980 bp, Homo sapiens
tcactgcgccttgaggagcctctcccctatgcccttgatgggtggcccgcaggggacgcggccgcactcggtcacctgtggtcctggagcagccgcgcccggcgggcggcactgaggcctctggaggcgctgagtgggccggaagccgcgggagccgcgggacccgcagagagtgcccgcctgtgttggggcagcagcgccaggcagctgctgtgtgtggttgagttccttctcgtacctgggctgagtataggaccagattcgtacctcactccctagggcagcctcgaagcagtcatataccacagagcccacagactgaccaaactgcacaagggcagcaggcacttgcacctccagcaggacgcagcgggcagtagggtaggcctggaaggagagcacgacttgggcctggagagaggcattcctaggctcctccacccctaagtcagctgctcctccaaacttttcctcatcttcaggctcttcccagtgcccatgcacggccaagtggacagccacacgcagacagaggtcacagtcggtctccttctggcacctcagcaccagctctgttctcaaggtggttaggccacaagccgggggcccgaagcaggcacgatgtccccaggcaggcagagtatgtcactgtcccagaggcggcaggagaggcccggagagcaagtgggtagcgtcctgaggccccacaagcctctccagagaaaggatccactgggcttcggcccagtgccaaggacagcaagaaccagggcacaggcatctttcttaggtgccaggtggcacccaggcctgaggccctgtgctgcccccccccaaggggggcagacactccagtcagcccgtgtctgtgggtggcaggggctggaatccctcttcagcctccagagggggcggagggggctgtgctgggtagtttgtgcactctctgtcctgggagtcctgactctcctcctacttcc

SEQ ID NO: 128767 - DNA, 893 bp, Homo sapiens
atatgttgtgcaatcattgggtcaactaattgccatgaaggcagagtcttcgtatgaacaagttgcagctgaggggcctttggaacattcaaagggggatgtgttgcagggaatgggataaacaggtcagacctccagcagagaggtaagggattgaaacatgcagttgggagcaggaggaaatgccttctcagagcacggcaatggcagtcattttctggagatgtcgggtgccatttcatctggcttcctggaggagctgcatttctcaatcaaaaccctggacctgagcaggaaggctggaagggagataagcagacatcctttttctttggactggagtctgggagaagagagtgccctggagagctgcctgctgttttgtagtcacatggagtatgagcatgccttcccagggaccctcacctggatggaaactccagagaaatactcactcagaacctgaagctgctttattaagtagtgagtattccgtcattggaagtattaagcccaagctaaatggtcaactgtcagggaaggatgctgcgcgggccggcgacacagcaaattccgagggcacacctggctgtgcagctgtcccgggacgaggatttcccagtcctccggtcgccagccccccggggcacggccttgaccccgggactgcggggccccgcgcggcacaggagctgggggcgccccctggggttaagcgcgctaggccagccctcgccctccccgctgccaaccccaaccccctggcaccgggtgtggaggcagctctgcctctgaaggtggtcccgatgagcaaatgctcagagaaggcccacgacttgttccaggtcactcaagagttatcagaatccacagctctggtccatgcttattag

SEQ ID NO: 128768 - DNA, 499 bp, Homo sapiens
  misc_feature (1)...(499): n = a,t,c or g
agcgcgnnnnnnttttgaacgcttgcacgaattcggcacgaggcggcccaggagaagcagttcctgccggcgctgctgagtttcttcatctacaacccgcgcttctggccgcgggaaggagaggttgttcggaatcctataattgaaaaacagtaaagatggaaaaccagttattgaatatcaagaggaggagttgttgaagtctcaggggatccagaactgcagccagtccttgctgggctgttcctgtccatgtgcctggtcacggtgctggggaacctgctcatcatcctggccatcagccctgactcccacctccacacccccatgtacttcttcctctccaacctgtccttgcctgacatcggtttcacctccaccacggtccccaagatgattgtggacatccagtctcacagcagagtcatctcctatgcaggctgcctgactcagatgtctctctttgccatttttggaggcatggaagagagacatgctc

SEQ ID NO: 128769 - DNA, 436 bp, Homo sapiens
  misc_feature (1)...(436): n = a,t,c or g
gatagtaaatcccaagtaaggtacctgccgtcagcagatttggctttcttcttgacacctaatacccacagtcctccaggtacctccgtcggcagatttgagctttctccttggacacctaatacccacagtcctccaggctccagtagattgcaaatgacctgcttactttctgttcccgggctgcgttctgacacctgtcggatagtaaatcccaagtaaggtaccnaccgtcggcagatttgagctttcttcttggacacctatacccacagtcctccagtgttttagacgcccagctgcacaacttgattgccttacaaatgacctgcttccaggatgcggaaattcctaatttcttctgtgacccttctcaactcccccatcttgcatgttgtgacaccttcaccaataacataatcatgtatttcaaaaa

SEQ ID NO: 128770 - DNA, 393 bp, Homo sapiens
tcggcagatttgagctttcttcttggacacctaatacccacagtcctccaggctctggtagattgcaaatgacctgcttactttctgttcccgggctgcgttctgacacctgttggacagtaaatcccaagtaaggctgagcttcggcagatttgagctttcttcttggacacctatacccacagtcctccaggagggtcctaagttcggacacctgtcggagagtaaatcccaatgttttagacgcccagttgcacaacttgattgccttacaaatgacctgcttccaggatgcggaaattcctaatttcttctgtgacccttctcaactcccccatcttgcatgttgtgacaccttcaccaataacataatcatgtatttccctgcaaaaa

SEQ ID NO: 128771 - DNA, 490 bp, Homo sapiens
gatttgagctttcttcttggacactataacccacagtcctccaggagggtcctaagtgttttagacgcccagctgcacaacttgattgccttacaaatgacctgcttccaggatgcggaaattcctaatttcttctgtgacccttctcaactcccccatcttgcatgttgtgacaccttcaccaataacataatcatgtatttccctgctgtcatatttggttttcttcccatctctgggacccttttctcttactataaaattgtttcctccattctgagtgtttcatcatcacgtgggcagtataaggccttctccacctgtgggtctcacctgtcagttgtttgctgattttacggaacgggcattggaggatacttcagttcagatgtgtcatcttccccgagaaaggctgcagtggcctcagtgatgtacacggtgatcaccccatgctgaaccccttcatctacagcctgagaaacaggcatat

SEQ ID NO: 128772 - DNA, 358 bp, Homo sapiens
  misc_feature (1)...(358): n = a,t,c or g
aggtannctgcgtcggcagatttgagctttctccttggacacctaatacccacagtcctccaggctccagtagattgcaaatgacctgcttactttctgttcccgggctgcgttctgacacctgtcggatagtaaatcccaagtaaggtaccagccgtcggcagatttgagctttcttcttggacacctatacccacagtcctccagtgttttagacgcccagctgcacaacttgattgccttacaaatgacctgcttccaggatgcggaaattcctaatttcttctgtgacccttctcaactcccccatcttgcatgttgtgacaccttcaccaataacataatcatgtatttcaaa

SEQ ID NO: 128773 - DNA, 742 bp, Homo sapiens
ggggttcagcatgggggtgaccaccgtgtacatcactgaggccactgcacgctttctcggggaagatgacacatctgaaccgaggtaccctcagtcttttagactctcagctgcacaacttgattgccttacaaatgacctgcttcaaggatgtggaaattcctaatttcttctgggaaccttctgtgacaccttcacacaggaacatcaacatgtatttccctgctgccgtatttggttttcttcccatctcggggacccttttctcttactgtaaaattgtttcctccattctgagggtttcatcatcaggtgggaagtataaaccttcaccacctgtgggtctcacctgtcagttgtttgctgattttacggaacaggctttggagggtacctcagttcagatgtgtcatcttccccgagaaaggctgcagtggcctcagtgatgtacacggtgatcacctccatgctgaaccccttcatctacagcctgagaaacagggatattaaaggtgtcctgcggcagccgcacggcagcaccgtccaatttcagtatcttcttatctgttccattccttttgtagtgtgggttaaaaaaggcagcaaggtcaaataagaatgatatcacagggtgaacacacaatgtgatattaggagtaatacctccctaggatatagaatatactgtcacagagtatacacagatggggtacacccactgtgatatagaagcaatatctcc

SEQ ID NO: 128774 - DNA, 1263 bp, Homo sapiens
gaattataagacaattgagtttgtcacaactgcaaaatattgctgagtgtggattgctctgaaatctgaaaacattacttgtgaattgcttatatccaaaatgcagacacagtgctgggtgttggtgtgcttgtttctgatttttcaaccctcttttctaggccaaaggtgtccaaactatacagacccacagaatctaacaacagatgtctcaatattcctcgtcctagaactctcagaggatccagaactacagccggtcctcgctgggctgttcctgtccatagtgactggtcatggtgatggggaacctgctcatcatctctggccgtcagccctgactcccacctccacacccacatgtacttcttcctcatccaacctgtccttgcctgacatcggtttcacctccagcatggtccccaagatgattgtggacatgcggtcgcatagcggagtcatctcttatgcggactgcctgactcagatgtctctttttgccatttttggaggcatggaagaaagacatgctcctgagtgtgatggccctatgaccggtttgtagccatctgtcgccctctgcactacccagtcatcgtgaatcctcacctctgtgtcttcttagtttcggtgtccttttccttagcctgcattggcgtgtacctgacttcagctgtggcaccacccctcaggaatggtgtggtggcgtcagtgacgtatgctgtggtcacccccatgctgaaccctttcatctacagcctgagaaacagggacattcaaagcgccctgtggaggctgcgcagcagaacagtcaaatctcatgatctgttccatcctttttcttgtgtggtaagtactgagtattgtgagaggaacaagcaaaaggtgtccaatctctacagacccacagaatctaacagatgtctctatattcctcctccgagaacctcagaggatccagaatggcagctggtccttgctgggttgttcctgtccatgtgcctggtaacggtgctggggaacctgctcatcatcctggccgtcagccctgactcccacctccacacccccatgtacttcttcctctccaacctgtccttgcctgacatcggtttcacctccaccacggtagccaagatgattgtggacatccaatctcacagcagagtcatctcctatgcaggctgcctgactcagatgtctccctttgccatttttggaggcatggaagagagacacgctcctgagtgtgatggcctctga

SEQ ID NO: 128775 - DNA, 1791 bp, Homo sapiens
ttttttttgtatttttagtagagacagtgcccccccatattggtcaggccggtcccgaactcccgacctcaggtgatccacccacttcggccccccaaagtgctgggattacaggcgtgagccaccgcgtttggccaaactttctgatgaaaactctaagtccccctaagctaaggacaggagttatagcttacatgaattttaaaacaagacccaccgatttgagtaagcaattactctcttgaaggagaaaagtcagaaaacataatgatgaaatcactaggacctaactcgcatgtggaactattttctgcttatgaactatcaactttaagttcatttccagatggcatggtctcagctgttatacagtgtttataaatgttctaaatcaagggaatttgtatcaatctcgtagaataaataaaatatttgagttcttaatttcctttaattaggataacctttttcggaaagtgaagagaatggttttattacatagttttcttcggaaaagataggctgtattttctagcagttacgaatttgttatgtatgatgatctggttcttggaacattcttgaatctagtgtctctaaggcaggtgtgtacagcaagaagtgaataacacagaaatcaatgatgaaagcattagaagacaattgagtctgtcagaactgcaaaatattgctgagtgtggattgctctgaaatctgaaaacattacttgtgaattgcttctattcaaaatgcagacacaatgccaggtgttggtttacttgtttcccatttttcaaccctcgtttctaggcaaaaggtgcccaatctctacagacccacagaatctaacagatgtctctatattcctcctcctagaagtctcaggggatccagaactgcagccaagtccttgctgggctgttccctgtccatgtgcctgggtcacggtgctggggaacctgctcatcatcctggccatcagccctgactcccacctccacacccccatgtacttcttcctctccaacctgtcccttgcctgacatcggtttcacctccaccacggtccccaaagatgattgtggacatcccagtctcacagcagagtcatctcctatgcaggctgcctgactcagatgtctctctttgccatttttggaggcatggaagagagacatgctcctgagtgtgatggcctatgactggtttgtagccatctgtcacccgctatatcattcagccatcatgaacctgtgttctgtgggcttcctagttctgctgtcttttttttttttttctcagtctttcagactcccagctgcacaacttgattgccttacaaatgacctgcttcaaggatgtggaaattcctaatttcttctgggaaccttctcaactctcccatcttgcatgttgtgacaccttcaccaataacataatcatgtatttccctactgccatatttggttttcttcccatctcggggacccttttctcttactataaaattgtttcctccattctgagggtttcatcatcaggtgggaagtataaagccttctccacctgtgggtctcacctgtcagttgtttgctgattttatggaagaggtgttggagggtacctcagttcagatgatgtgtcatcttcccccagaaagggtgcagtggcctcagtgatgtacacggtggtcacccccatgctgaaccccttcatctacagcctgagaaacagggatattaaaagtgtcttgcggcggccgacggagcactgtctaatctcaaaaaaaaa

SEQ ID NO: 128776 - DNA, 1974 bp, Homo sapiens
atgacccggaaggtcaccttgctgctgagaacttggaggggagggtgtggcaggctggccatggggatggaggccacccctcaggggagtctgcacccattgttccaggaacactggatccgagcagaggactttggtgtcctcagtcccatgcaccccaactcagtccagggtgtggacgacatgatccgcctgggggacctgaacgaggcaggcatggtgcacaacctcctgatccgctaccagcagcacaagatctatgtgagtctccccagccctgtgtccacaggggagcccctcacaggtgccaacctcctggacagggagaagaaaatgatgcacagggggcactgccctatcgccctcactgagggagtcagtggccctgataaccccgagggcagagccagagccaaggccaaggccaaggccagggccgagttacctctgccaggggcagagggcactgaccacctgcttccttcccagacatacacaggctccatcctggtggccgtcaacccgttccaggtgctgccgctctacaccctggagcaggtacagctctactacagccgccatatgggcgagctgcccccgcatgtctttgccatcgccaacaactgctacttcagcatgaagaggaacaagagggaccagtgctgcatcatcagcccccagaacagagtaggagctcagacagacactgtgctgaaagttttccagcacctgctcattagtttgatctgtaaaacaaccctgcaagcctgctgcatcccttcccacccctacctgtcctcagccccaggaccgcctcctctgaccactcaatgccggagctactctgacagcctgctcggcccacagctcttcggggacgtctgctacaactgcagccatgtgattgaaggcgatggtgaggccctgtgttccctcccccaccccacctgctctcctggggcctgggtgctgcagcttgtgtcgcccctcaacaaggcctggtgtgtgagctgcttctcctgctccacctgcaacagcaagctcaccctgaagaacaagtttgtggagttcgacatgaagcccgtgtgtaagaggtgctacgagaagttcccgctggagctgaagaagcggctgaagaagctgtcggagctgacctcccgcaaggcccagcccaaggccacagacctcaactctgctgaaggccctcttgcgcagctcggtgcagttggggcagaaccggcattacccatgaaccccacattccccaggtggagaatggcagccagcagcttgatgacgtcccagctctcggagtcggagaactggaggatcttcatggccgagcggatggaggcccagggcgggcagaggctgctgctctccacgatgcatgaggagtacgagtttgtgtcacccagcagtgtggccatcgctgagctggtggccctgttcctggagggcctgaaggagaggtccattttcgccatggccctgcaggacaggaaggccacagaagggggacctgttggtctcacaaagaagcaggggctgctggcctctgagaactggaccctcggccagaacgacaggacaggcaagacggggctggtgccatggcactgcctctacaccatccacacggtcactaagcactcggacagctgctgcacagctgtgcccactctgctggaggcctcttctgggtgcatcttcatgagttacaagaagcacattactttgaccccaaagtctgcagactcaaataaacggccctccaccttaggaagccagttcaaacagtctctggaccagctgatgaaaatcctgaccaactgccagccttacttcatccgctgcatcaaacctaatgagtacaagaagccgctgggtttctcagattctttcatgctcattaaactgatacgcattgacaaagtccagtatgatagtttcagctatatcttctggaactaa

SEQ ID NO: 128777 - DNA, 1456 bp, Homo sapiens
atgaacatgaacatcaaaaaaattgtaaaacaagccacagttctgacttttacgactgcacttctggcaggaggagcgactcaagccttcgcgaaagaaaataaccaaaaagcatacaaagaaacgtacggcgtctctcatattacacgccatgatatgctgcagatccctaaacagcagcaaaacgaaaaataccaagtgcctcaattcgatcaatcaacgattaaaaatattgagtctgcaaaaggacttgatgtgtgggacagctggccgctgcaaaacgctgacggaacagtagctgaatacaacggctatcacgttgtgtttgctcttgcgggaagccgaaagacgctgatgacacatcaatctacatgtccaaagcaccgtgccagcagagtgggccccagtaacagcttacagaataaacaaacagtaaagaaaggagaccaaacttcggtgaggaggaagaggaacgatctcaaggtggaggaaaggcacaaaaaccaccatctcgctcgagagctgacgtcatcagctgctgctgcatctcccactgggcatgcggctgccacggcccaggctccccagcgccatgtggaagtaggtcgtgccgctgctccagctggagatcttggtgaagggatagttggtgagcaggtcctgggggcagagaggttggttgggccggacgcctccagagcacgggctctgtgtgtgttaggggacaggagagaggcaggacacaccgcagagatgactgcagccccacctgcacaggtccctggacctggtggccccacagccctccggaggcccagcagctaccttggtcttggggtggatgagcagaaccccatgtcggttgatggcgatgaggatgacgtccgggtgcagcaccaggagctccgggactgtctgatcaagcacaccatcctcatccgaggggaatttgtcaccaggtccctgaacattgcccaggctgctgaccggagggacgcctttgtcaagggcatctatggggcactcttcctgtggattgtcaagaagatcaatgccgccatcttcacaccaccagcccaggaccccaaaaatgtgcggagggccatcggctcctggacatatttggctttgaaaatttcgagaacaataggatcatcaggacactctgctggaggtacagagaagccaggtgctagacagagcggcgctcagcatccagaaagtccttcggggctacagatacaggattcccaagtgccaactgcatgctgtggacccagagaaaggtaatgatgaccacttgttggaaaacttgagggtaatacttgtaaaggtcatagtaagacccaacaacttgggcccaacacctgcctttggaaatgccaagacaatccgcaacgacaactcaagccgctttgggaagtacattgacatctactttaacccagcggggtga

SEQ ID NO: 128778 - DNA, 1032 bp, Homo sapiens
atgaccccactccacattctggtgactcctcctgagcgtcaggacaacactcaacccacgaggaattatttctgtctcaaagatgcaggaatcagctcaacgcctcaaaactccatcaccacggtcaatgcccttgaagccatcgacagtgatcaccccaataacagaagggatgagatttactgccagatctgcaagcagctctcggagaacttcaaaacaagcagcctggcccggggctggatcctgctcagcctctgcctcggctgcttcccaccctcagagaggttcatgaagtatctactgaacttcatcggccaagggccggcgacctacggccccttctgtgccgagcgcctgagacgcacctatgccaatggggtgcgtgcggagccccccacctggctggagctgcaggctgtcaagtccaagaagcacatccccatccaagtcatcttggccactggagagagcctaaccgtccccgtggactcagcctccacatctcgggaaatgtgcatgcacatcgctcacaagcagggcctcagcgaccacctgggcttctccctccaggtcgccgtgtacgacaagttctggtccctgggcagcgggcgcgaccacatgatggatgccatcgcccggtatggcccaggagaggggcgagacgagcgccagtcaccctggcgcatctacttccggaaggaattcttcaccccctggcacgactcccgggaggaccctgtcagcaccgagcttatttaccgccaagtcctccgaggagtctggtctggcgagtacagcttcgagaaggaggaagagctggttgagctgctggcccggcactgctacgtgcagctcggcgcctcagcagagagcaaggctgtccaggagctgctgcccagctgcatcccccacaagctgtacaggaccaagcccccagacaggtgggcgagcctcgtcactgccgcctgcgccaaggatggggtcaaactctgtggcaaagacacagctgctggtttcatggctgtgtga

SEQ ID NO: 128779 - DNA, 5094 bp, Homo sapiens
atgagtactacaagcattttccagcaactcaacttgctattgagtcacagccacaaacaaaagcagcagatacagctgcccaatggccgcagcagatacagctgcttgatggctgcttttaggatgcaatattttctgtctctccccatgaaatcactgatcctcgtgggctttgagcgcctgcaggctattgcccggagccagccgctggcgaggcagtaccaggccatgcggcagaggacagtccagctgcaggccctgtgcaggggatacctggtgcgccagcaagtccaggccaagaggagggcagtggtggtcattcaggcccatggccagggcatggctgcccggcgcaacttccagcaaaggaaggccaatgcgccgctggtcatcccggccgaggggcagaaaagccaaggcgctctccctgccaagaagcgcagatccatctacgacaccgtcactgacacggagatggtggagaaggtgttcggcttcctccctgccatgattgggggccaggagggccaggcctcgccgcactttgaggatctggaatcgaagacccagaagctgcttgaggttgacctggacacagtccccatggcggaggagcctgaggaggatgtggatggcctggccgagtacaccttccccaagtttgctgtgacttacttccagaaatcagccagccacacacacatccggcggcccctccgatacccgttgctttaccacgaagatgacactgactgcttggccgccctggtcatatggaacgtcatcctgaggttcatgggtgatctcccagagccagtgctgtatgccaggagcagccagcagggcagctcagtgatgcggcagatccatgacacgctgggcagggagcacggtgcccaggttccacagcacagtagatctgcacaggcaagtggggggcagcagcgggcagaggagggcgacacctaccagagatctggctgcaaggacaaggggaccaaggatatctcctccatgaagctgaagcggtcctcccggatcacaggccaggtggccagccagctgaacattggagaggaggcattggagcctgatggccttggtgcagaccggcccatgtccaacctggagaaggtgcacttcatcgtgggctacgccatcctgcggcccagcctcagctgtgggaatgacatcttctcaggcagtcttgagaatcaaaagaacaaagaattagcaatgcccgaaaccgaatcacttgatagaagatatcaaggctctaagccctcttctaaagagaagcccaaatcccccttgatcaagtgccagcccaagcctgcccaatttgttgccagggatgagatttactgccagatctgcaagcagctctcggagaacttcaaaacaagcagcctggcccggggctggatcctgctcagcctctgcctcggctgcttcccaccctcagagaggttcatgaagtatctactgaacttcatcggccaagggccggcgacctacggccccttctgtgccgagcgcctgagacgcacctatgccaatggggtgcgtgcggagccccccacctggctggagctgcaggctgtcaagtccaagaagcacatccccatccaagtcatcttggccactggagagagcctaaccgtccccgtggactcagcctccacatctcgggaaatgtgcatgcacatcgctcacaagcagggcctcagcgaccacctgggcttctccctccaggtcgccgtgtacgacaagttctggtccctgggcagcgggcgcgaccacatgatggatgccatcgcccggtgtgagcagatggcccaggagaggggcgagagccagcgccagtcaccctggcgcatctacttccggaaggaattcttcaccccctggcacgactcccgggaggaccctgtcagcaccgagcttatttaccgccaagtcctccgaggagtctggtctggcgagtacagcttcgagaaggaggaagagctggttgagctgctggcccggcactgctacgtgcagctcggcgcctcagcagagagcaaggctgtccaggagctgctgcccagctgcatcccccacaagctgtacaggaccaagcccccagacaggtgggcgagcctcgtcactgccgcctgcgccaaggccccatacactcagaagcaagtcacaccactggccgtgcgagagcaggtggtggacgccgcccgcctgcagtggccgctgctcttctcccggctcttcgaagtcatcacactctcaggcccccgcctgcccaagacgcagctgatcttggctgttaactggaaggggctttgcttcctggaccagcaggagaagatgctgctggaactctctttcccagaggtcatgggtctggccaccaacagggaggcccagggcgggcagaggctgctgctctccacgatgcatgaggagtacgagtttgtgtcacccagcagtgtggccatcgctgagctggtggccctgttcctggagggcctgaaggagaggtccattttcgccatggccctgcaggacaggaaggccacagatgacaccaccctcctggccttcaagaagggggacctgttggtcctcacaaagaagcaggggctgctggcctctgagaactggaccctcggccagaacgacaggacaggcaagacggggctggtgcccatggcctgcctctacaccatccccacggtcactaagccctcggcacagctgctggtaactggcacgctcccctgtcctcagcctgggtacccgaggcttgtggaactgctgactcaggatgtcggggttcaggctgacaaagccaaacatttcacaaaggaatatgccacgggatgcatcaacgccaaatgtccctctgggaatgcgactaactgcaagcagagtttagaaaaacacctcttggggccctattactcacaattacaattgcaggcctgctctgtcttcagagatttacctccgaacacagaactgtgctggttccttttggattacttctcttcagatgggggtgaccacgtgtggctggagcctccctccacccacaagaccggcgtggccatcgggggcatcatcaaagaggcaaagccaggcaaagtcttggttgaagatgacgagggcaaggaacactggatccgagcagaggactttggtgtcctcagtcccatgcaccccaactcagtccagggtgtggacgacatgatccgcctgggggacctgaacgaggcaggcatggtgcacaacctcctgatccgctaccagcagcacaagatctatacatacacaggctccatcctggtggccgtcaacccgttccaggtgctgccgctctacaccctggagcaggtacagctctactacagccgccatatgggcgagctgcccccgcatgtctttgccatcgccaacaactgctacttcagcatgaagaggaacaagagggaccagtgctgcatcatcagcgggcgcttggcttccgtcactgtctggtgcagccgtgcccattcttcaattcgaggcttggccacctcctctgagaagccctcttacatgatcccactcaaattacattttctcctctctgctcccatcatggcatcgcccgcttaccttcagcctttggaaatgccaagacaatccgcaacgacaactcaagccgctttgggaagtacattgacatctactttaacccccagcggggtgatcgagggcgcgcgcatcgagcaatttctcctggagaagtcccgggtctgccggcaggctcccgaggagcggaactaccatatcttctactgcatgctcatgggggtgagtgctgaggacaagcagctgctgagcctgggcacgccctccgagtaccactacctgaccatggggaactgcacttcctgtgaggggctcaacgacgccaaggactacgcccacatccgctcggccatgaagatcctccagttctccgactccgagagctgggacgtcatcaagctgctggctgccattctccacctggggaatgtggggttcatggcttcggtcttcgagaacctggacgcctcagacgtgatggagacgcccgcctttcccaccgtgatgaagttactggaggtgcagcaccaggagctccgggactgtctgatcaagcacaccatcctcatccgaggggaatttgtcaccaggtccctgaacattgcccaggctgctgaccggagggacgcctttgtcaagggcatctatgggcacctcttcctgtggattgtcaagaagatcaatgccgccatcttcacaccaccagcccaggaccccaaaaatgtgcggagggccatcggcctcctggacatatttggctttgaaaatttcgagaacaatagcttcgagcagctctgcatcaacttcgccaacgagcacctgcagcagttctttgtgcagcacgtgttcaccatggagcaagaggagtaccgctcggagaacatctcctgggactatatccactacaccgacaatcggcccaccctggacctgctggccctcaagcccatgagcatcatctccctcctggacgaagaaagccgcttcccgcaggggacagatctcaccatgctgcaaaagctgaacagcgtccatgccaacaacaaggccttcctacagcccaagaacatccacgatgccagatttggcattgcccattttgccggcgaggtgtactaccaagcagaaggcttcctggagaagaaccgagacgtgctgagcacagatatcctcaccctggtttactcctccaaaaacaagtttctgagggagatattcaacttggagttagcagagaccaagctgggccatgggaccatccgccagacaaaggcaggaaaccatctcttcaagaaaggtaatgatgaccacttgttggaaaacttgagggtaatacttgtaaaggtcatagtaagacccaacaacttgggcccaacacctgtagaggccagcttggaattgctgctcatgactacattgattgacttccaggagagccttcgaaacaccagtgctcactga

SEQ ID NO: 128780 - DNA, 370 bp, Homo sapiens
ctggcccactccccactgggctccgtcactctgctggacttccgccctcggcagtttgtgctggtggatggggagctcaaagtgacggacctggatgacgcacgtgtggaggagacgccgtgtgcaggcagcaccgactgcatactcgagtttccggccaggaacttcaccctgccctgctcagcccagggctggtgcgagggcatgaacgagaagcggaacctctataatgcctacaggtttttcttcacatacctcctgcctcacagtgccccgccttcactgcgtcctctgctggacagcatcgtcaacgccacaggaagactaccgctgctggccatcctaccaccacgggagctgcctcctttcg

SEQ ID NO: 128781 - DNA, 455 bp, Homo sapiens
gtatgcagtcggtgctgcctgcacacggcgtctcctccacacgtgcgtcatccaggtccgtgactttgagctccccatccaccagcacaaactgccgagggcggaagtccagcagagtgacggagcccagtggggagtgggccaggtggtggaggaggcggcccaggctcaggcagattcggaatcgatcctcccaggaagtttgcagcagctggatcattctctacaggggcgcccagctccgtgatggtggtcagggtctctgggatgccctcgctgtcctggtagcagtacccatagagctgcagcacgttggggtgccgcagccgctccagcagcaccatctccttaagcagcttgtgggccgccagccgatagcagcccctccgtaccccgaactcgcgacgcagctgcccatatcgtgccgctaaagtccatcgccttgcgcgccctcg

SEQ ID NO: 128782 - DNA, 1837 bp, Homo sapiens
atgaggctggaccagtggccttgctcagattctacagaaccttctaagccatggtgctggcaggacggcctcagctgcacgtgctgggcagctgtccagagtgacaggcagaatgcagtgtacaagggtgtggaaacagacaacaggtggcagctcagcaccagttggcggctgcagaggggagtggcagattatctagcatttggtaacagggcgttgctaccagcaggtggaccacagccatgggcagttccagaggggtcttctgaaatgatgagggtgcagaaagggaagttggaggtcatcgtggggctcctacttactgatgaagaaatagaatcaactctcaaaatgaaaagcccactctatcagaacctaaacagccctccaacagtcatctggcaggagtcagatctgtatagtgcagagttctgcagatgccctcccctcatcacgctgcacaaatccaagcagtaccttcacgccaacaccgttacccccgcgtccccaccctcgtacctgcagcacgttggggtgccgcagccgctccagcagcaccatctccttaagcagcttgtgggccgccagccgatagcagcccctccgtaccccgaactcgcgcacgcagctgcccagatcgtggccgctaaagtccaccgccttgagcccaccgccacccgggcaggccacccgtttgtgctggtggatggtgagctcaaagtgacggacctggatgacgcacgtgtggaggagacgccgtgtgcaggcagcaccgactgcatactcgagtttccggccaggaacttcaccctgccctgctcagcccagggctggtgcgagggcatgaacgagaagcggaacctctataatgcctacaggtttttcttcacatacctcctgcctcacagtgccccgccttcactgcgtcctctgctggacagcatcgtcaacgccacaggagagctcgcctggggggtggacgagaccctggcccagctggagaaggtgctgcacctgtaccggagcgggcaggtatctgcagaactccacggcaagcagcagtaccgagtaccagtgtatcccagacagcaccatcccccaaggaagactaccgctgctggccatcctaccaccacgggagcttgcctcctttcagtgttcaacctggctgaggctgtgggatgtctgtgagagccatgcccagtgtcgggcctttgtggtcaccaaccagaccacctggacagatcaaaaggcagaattaccttttgaattattggagctgctggaaaatgacactgttggcaggtattatccccagcagcacagcagcagaccagctgacctggactatttcttaggcagtagtcagtgtcccagggatgaaaggactttgaaaggtcatgtgtcttgtgacccaactagcagcatcagcatcactggggagaaactcaagcagaagcttgagtctactccactcttgctgacaccaaatctgcatttttacaggattcttggacatctcccttccaactcttggcgcttctgctatccagaaccacatcagcttcctgaacagaccaatgtccacctgcacctgggcctctgcatgtctctttcctctgaattctacctatccttcaaggctctgttcaagtacctgctccactgtggattctttccagatcatccccatgcccaactgaatgccattttccacttgtggagctttctgttggtgcctctggttttcagcaattactgcactgtactttgtaatgtagaattatgtcccctacaagaaggcaagctccttgcaggtcttcaaatgattcgatga

SEQ ID NO: 128783 - DNA, 1042 bp, Homo sapiens
cgtgttcactgtttagtagtactcaaaactgccagtgtgagaggatttggaaatcactggatctgctcaatacaaaaatgttttttcgagtctttctccattttatcaggagtcattctgccactgcagtggatttccttcctgtgatggtgcaccggctcccagttttcaaaaggtacatgggaaatactcctcagaaaaaagccgtctttgggcaatgtcggggctctgccatgtgttgccaccgcttgcctgaccacagtggaaaaaagggctccacgggggcatcctctggctccagtcctgggggacatttgtcctaaagtgggctcaatgagctcctctacttccgaattggcacctggggaaatttcgagttttggggaaggaataagtacaatcattggttttgatggggatgggcgctgcttcaccagttcaaaatgggcaaaggggcccagggcctacaggaagcaagtttttacagaaaggatacttattaggcccaccatgccttaaaacccaattgggatctcagaatttgggaccactggctcttccgggaccctgcaagaatgtttttgaacgtttcatgtccaggtttgagctgcctggtaaagctgcagccatgactgacaatactaatgtcaactatgtgcggtacaagggtgattactacctctgcactgagaccaactttatgaataaagtggacattgaaactctggaaaaaacagaaaagatgtggaaaccaaggttcagaggaatatgcccacagttgcagggctgctcagtgacagaacaagggtttgaattcagtgatgacgctaaatcctgggctctacagcatcccaaaagacctgctcagcaggactgggccatgagcaggggaaaccaaggatgggctaatctaggactgaaaatcatcagaggagaggcagtgaccaccagggcaaaggaagtgagcgtggtgttgaaagtgcttgaagtgactgacggtaaagtctgggccagggagaagaaattaagagacagtagataa

SEQ ID NO: 128784 - DNA, 591 bp, Homo sapiens
atgtaccctgagcacgacatcctgatgatggccaccccagagtccgccccccaaggaactgtgtctctggttgggacccccactcagctcttcctgtctggctgcagataccagggcctcaaggaaagctgcttccctgccctgctggaccggttcgcctcctcccaccagtgcaatgcctactgtgagctgctggggctgacacctctcaagggcccggaggcggcccacccccaagccaaagccaaaggctctaagagtccatctgctggcaggaaaggctcccagctgagtcctcagccccagaagaaaggcctccctagtcctcagggcacccggaagagtgctccaagttccaaggccacccctcaggcctcagagccagtcaccactcagttgttgggacagcctcccacccaagaggagggctccaaggcccagggcatgcggtagcctccgcagaggctgggggcctccacccagcagcagaccaaccaggaagcagcttgaactggatggagactttccaaatatggaactaactggagaaggtgcacgaaggagacaccacttggggacctctctgagcag

SEQ ID NO: 128785 - DNA, 372 bp, Homo sapiens
  misc_feature (1)...(372): n = a,t,c or g
agatggagtctcactctgtcacccaggctggagtgcagtggcgcgatctcagctcactgcaacctctgcctcctgggcagtgtgttggcaaggttgtggagaaactggaatccttttgccctgttggtgggaatgtgaaaaggtgcagccactttggaaacagtatgggaggctgagttgtgaggatcacttgaactcaggagtttgtggttcctcaaaattaaacacagaattaccatatgatccagtagtgcccttctgggttcctacccaaaagaatcgaaagcaggggtcccaaagagatagttgtacacttatattcatagcagccttattcacaagagggcaaaggcaacccaagtgttnatcaac

SEQ ID NO: 128786 - DNA, 444 bp, Homo sapiens
ttttttttttttttttacaccacattctttttatttttttatttttatttttttgagatggagtctcactctgtcacccaggctggagtgcagtggtacaatctcagctcactgcaacctccacctccccggttcaggcgattctcctgtctcagcctcccgagtagctaggactacaggtgcccaccaccacacccggccaattttttatgtttttagtagagacagggtttcactttgttagccaagatggtctcgatctcttgacctcatgatccacccacctcggcctcccaaagtgctgggcatgttcttacttctaagtgggagctaaacattgagtacacatgggtcataaaaatgggaacagcagacactggggaacacaagaatggagagggatgggagtaagggttgaaaaaaccacttatcgggcactatgct

SEQ ID NO: 128787 - DNA, 536 bp, Homo sapiens
attttctgtctactttttctttttctttctttctttttttttgagatagagtctcactctgtcgcccaggctggagtgcagtggtgcgatctcagctcactgcaacctccgcctcctgggttcaagcaatttctcctgcctcagcctcctaagtagctgggattatagacgcaagccaccacgcccggctaatttttgtttttcttttttattttttgagacggagtttcgctcttgttgcccaggctggagtgcaatggcatgatctcggctcactgcaacctctgcctcccgggttcaagagattctcctgcctcagcctctcgagtagctgggattacaggcacataccaccaatgcctggctaattttttatttttagtagagacagggtttcaccatgttggccaggctagtctcgaacccctaacctcaggtgatctgccatccttggcctcccaaagtgctaggattacagctgagccactgcccctggctgacgctgcctctttgaagtgcttgtcttccctgctact

SEQ ID NO: 128788 - DNA, 1666 bp, Homo sapiens
gagatggagtctctcactctgtcacccaggctggagcgcagtggtgcgatctcagctcactgcaacctccagcctgggcaacaagaatgaaactcagtcagcggaaggaaggtcagcaggggccggactcttggccgagctttcagcgtggctgttcctgactcgctcactgtgttaaaccgattgtctccataatagatgccatcgaagcccccggtcccctcctccggggcctcctgggtgaagatccagggcggattggtggcgtagagggaggtgctgggggtcgtggtgtgcttcttcccgaagagtttgctgaaggtgccctgcaccgtctgcttctttttcatgctgccgcagcccgcgcgggcgccagggaaggaccttccctccctcgccctgccctgccccggactgaactcagcacggtttccccaggggactctaccaggccatgtcccccgccgtcctccccgcccgcgcaccgggcaacaggtgctgcgggcgccgccgcttgccgggaaatgcgagctacctggccagtccgggaaaggaggcgggtgagtttccagcctctcaaggcgattcgtgaccaggtcagtatgggtacatcggggacagctctagtgtccaacacgagggacatggatggccaaagcgagcacgccacggcatcctatagcccctcaaatatgtggggcgtgaggcttcggggaacatcaggaagtgcctgtaagagaaaagtagccaaagctccctaccctgctttgggcatggagatgctaaacagagaacagcaaaaacacaacagagaccatgagaggctgcagaagagccatgtcaattcaacaaagaaactcaagaaggaaaattccactgagatccgggagacaggcactcatggcaccccaccacaagctggtgaattagatagccttattatccccattttgcagatgaggcccctgaagctcaaagaggctcagccacttgcccaaggtcgcctgacctactgtctgtgtcccagtttttgtgagggcttcatccctggatgttccggggaccctggctgtcccctacccctgctgcccccagagtcctgtatgttgcagcagcagcattctaaacacagccgaggtgtggacccagggcaggactcacagaaaccctctgtacccagtcatgggccaaagacaccgtcatgcaagggggtgaaggctccacactcgtcccggccccgggcgtggaagcaggacctcgagcagtctctggcagcagcctatgtgccggtcgttgtggactctaaggggcagaatccggacaagctcaggttcaatttctacacctcccagtactccaactccctgaaccccttctacactttgcagaagcctacctgtggctacctgtaccgccgggacactgaccacacccgcaagcgctttgatgtgcctcctgccaacttggtcttgtggcgctcctaggcctggagccaaacggaagcccccgacccttcaccctcacccctgtgacctcaggtccccagaggggagagggctgctcactgcaggaggagtgacctatattcgggctaagacagctgtgccatgcccacctattgacaatgataaagggaggtctctcttctcagcaaaaaaaaaaaaaa

SEQ ID NO: 128789 - DNA, 1164 bp, Homo sapiens
atgtggccaggaactgagcaggacccttggtcccccggccgcaagctgctgaattccgccaacgcctgcgtgagttgcaagcagatgccacccccgttgagcctccagatgacaacacagccctggctgacacctgggttccagcccgtgtgccaaggcggctctcgggtgagaacctcccggcctgacatcaccagcactgttaccatccctgccgctggcacaggtgaggacatccctgctgctggcacaggtgaagacatcccagccactggcacagactcgcaccgcaggcctgaggttggattacaggcacagggatgtgtctctggatcatttcgcagccgcgcagctgtgggtgctactcctcgacatgcactgcctggtccacgcctcagccgccggggcgccccacagatgggggaccagcagccagtggaactccaggccagtggccttggaggtcacgctgaagcggccccagcgctgcccgaagctcacgcgttcaacaaagcacagaaccggagatgcagtgggagccgggagcaggaagcgcggaggcagcgccaggtgctgccgctgcccgaggccccgtgccaggtggggcccatagcagccgactcgctgggccctcccaaaacgcacaccacgcgcgaccaggaccgagaggcccgcacggccctgctaggccacaaacactccactgtctccaggttggacaggtttaaccaagtggttctcaacgggagggaatttgtcatcccctcccccaacagcttgacagtgcctggctgtaaccagctcaggctccgatgccagagtcttgacaaaccaggccccactgctcctggcatccccctggaagcctccttgtgcgacccccggcccctcgtctgggtggtgaccatcacctctcagaagccaacctcaccgcgccgactgcaccggagacgcccacgaggacagccggcctctgagaacgcagctgagccgtcacaggtcgccatcagcaaaggcaagagtccaggcaagtgggatcgcccccgcctctcctgggagccctgcaccagcctctcggaccctcccaaaatcaagcggacacggttgccacctactgaccaaaggcagctgcaccccggtcacggggcttccggccggatctaa

SEQ ID NO: 128790 - DNA, 542 bp, Homo sapiens
gagcctcctggggtgtccacgtgagcgcgcgtgagtccgcccccccagtcacgtgaccgctgactcggggcgttctccactatcgcttacctacctccctctgcaggaacccggcgatatggctgccgctgtgccccgcgccgcatttctctccccgctgcttccccttctcctgggcttcctgctcctctccgctccgcatggcggcagcggcctgcacaccaagggcgcccttcccctggatacggtcactttctacaagattatggtgacaagctgaacatggagctgagtgagaaatacaagctggacaaagagagctacccagtcttctacctcttccgggatggggactttgagaacccagtcccatacactggggcagttaaggttggagccatccagcgctggctgaaggggcaaggggtcttacctaggtatgcctggttgcctgcctgtatacgacgccctgcccggggagttcaatcagggcctctggtgtggaggcccgccaggccctcttgaagcaggggcaagataac

SEQ ID NO: 128791 - DNA, 1242 bp, Homo sapiens
gcgcgcgtgagtccgcccccccagtcacgtgaccgctgactcggggcgttctccactatcgcttacctacctccctctgcaggaacccggcgatatggctgccgctgtgccccgcgccgcatttctctccccgctgcttccccttctcctgggcttcctgctcctctccgctccgcatggcggcagcggctctgcacaccaagggcgcccttcccctggatacggtcactttctacaaggtcattcccaaaagcaagttcgtcttggtgaagttcgacacccagtacccctacggtgagaagcaggatgagttcaagcgtcttgctgaaaactcggcttccagccgatgatctcttgggtggcggaggtggggatctcagattatggtgacaagctgaacatgggagctgagttgagaaatacaagctgggacaaagagagctacccagtcttcttacctcttccgggaaggggacttttgaggaacccagttcccattacactgggggcagttaaaggttgggagccatccagcgctggctgaaagggggcaaaggggtctacctaggtgatggcctggagttggtctgcactgtataactgacgccctggtccggggagttcatcagggccctctggtgtgaaggcccgccaggccctcttgaagcaggggcaagataacctctcaagtgtgaaggagactcagaagaagtgggccgagcaatacctgaagatcatggggaagatcttagaccaaggggaggacttcccagcatcagagatgacacggatcgccaggctgattgagaagaacaagatgagtgacgggaagaaggaggagctccagaagagcttaaacatcctgactgccttccagaagaaagggggccgagaaagaggagctgtaaaaaggctgtctgtgattttccagggtttggtgggggtagggaggggagagttaacctgctggctgtgagtcccttgtggaatataagggggtagtgggaaaagtggtactaacccacgattctgagccctgagtatgcctggacattgatgctaacatgaccatgcttgggatgtctctagctggtctggggatagctggagcacttactcaggtggctggtgaaatgacacctcagaaggaatgagtgctatagagaggagagaggagtgtactgcccaggtctttgacagatgtaattctcattcaattaaagtttcagtgttttggttaaa

SEQ ID NO: 128792 - DNA, 227 bp, Homo sapiens; identical to SEQ ID NO: 118589

SEQ ID NO: 128793 - DNA, 424 bp, Homo sapiens
atggtggtaagggccaaatggaagccattagagctgcttctacctaggaagatagtaaatcaaaaacaatatcacatccctggagggattgtggagattattgccaccatcaaggacttgaaagatgcaggggtggtgattcccaccacacccctgttcaactctcctagttggcctgtgcagaagacagataaatcttggagaatgacagtggattattgtaagcttaaccaagtgttgactccaaatgcagctgctgtaccagatgtggttccattgcttgagcaaattaacacatctcctgggtatatcaactcttcagctttgtgtcacaatcttgttcagagagatcttgatcacttttccactccacaagatatcacactggtccattacattgatgacattgcgctgattggatcca

SEQ ID NO: 128794 - DNA, 207 bp, Homo sapiens
acagatggatcttggagaatgacagtgggttatcataagcttaaccaagtggtgactccaattgcagctgctgtaccagatgtggtttcattgcttgagcaaattaacacgactcctgccataaagtgggttgtgcacagcagcattccatcatcaaatggaagtggtgtatatgtgatcaggcttgagcaggtcctgaaggcacaa

SEQ ID NO: 128795 - DNA, 352 bp, Homo sapiens
ggcaactgtgcactggggaaagggatatgatcggacattttggggactactagacactggctctgagctgacattgactccaggggacccaaaacatcattgtggtcccccagttaaagtaggggtttatgaaaatcagaagacagatagatcttggagaatgacagtggattatcataagcttaacaaggtggtgactcctcttgcagctactgtaccagatgtggtttcattgcttgagcaaattaacacatctcctcgtacctggtgtgcagccattgacttggcaaatgcctttttctccattcctgtccacaaggcccaccagaagcaatttgccttcagctggcaa

SEQ ID NO: 128796 - DNA, 441 bp, Homo sapiens
aagacagatagatcttggagaatgacagtggattatcataagcttaacaaggtggtgactcctcttgcagctactgtaccagatgtggtttcattgcttgagcaaattaacacatctcctcgtacctggtgtgcagccattgacttggcaaatgcctttttctccattcctgtccacaaggcccaccagaagcaatttgccttcagctggcaagagaaggctctgcaacaggtccaggctgctgtgcaagctgctctgccacttgggccctatgacccagcagatccaatggtacttgaggtgtcactggcagatagggatgctgtttggagcctttggcaggcctccatagccataaagtgggtcatgcacagcagcattccatcatcaaatggaagtggtatatacgtgattgggctcgagcagatcctgaaggcacaa

SEQ ID NO: 128797 - DNA, 461 bp, Homo sapiens
atgaccgtggattatcgtaagtttaaccaagtggtgactccaatggcagctctgtaccagatgcggtttcattgcttgagcaaattaacacatttcctggtacctggtatgcagccattgacttggcaaatgcctttttctccattcctgtccatgaggcccaccagaagcaatttgccttcactacctcaggggtatatcaactttccagctttgtgtcataatcttattcggagagaacttgatttctttttgcttctacaagatatcacactggtccattacattgatgacattctgctgattggatccagtgagcaagaagtagtaaacacactggacttattgattcataagagaagtaaggaagcagagcacactgctgcttccaggattagagtgtcatgcttaccagagcagaaaagtcatgaacagacactgccgtgggaacaagtgcccag

SEQ ID NO: 128798 - DNA, 928 bp, Homo sapiens
ctcctgatgactgacagattcacagcagaacagaaaggactgggaagggatggaggtgggacatctggcactgaccttcaggggctgaccctgtgggggaacatctgccctgaagagttggagccttcatgtgatgacacagagctgaagtgtgatattcgggaggggatagagagtgcttggaggttttctgattttgaagaatcccagtcagtcaggttctggcgtaaagtgactgctggggaggggtatatcaacaatccagctttgtgtcataatctgattcaaagaaaccttgatcactttccgcttctgcaagatatcacactggtccattaccttaatgacattgtgctgattggatccgccataaagtgggtcatgcacagcagcattccatcatcaaatggaagtggcatgtacatgatcgggctcaagcagatcccgaaggcacaagctgacctggctatggccacttctgagtgcccaatttgccagcagcagagaccaacactgagctctcaatatgacacctttccttggagtggtcagccagctacctggtggcaggttgattatattggacctcttccatcatgggaagggcagaggtttgtcctcactggaatagacacttactttagatatgggtttgcctatcctgcatgcaatgcttctgtgaagactaccatccatggactcacagaatgccttgtccaccatcatggtgttccacacagcattgcctctgaccaaggcactcactttatggctaaagaagtgtggcagggggctcatgctcatggaattcactggtcttaccatgttccccatcatcctgaagcagctgggttgacagaatggtggaatggccttttgaagtcacaattacaacaccaactaggtggcaatactttgcagggctggg

SEQ ID NO: 128799 - DNA, 1077 bp, Homo sapiens
  misc_feature (1)...(1077): n = a,t,c or g
atggggaaaaaacagaacagaaaaactggaaactctaaaaagcagagcgcctctcctcctccaaaggaacacacttcctcaccagcaacggaacaaagctggatggagaatgactttgatgagctgagagaagaaggcttcagacgatcaaattactctgagctatgggaggacattcaaaccaaaggcaaagaagttgaaaactttgaaaaaaatttagaagaatgtataactagaataaccaatacagagaagtgcttaaaggagctgatggagctganaaccaaggctcgagaactacgtgaagaatacagaagcctcaggagccgatgcgatcaactggaagaaagaaaatcccctggagggattgcagagattagtgccaccatcaaggacttgaaagatgcaggagtggtgattcccaccacatccctattcaactctcccatttggccagtgcagaagacagacagatcttggagaaagacagtggattattgtaagcttaaccaagtggtggctccaattgtcgctgctgtaccagatgtggtttcattgcttgagcaaattaacacatctcctggtacctggtatgcagccattgacttgacaaatgcctttttctccattcctgtccataaggcccatcagaagcaatttgccttcagctggcaaggccagcaatatacttttactgtcctacctcagaggaagaagtctgctgcaggggcagagccctcatggagaacctctactagagcaatgcagaggggaaatgtggggttggaacccccatacagagtccccactggggcatcgtctagtaaagctgtgagaagagggccaccatccttcagaccccagaatggtagatctactgacaggctgcaccattcacctggaaaagctgcaagcactcaaagccaatcggtgaaaataacttcaagggctgaactcttcagagccacagtggcagagctactaaaggctgtgggagcccgcccctggcatcagcatgatctggatgtgagacatggtgtcaacaaagattttgcagctttaagatttaatgactga

SEQ ID NO: 128800 - DNA, 1972 bp, Homo sapiens
tccaagtcccaaaactgaagaaccctgactaatacagattttggtattgggagtggttctagaggaacagaatattaaggatggagttctttcattggtttggggtttctggagttggctgcttaatatgattagaacccaaaatgctaaggactctacttctaatagtatggagaacactgatagtccttggtgtgaactgtttagagagttatgcaaaataaatgcatttgacactcctgatttatcgctcatgagaggcaaggaatttagtgactctgtacataatacctttgaccatatgtggagaagcaaggaacataatgaagttggttgtttgctcctaagttcagtggacaaagtgatggaagaaaatgatgaactcagggattttaactcccatcttcagaaacagatactgaccctcaaatctgctaatatcaccttgagtgagagtcttatctcctgtagagaaagagctgaaattgtggaaaaacacacacaagctcttatcatatccaacagtgggagctgcagtcactcaactacaaaatttaactgcaatgggagtaattggatcccatggtgccaggggccaagtagtggcactcaaccgtcaaaggcaaggagacctccaaccttttaccagggtaactgtgcactggggaaagggatatgatcggacattttggggactactagacactggctctgagctgacattgactccaggggacccaaaacatcattgtggtcccccagttaaagtaggggcttatggaggtcaggtaattaatggagttttagctcaggtccaaattacagtgggtccccagactcatcctgtggttatttccccagtgccagaatgcataattggcatagacatacttagcagctggcagaacccccacattggctccctgactggtattatggtgggaaaggccaaatggaaacaattagagctgcctctacctagaaaaatagtaaatcaaaaaccatattgtatccctggagggactgtggagattagtgccaccatcaaggacttgaaagatgcaggggtggtgattttcaccacatccctgttcaactctcccatttggcctgtgcagaagacagatggatcttggagaatgacagtgggttatcgtaggcttaaccaagtggtgacgactccaactgcagctgctgcaccagatgtggggtttcattgcttgagcaaattaacacatctcctggtacctggtatgcagccattgacttggcaaatgcctttttctccattcctgtccataagccccaccagaagcaatttgccttcagctggcaaggccagcaatatgcgtttactgtcctgcctcaggggtatatcaacaatccagctttgtgtcataatctgattcaaagaaaccttgatcactttccgcttctgcaagatatcacactggtccattaccttaatgacattgtgctgattggatccgccataaagtgggtcatgcacagcagcattccatcatcaaatggaagtggcatgtacatgatcgggctcaagcagatcccgaaggcacaagctgacctggctatggccacttctgagtgcccaatttgccagcagcagagaccaacactgagctctcaatatgacaccattccttgggcgatcagccagctacctggtgacaggttgattattggacctcttccattatggaaagggcagaagtttgtcttcactggaatagacacttactccggatatgggtttgcctatcctgcatgcaatgcttctgccaagactaccatcatggagtcacagaataccttgtccacccttatggtattccacacagcattgcctctaaccaaggcactcacttcatggctaaagaagtgcagcagtgggctcatgctcatggaattcactggtcttaccatgttctccatcctgaagcagctggattga

SEQ ID NO: 128801 - DNA, 2592 bp, Homo sapiens
atgggcccaccctacaagcctcctaccacctggcccccgcagacactctcctaccactccaccactccggtcaagctgcagtctctgtctctgccaccaactgcagcaaggggagccacagaaccatgccatctgcaggctccagcctccagcgtgcaacagatgactcctccagctcctggcttgaagcatctgggtggtaaaagccagatgtgcctagaacaggatggaaggagtggtagtgttagaggttcaccttgtcatgctggtcactgggtggcaggagctggtttcggcaaaggcacaactaggacctgggggcatgtaaacctgatagtgcccccaaactgccccactgcctccagcagtgcagccagggatagtgcccccaaccagcccttgctgggggtagtgacagcccagatagtgcccccaacctgcccccctgccatgacagtgcaggagctgatagcacccctaaccctccccccagctgctggatgcagaaggggcgtcaggccattccagactcgtgtgtggctgcttgcgcagctgctccgtgccaggcttggaggaccaggagaaggggtagtcacttgccacagctggaggctggagcgtgtggcaccacggctcgcctcgctgtggtgggcgctggcggcagagacggcagctcggctggactgggctgcgaagaggccttctgcctggggcagtatcaaggctgcagagttttcctccaaagccacacctcgactggaaggggcgagttcgaggactctgtgggtgagctacattcaggcaaaggagaccactacagggaagaatggtccagttgagccttcccacctctgggaggcttactgccgggctactgccccacatcctgctgtgcacagccccagtgctgaagtcacctatacatgtggtattgtgaatttgttgcttcaagggctggtgcccaagtcccacttggagactcatactggatgccatgtagtggttgaactcatcatatgcagtgtagtcttaccattgatcagcaggctgtcagatcctgactggatccaccttgtcctcatggttatcttttccaaggccagagatccaacaccctgcccagccagtggccctgaacagccctcagtgcccacgtctctgccacttattgctgaggtacagcagcttccagaagggagggctccttctccagtagcagccccagggttcctaagtaaacagattcaggatgccctgtgtgccctagagggttcccaggctctggaacccaaaggtggtgagggatctgaaggagtagaggctgagggtccagggacagaaacagagacagtcctgcctgtctccacactgaacttctgcccagagatacagattgacatagcagacaaggagatagaacaaggagaagttaccacctctgttacagctttgctggaggggctggaaaagacctgctcctcacggccctcatgcttagagaaggatctcaccaatgatgtgacctaccttgatcctaccatcttcagctttgaacccctaagcagtccagatggcccagttgtcatccagaaccttcatatcactggcaccattacagcccaagagctcagtggcaccggattgcaaccatgcacacgctatactgtgaagtgtgagacatcccttgatggtgaaaacagcagcctgcagcagctggcctaccacactgtgaatcaccgctattgggagttcttgaatctgcaggccatcaggagaagaaaccagatctatgaaagttcattaaaaataatagagaagatggtggtgagtgccattgtggacaacttgaagacagcatttccttgctctgaatcccagggcccaacagaggagctgagtgaggccgagactgaaagcaagtcccaaacagaaggcaagaaggctaggaagtccaggctgaggttctcatccagtaaaatttcgccagcattaagtgtgactgaagcacaagacacgattctttattgtctccaggaaggcaatgtggagtccaagaccctatccatgtctgggatggaatcttttattgaaaaacagacaaagttactggaggtgcagccaacagaagccccagaaaaagatcctgaacaacttcccaaaggacatgtggacagttgcttgtcagatgcagctgtgccagcccaagatcccagcaacagcgattcaggaacagagacagagttagctgacacagccctgaatctgcttctcttgctactaacagaacagtggaaatggctgtgtattgaaaacatgcagaagtttcttcgtcttatctttggtaccctagttcaaaggtggctagaggtgcaggtagctaatttaacaagtccacagtgctgggtgcagtacctctggcttcttcaggagtccatctggcctggtggagttttgcctaagtttccacggcctgtaaggacccaggagcagaaactggctgctgagaaacaggctttgcagagcctaatgggagtcttcccagatctcatagtagaaattcttggggtgaacaaatgccagctgaatgtttag

SEQ ID NO: 128802 - DNA, 3585 bp, Homo sapiens
cggccggccggcggtcatccttcacacaggcccggctgcggagcgcagtcgcccaggtttacggcggcagagggccgaggctcccggagaggaccgcgatgagtccacttcaggtcggggctgagtgtgggcgcgcggttcccggcggcgtgtgacccagtcttcgccggccgctgcccgctgcgtgtgtaagtgtccgtgggccccagggccttgcagcgcccgccccgaggccccgaagaggccttccgcctggggcagtgtgaaggccacagagttttcctccaaagccacacctcagctggaaggggcgagttggagggctctgttagtggtagccatggggagacgcggagctgcagctgtcgctttgcagtgcctgtaggactttgagggcctggagccccggttccctgaacagcacccagatcgccccatatctgagacacagttcatgccccccttccctaactctgaagtaaaatcttgagggctgtcatctggggaagccaccttgtccgttcagccatgaagacagaaacagtgccaccgttccaggaaactccagctggatcgagctgtcacctcaataacctgttgagtagccggaagctgatggctgtgggggtcttgcttggctggctcctggtcatacaccttctggtcaacgtgtggctgctgtgccttctgtcggcattgctagtggtgctgggaggatggctgggctccagcctcgctggagtggcttcaggtcgactgcatctggaacgcttcatcccgttggccacctgtcctccatgccctgaggcagaaaggcagctggaacgggagatcaaccgcaccatccagatgattattcgagattttgtgttatcttggtaccgttccgtgagccaggagccagcctttgaggaagaaatggaggcagccatgaaagggttggtccaggagcttcggagaaggatgagcgtgatggacagtcatgctgttgcccagagtgttctgactctctgcggttgtcacctgcagagctacattcaggcaaaggaggccactgcagggaagaatggtccagttgagccttcccacctctgggaggcttactgccgggcgactgccccacatcctgctgtgcacagccccagtgctgaagtcacctatacgcgtggcgttgtgaatttgttgcttcaagggctggtgcccaagccccacttggagactcgtaccggacgccatgtagtggtcgaactcatcacatgcaatgtaatcttaccactgatcagcaggctgtcagatcctgactggatccaccttgtactcgtgggtatcttttccaaggccagagatccagcaccctgcccagccagtgcccccgaacagccctcagtgcccacatctctgccactgattgctgaggtagagcagcttccagaagggagagcttctccagtagcagccccagtattcctaagttacagtgagccagagggttctgcaggcccctctccagaggttgaagaaggccacgaagctgtagagggagatttgggtgggatgtgtgaagaaagaaaagtaggaaacaactcatctcatttcctacagccaaatcttcgaggtcccctgttcttatgtgaagactcagagctggagtctccgctgtctgaactgggcaaagaaaccatcatgctcatgactccaggcagctttctctctgacaggattcaggatgccctgtgtgccctagagagttcccaggctctggaacccaaagatggtgaggcatctgaaggagcagaggctgaggagggtccagggacagaaacagagacaggcctgccggtctccacactgaattcctgcccagagatccatattgacacagcagacaaggagatagaacaaggagatgttaccgcctctgttacagctttgctggaggggccagaaaagacctgcccctcacggccgtcatgcttagagaaggatctcaccaatgatgtgagctcccttgatcctactctgccaccagttctgctttcctcctctccacctggtcctctcagctcagccaccttcagctttgagcccctaagcagtcccgatggtccagttatcatccagaaccttcgtatcactggcaccattacagcccgagagcacagtggcactggattccacccatacacactctatactgtgaagtacgagacagcccttgacggtgaaaacagcagcggcctgcagcagctggcctaccacactgtgaatcgtcgctatcgggagttcttgaatctgcagacccgtctggaggagaaaccagatctacgaaagttcatcaaaaatgtgaagggtcctaaaaagctctttccagatcttccatttggaaacatggacagtgacagagtagaagcccgtaagagcctcctagaatcattcctaaagcaactctgtgccattccagagatcgctaacagtgaggaggtgcaggagttccttgctctgaacacagatgctcgtattgcctttgtcaagaaaccatttatggtctctagaatagacaagatggtggtgagtgccattgtggacaccttgaagacagcgtttcctcgctctgaaccccagagccccacagaggagctgagtgaggccgagaccgaaagcaagccccagacagaaggcaagaaggctagcaagtccaggctgaggttctcatccagtaaaatttctccagcactaagtgtgactgaagcacaagacaagattctttattgtctccaggaaggcagtgtggagtctgagactctatccatgtctgcgatggaatcttttattgaaaaacagacaaagttactggaaatgcagccaacaaaagccccagaaaaagatcctgaacaacctcccaaaggacgtgtggacagttgcgtgtcagatgcagccgtgccagcccaagaccccagcaacagcgatccaggaacagagacagagttagctgacacagccctggatctgctcctcttgctactaacagaacagtggaaatggctatgtaccgaaaacatgcaaaagtttcttcgtcttatctttgggaccctagttcaaaggtggctagaggtgcaggtagctaatttaacaagtccacagcgctgggtgcagtacctccggcttcttcaggagtccatctggcctggtggagttttgcctaagtttccacggcccgtaaggacccaagagcagaaactggctgctgagaaacaggctttgcagagcctgatgggagtcctcccagatctcgtagtagaaattcttgggggtgaaccaaatgccgcctgagctggggtctagtcctggagtcactacaacaacccctcatcaacaggcatttgatttactgccttggggacatcatcctggaattcttggatctcagtgcctctgttgaggaagtctgctgctaccacctctgcctcagataccccaggcaactctaagaggatgggtgtctcctcttaagctggttattcacgccttcttcccaggtcagggaagtagagttactcggccaccagagaccagtcaggaagcccg

SEQ ID NO: 128803 - DNA, 504 bp, Homo sapiens
ctacgacagcggagcccctggggaagccaagatgccgtcgaagggaaaggacaaaaagaaaggcaagagcaaaggcaaagacacgaaattgaaaaactgaaacagcaattaaatgaaacaaaggaaaaagcccaagaggagaaggataaattggaacaaaagtataccaggcaaattaatgaactagagggacagttccatcaaaaagccaaagaaattggcatgattcacacagagctgaaagcagtaagacaattccagaagagaaaaatccaagtggagagagagttagatgatctgaaagagaatttaagaaacacagagcggatacatcaggagactcttagaagactggaaagcagattttttgaagaaaaggtacagattattagggttaatttaaaatgttttgtttactagaacataagtgtatttatatgcattctgaaacatcagccttccatttggtatcttaatagaagattagaagattgttaccaaatt

SEQ ID NO: 128804 - DNA, 584 bp, Homo sapiens
ggggggggaggggtcggggcggctgtcgcgtgacgggagagggggcaggaggggggggtagcggggcgtgtggaaatggacgtaagcgtcgtggagaggggggcgtatgcggaccagatatggggtcggccaaagggtggagagtcccggggtgagaagaggaaggggcggtgggtgcaaagagtgcgggcgctgcgcgcgagggtgacacccgctgggctaggagagtgtaaatggggccgcggccggggagattaggtgcgtcgcgtgaagccgcgtgcgttgcgggaacggtggggagatggcagtaccgtcagcgactctacgcccatgaaaccgggtttagaataacaggcttgtcatattactttcaattagcccattcaagatgcccacaagaaccatcgtgttgggctcatgtttattacttaagcaagagagctcttacccaaattcctttgtttccccactgtcagaaacaacatagtctggaactggaggcctagaactctggttgtatttcctgtagtgggtaaaagtcaacaaagataatgaatgaggcagtgtctcctcatgccttcata

SEQ ID NO: 128805 - DNA, 1604 bp, Homo sapiens
atggcctctaagaggtgtattcgggatttcaggagtcggggaggcaagttgaagagcttccaactttatgcaactttcaggaaagaaggctgcggaccggtattagcaaatggaaatccggggggcggtcgtgggcaggaagtatcggccacacaggacctacggcgcgggtggggcattgccagctcggcgtcccggttcccttggagacagagctggccagggcggccgcggctgggcaactacgacagcggagcccctggggaagccaagatgccgtcgaagggaaaggacaaaaagaaaggcaagagcaaaggcaaagacacgaagaagttaataaaaacagatgaatctgtggtggacagagccaaggccaatgcctccctttgggaggccaggttggaagtcacagaactctctaggattaagtatcgtgatacttcacggatactggcaaaaagtaatgaggacttaaagaaaaagcaatgtaaaatggagaaagacataatgtcagtattaagttacctgaagaagcaggatcaggagaaagataatatgattgaaaaactgaaacagcaattaaatgaaacaaaggaaaaagcccaagaggagaaggataaattggaacaaaagtataccaggcaaattaatgaactagagggacagttccatcaaaaagccaaagaaattggcatgattcacacagagctgaaagcagtaagacaattccagaagagaaaaatccaagtggagagagagttagatgatgagatcaatgatctgttggttaaggaaaagattatgcaacttgtccagcagagatcacaaatccaaacccttcagaagaaggtagtaaacttggagactgctctgagttacatgaccaaagagtttgagagtgaagttttaaaactgcagcaacacgcaatgatagagaaccaagcaggtcaggtagaaattgacaagctgcagcaccttcttcagatgaaggacagggaaatgaatcgtgtgaagaagctggccaagaacatactggatgagagaacagaagtggaaagattctttttagatgctctgcaccaagtgaagcaacagatcctaattagcaggaagcattataagcagatagcacaagctgctttcaatttaaaaatgagagcagcatgtacaggaagaacagaatatcccaaaatcagaacatttgatggcagagagcacagcaccaatagtgtgaatcaggatcttctggaggccgaaaaatggacacatattgaaggaaatgtggatattggagatttgacctgggagcagaaggaaaaagtattgcgattgctctttgcaaaaatgaatggctgtccttctaggaaatacaacccagagttctaggccctccagttccaggactatgttgtttctggacagtggggaaacaaaggaatttggggatgaaagtaagcttcaagataaaatcttcatcacccagcaaattgcaatatcagacgtcttctggtgaagtggtgctacccactattccaaaagaacctcaggagtctgacacagtgggaagtcagagtcattacaacctagaggacaaaggcttataa

SEQ ID NO: 128806 - DNA, 473 bp, Homo sapiens
tttcgttgtctctcgctgacgccagagatccagctatcgtcttcactgctctgtgccgtcagctcctagaggcccagcctctgtggccctgtgacctgcaggtattaggagggtcacagctaggacgccgggaccccctggaagcctagaaatgggaccattgcaatttagagatgtggccatagaattctctctggaggagtggcattgcctggacgctgcacagcggaatctatatagggatgtgatgttagagaactacagaaacctgatcttccttggtattgttgtctctaaaccaaacctgatcacctgtctggagcaaggaaaaaaacctttaactatgaagaggcatgagatgattgccaaacccccagttatgagttctcattttgcccaagacctttggccagagaacatacaaaattctttccaaatagggatgctgagaagatatgaagaatgcagacatg

SEQ ID NO: 128807 - DNA, 513 bp, Homo sapiens
  misc_feature (1)...(513): n = a,t,c or g
aggcccgtcaattcccaatcaagcctccccacctgttggggagggcggatcggtcgggcctccttncctataaccccaacctggcgaaagggggggatgtcctccaaggncgattaagttgggtaaccgccagggtttttcccagtcaccgnacgttgtaaaaccgncggccagtgaattgtaaataccgactcactatagggcgaattgggcccgacgtcgcatgctcctctagactcgaggaattctctctggaggagtggcattgcctggacactgcacagcggaatttatataggaatgtgatgttagagaactacagtaacctggtcttccttggtattactgtttctaagccagacctgatcacctgtctggagcaaggaagaaaacctttgaccatgaagagaaatgagatgatagccaaaccctcagggagcttcctttaagtttcacagggagaagcaaaggcccttctttgtgacttataaaagactgcacagtgtggctgct

SEQ ID NO: 128808 - DNA, 2002 bp, Homo sapiens
atggcttttgaacaagctaaacaagtggtgaagctggccctggatctatggcctataggggatgggccagtagaactgcaagtaactgtcctagatcaacatgctaattggagccttaggcaggaacaacatgggaagagggggccattgcaatttacagatgtggccatagaattctctctggaggagtggcattgcctggacactgcacagcggaatttatataggaatgtgatgttagagaactacagacacctggtcttccttggtattgttctctccaagccagaactgatcacctgtctggagcaaggaaaaaaacctctgaccgtgaagagacatgagatgattgccaaacccccaggccagaaaaactgggaaaaacaggctcttccacttactggatgtttgacaaaatatccttcttgggccaaaaacattgacatcattgttacgtgttctcattttgcccgagatctttggccagagcagagcataaaagattctttccaaaaagtgacactgagaagatatgaaaactatggacatgacaatttacagtttaaaaagggctgtgaaagtgtagatgagtgtaaggtgcacaaaagaggttataatggacttaaccaatatttgacaactactcaaagcaaaatatttcagtgtgataaatatgtgaaagtcattcataaattttcaaattcaaacagacataagataagacatactggaaaaaaacctttcaaatgtatagaatgtggcaaagcttttaaccagtcttcaacccttactacacataagaaaattcatactggggagaaacccttcaaatgtgaagaatgtggcaaagccttcaactggtcctcacaccttactacacataagagaattcatactggagagaaacggtacaaatgtgaagactgtggcaaagcctttagccggttttcataccttactgcacataagataattcatagtggagagaaaccctacaaatgtgaagaatgtggcaaggcctttaagcgctcctctaaccttactacacataagataattcatactggagagaaaccctacaaatgtgaagaatgtggcaaggcctttaagcgctcctctatccttactgcgcataagataattcatagcggagagaaaccctacaaatgtgaagaatgtggcaaagcctttaagcacccctctgtccttactacacataaaagaattcatactggagagaaaccctacaaatgtgaagaatgtggcagagcctttaagtacttctcatcccttactacacacaagataattcatagtggagagaaaccctacaaatgtgaagaatgtggcaaagccttcaactggtcctcacaccttactacacataagagaattcatactggagagaaaccctacaaatgtgaagaatgtgggcaaaggctttaagtactcctcttcccttactacacataagataatccatactggacagcaacccttcaagtgtgaagaatgtggcaaggcctttaagtgcttctctatccttactacacataagagaattcatactggagagaaaccctacaaatgtgaagaatgtggcaaagccttcaactcgtcctcacaccttactgcacataagagaattcatactggagagaaaccctacaaatgtgaacgatgtggcaaggcttttaagcgctcctttatccttactagacataagagaattcatactggagagaaaccctacaaatgtgaagaatgtggcaaaggctttaagtgcccctctacccttactacacataagacattagataattcatgcgggaaagaaacccaacaaataagaaaatgcagcaaagcctttaaggacacctctgcccttactagacataagataattcgtactggagagaaaccctgtgagtttgatgaatgtcggaaagcctttaaccagctatcaacttttactaaatatgagaatttatatggaacataa

SEQ ID NO: 128809 - DNA, 1131 bp, Homo sapiens
tatcggaaccgctccggaattctcgggtcgacgattccgtggagctgtactggacactgggcctacacctgtgaaaaggacttacagggcccaactcctggagcttacagtttgaccacaggagagctgctgcttggcagttttcccctccttgctgtgttcacatcctctcttgactcacaccactctgatgaaagtgctcctggcaaggtccatggtaactcccatgatcctgactctagtggtcacttcttcatcttcctcacaggagctcttcagtttggcaccgctgatcatacccttttccttgacgctgtttcttcacttggcttccaggtatttatggggaaccttggtagtgaaatacttcggcatctaacaatattgccttcaggaagttgtttccaagccatcgctaaagctcctgtggtccagtttcccatagaatccccctgctgctcagagtgcctgagaggaatacaccagacctcagggcaggctggggagggtgaaccggagacttatcctggtacggagccagaaggagccttcatgaatgtcttgtcaaactcttcatttggctgcagaaattccagggagaaaaaggtcctggtttttggccaaaaaggcaaaaaacaacagaaatcagctatgactgtaatcctggacttgtctgtggcacaaagagttaatgggacagtggtcaggtggacagacagactggttctccaagttgtttgggtgtcagcgtccatctgtctgtccgtgcaggtcttatgtggaaggttcactcaagatgatggcttttttcttgtagctgaaattgatggattaactgactcagttatcctggttgccttcctcgtacaagaggagggagagcagtggctgcctgcttccctgacgctgctgagtcccacgggaggggagctgggcaccctgaagcccctcgttaccaattcgggggccgcggagcagagtgtgacgacagccagtgagtcgtcagtcgacggcaatggggaccctggtgaaacagtgggccttgagttcttgacccttttaattttgtttgcgtcatcatggcggctgtgggttctaggcttttctccataccgcagctttgcgctatag

SEQ ID NO: 128810 - DNA, 349 bp, Homo sapiens
  misc_feature (1)...(349): n = a,t,c or g
tgctctcttcagagctggcaggcaggaatgtttaagtctgctgaagctgtgcccacagccacccctttcccccacgtgctttgtcccagggagatgagggttttatctgcacttttttcaaagatgcgctgcccagagaggaggaatctagagaggcagtctggctacagaggctttgctgagctgtggagggctctgctcagctggaacttccccatggctttgtttacgctgtgaggggaaaaccacctattcaagctttggtaatggttggcgcccctccccccaccaagcttgatcatccnnnnnnnnnnnnnnnnnnnnnnnnnnnnngggagaactcgtgccg

SEQ ID NO: 128811 - DNA, 175 bp, Homo sapiens
acattcaagtctgctgaagctgtgcccacagccaccccttcccccaggtgttttttcccagggagatgggagttttatctataagcccctgactggggctgctgcctttctttcagagatgccctgcacagagaggaggaatctagagaggcagtctatgtaccgtggctttgca

SEQ ID NO: 128812 - DNA, 2667 bp, Homo sapiens
atgaggaacagtttggaactttctagagacttgttaaattgttgtgaccaaaatgttggtagtgatgtggacaatgaagttcagactgaggaggtctcagatgaaaatgagaaatttattgggaactggaataaaggtcactcttgctatgctttagcaaagagactggtggcattgtgcccctgctctagggatctgtggaactttgaacttgagagagatgatttagggcccagaggcctaggagggaagaatgatttcctgagccaagcccagggccctgctgccctgcagagccttggggcactgctccctgcatcccagacacttcagctccagcagtggctcaaaggggcccaggtacttggactgcagcttcagagggtgcaagctttggtggctccacatgatgttaagcctgcaggcagcccatggctacagaagaagctgctcccagtcacctctggcttggtttggatgggtgaggttgtcccgtttctgcagctccagtcgtggcttaaaggggccaatgtacagctcaggccattgtttcagaaggtgcaagacccaagccttggtggcttccacatgttgggcctttgggtgtgcagaagacaagagttgaactttgggagcctctgcctagatttcaaaggatgtatggaaacacctggatgtccaggcagaagtctgctgcagggacagagccctcgtggagaacctttaccagggcaatgcagaggcagaaatgtgggtttggagcccccacacagagaccccactggggcactgcctagcatagctgtgagaagaaggccaccatcctccagaccacagaatgttaggtacactggcagcttgcactctgtgcttggaaaagtcacaggcattcaacaccagcccatgaaagcagccataggggatttaccctgcagagccacagaggcagagctgcctcaggccatgggagcctaccccttgcatcagtgtgtcctggatgtagaccccaaaacaagactgcatgatacaggagaggataaaggacagagccccgtgacacaccggcagaggccccttacttactgtttggttgataaaaatccagccaatgggctgatcatcaagtccacatcaaccaacctgtctaaaagtagcaaggcatctctgaaagaaaaagcagcagccccagtcaggggtttagagataaaactcccatctccctgggacagagcacctgagggaaggggtgactgtgggcacagcttcagcagacttaaatgttcctgcctgccagctctgaagagagcagctaatcttccagcacagcacttgaactctgctaagggacagactgtctcctcaagtgggtccctgacccccatgtctcctgactgggagacacctcccagcaggggtcaaaagacgccttataaaggagagctctggctggcatctggtgagtgcccgtctgggacaaaacttttagaggaaggaacaggcagcaatctttgctgttctgtagcctctgctggtgatacacagacaaacagggtctggagaggacctccaacaaactccagcagacctgcagcagagggacctgttagaaagaaaactaacaaacagaaacgaatagcatcagcatcaacaaaaacgacatccactcaaaaaccccacccaaatgtcaccatcatcaaagaccaaagatatataaatccacgaagtacaatcaaattagaactcggaattaagaaactcactgaaaactgcacaactacatggaaactgaacaacctgctcctgaatgactgctgggaaaagcaggaaagatctaaaactgacaccctaacatcacaattaaaagaactagagaagccagagaaaacaaattcaaaagctagcagaagacaagaaataactaagatcagagcagaactgaaggagatagggacacgaaaaacccttcaaaaaatcaataaatgcggaagctggttttttgaaaagattaacaaaatagatagatcactagctagactaataaagaagaaaagagagaagaatcaaatagacacaataaaaaatgatgaagcagatatcaccactgatcccatggaaatacaaactaccaacagagaatactataaacacctttatgcaaataaactagaaaatctagaagaaatggataaattcctggacacatacaccctcccaagactaaaccaggaagaagttgaatccctgaatagaccaataacaagttctgaaattgaggcagtaattaatagcctaccaaccaaaaaagaagcccaggatcagacagattcacagccgaattctaccagaggtacaaagaggagcttggtaccattccttttgaaactattccaaacaatagaaaaagaaggactcctccctaactcattttatgaggacagcatcatcctgataccaaaacctggcagagacacaacaaaaaaagaaaatttcaggccaatatccctgatgaacatagatgcgaaaatcctcaataaaatactggcaaaccgaatccagcagcacatcaaaaagcttatccaccataatcaaatcgacttcatccctgggatgcaagggctggttcaacatacacaaatcaataaacgtaatccgtcacttaaacagaaa

SEQ ID NO: 128813 - DNA, 1771 bp, Homo sapiens
  misc_feature (1)...(1771): n = a,t,c or g
tcagtcaaatttccaggaacaaaagtccttttcatccttttcttgcccctgctgctgtctctgtcgcctcccttgtgcaaactgagagaacatcagctgccggtccagcagctccattctctgctgtctctggatgtccagcgtggctcccatcccaattctggcttcgctggtgggttctctggaagtcaggtttcctgttacggaaagcaggctctggatgttacatttggggaatgttagtgtcttcacacacggagctgagagtgtctgggtccccagggggcgtttcttgctttcccttgctcgctgccccagtgcggggagaatggtggctgcttttgaatttcctgactctggtggcttcactgtcacatctatggggtgtaaagggaggaagagtgtcgagttttgtgccatgaacagattccgtttctgcagaggacagcgtgcaggggacacccttcgaggctttggagccacctaggaagcaggctggctgctgcacaggcctctgctggcctccttgcacatgtccttggtgggtgaggcagccacgtgagatggcttccggcactttgctggcgtgagtaagcccttccctggcaatgccagctcttgccgtcctcacctcctgnggccccagtggcccgcatgacggctctctgttctacacagccctcctggtcttcagtgccctgggaaacatccttgccctttgccttacctgtcagagagaggaggaagatcaactgcacaggcatctacctggtgcacctggctgtgtctgacctgctgttcaccgtggccttaccgggaagggtggtgtgttatgtgctgggctccagctggcctttcggcaaggggctctgcaggctgacggcgtttgtgctctacaccgacacctacgggggggtctacctcatggcctgtgtgagcgtggaccattacccaacttgtggtctgtgcccactggggcccgtgcctccgcacggctggccgcgccaggctggtctgcgtggccatctggaccttggtgctgctgcagacgatgcccttgctcttgatgcccatgaccaagccgctggtgggcaagctggcctgcatggagtacagcagcatggagtcagtcctcgggctgcccctcatggtcctggtggcctttgccattggcttctgtgggccagtggggatcatcctgtcctgctatatgaagatcacctggaagctgtgcagcacagctgggagaacccagtgaccagcgggaaaggacaccaccggcggggcaagcccgggaggacccagtgaccaaccagaaaagacgccacccgcgggggcagcccaggaggacccagtgaccccgcgggaaaggacaccaccagcaggacagcccgagaggacccagtgaccagcgggaaaggatgccaccggcgggacagcccgggaggacccagtgaccagcaggaaaggacgccactggcgaggctgcctgcttacgctgctgatgctggtggccgtggtggtctgcttcagcccctaccacctcaacatcaagcagttcatggcgagagggatgctccacctgccatcctgtgccgagcggagggctttcttactgtcccttcaggccaccgtggccctcatgaacatgaactgtggcattaccccatcatttacttctttgcatccacccattacaggaaatggctcctgggcattttaaagctcaaagggtcttcctcctcctcctcctcctcctccaccttgtatt

SEQ ID NO: 128814 - DNA, 468 bp, Homo sapiens
atggtcctagttcagtggcttactgctataacctcagcattttgggagactcagaataaaggttctcttcagtttgaagacaaatgggattttatgcgcccgattgttttgaagcttttacgccaggaatctgttacaaaacagcagtggtttgatctgttttctttgggagcaaccctccaggactccagtggacctctccttacagggaaacttaagaagaagaggaaggttagtggaacaaaatacaagaagcttcttcggcaactagtctcaaggccacaactgacactcatcatcttctcctctacaatccattctggattcccctcaccctcatctagcatctctgctggttacaacgatttgcctgatcatgtgacacagaccctcatccctgatatcgaaagcaccttaaaccccaggaccagtgactgtgttagcttacacggcacaaagactctgtag

SEQ ID NO: 128815 - DNA, 3890 bp, Homo sapiens
atttcgtgccgcggcgggtgcaaccacaaaggctaatccgaaggagtcggggaggctcgtggagtcgatgcttcctcttccaagtcaggtcggctcccgttaccttctcagcattcgccgttccggtcttcctgagcgcgtgcatgaggtctttcgcgtggggaagctccggtgaccatgtaggggacaagagtgaggaagctcctggtgcttgggacgaggtcagcgctgtcggcgcgctgctccagcgcccaccacaccctggtgcgggccgacgggccctgggccctggtgggagctccggcctccggtcaaggcctgaccgggagcgccacgaattctcgcgtcgtctcgcgagagtccaagttaaagaacatggcgacgtctaatctgttaaagaataaaggttctcttcagtttgaagacaaatgggattttatgcgcccgattggtttgaagcttttacgccaggaatctgttacaaaacagcagtggtttgatctgttttcggatgtgcatgcagtctgtctttgggatgataaaggcccagcaaaaattcatcaggctttaaaggaagattttattcttgagtttattaagcaagcacaggcacgagtactgagccatcaagatgatacggctttgctaaaagcatatattgttgaatggcgaaagttctttacacaatgtgatattttaccaaaacctttttgtcaactagagattactttaatgggtaaacagggcagcaataaaaaatcaaatgtggaagacagtattgttcgaaagcttatgcttgatacatggaatgagtcaatcttttcaaacataaaaaacagactccaagatagtgcaatgaagctggtacatgctgagagattgggagaagcttttgattctcagctggttattggagtaagagaatcctatgttaacctttgttctaatcctgaggataaacttcaaatttatagggacaattttgagaaggcatacttggattcaacagagagattttatagaacacaagcaccctcgtatttacaacaaaatggtgtacagaattatatgaaatatgcagatgctaaattaaaagaagaagaaaaacgagcactacgttatttagaaacaagacgagaatgtaactccgttgaagcactcatggaatgctgtgtaaatgccctggtgacatcatttaaagagactatcttagctgagtgccaaggcatgatcaagagaaatgaaactgaaaaattacatttaatgttttcattgatggacaaagttcctaatggtatagagccaatgttgaaagacttggaggaacatatcattagtgctggcctggcagatatggtagcagctgctgaaactattactactgactctgagaaatacgttgagcagttacttacactatttaatagatttagtaaactcgtcaaagaagcttttcaagatgatccacgatttcttactgcaagagataaggcgtataaagcagttgttaatgatgctaccatatttaaacttgaattacctttgaagcagaagggggtgggattaaaaactcagcctgaatcaaaatgccctgagctgcttgccaattactgtgacatgttgctaagaaaaacaccattaagcaaaaaactaacctctgaagagattgaagcaaagcttaaagaagtgctcttggtacttaagtatgtacagaacaaagatgtttttatgaggtatcataaagctcatttgacacgacgtcttatattagacatctctgccgatagtgaaattgaagaaaacatggtagagtggctaagagaagttggtatgccagcggattatgtaaacaagcttgctagaatgtttcaggacataaaagtatctgaagatttgaaccaagcttttaaggaaatgcacaaaaataataaattggcattaccagctgattcagttaatataaaaattctgaatgctggcgcctggtcaagaagttctgagaaagtctttgtctcacttcctactgaactggaggacttgataccggaagtagaagaattctacaaaaaaaatcatagtggtagaaaattacattggcatcatctcatgtcaaatggaattataacatttaagaatgaagttggtcaatatgatttggaggtaaccacgtttcagctcgctgtattgtttgcatggaaccaaagacccagagagaaaatcagctttgaaaatcttaagcttgcaactgaactccctgatgctgaacttaggaggactttatggtctttagtagctttcccaaaactcaaacggcaagttttgttgtatgaacctcaagtcaactcacccaaagactttacagaaggtaccctcttctcagtgaaccaggagttcagtttaataaaaaatgcaaaggttcagaaaaggggtaaaatcaacttgattggacgtttgcagctcactacagaaaggatgagagaagaagagaatgaaggaatagttcaactacgaatactaagaacccaggaagctatcatacaaataatgaaaatgagaaagaaaattagtaatgctcagctgcagactgaattagtagaaattttgaaaaacatgttcttgccacaaaagaaaatgataaaagagcaaatagagtggctaatagagcacaaatacatcagaagagatgaatctgatatcaacactttcatatatatggcataattttgaatatcatggacaatatttagaacccaaattttggagtgcttgggcagaaagttgtaaagtttgtgctgagagaaaggtttatttggactttgattacataaatattaccatctctgccttaccttacaaaaacaactatattttgccaatcacattagttagcatgatggcattcccttcatgttgcacactctttgacagcatgctgttttgtggagaaacttgcattcatgaagagcccattatcaacttttaaaagtgaatttgatttgtacccaccaggagaaatacagttgggaagggtgagggtggggttcttgttgcttttttctctttttttcctctcttaaaaaatgtacttgcacaaggaaggatcttcagatattcatgcactgaaaaatgctgttatcttttgtttttaaaaaatgcaattaaaactagaaatagcactcttggtttcttttgatgaaaagagtgagctggtcaatgcaacattgggaaacggcagatgtagataattcagcattggcgtatttgcttgtcccaatacaagaatgccaaaggaggaaacaggaaaaattgccgtccattttaaaaatttaggtttgttgttttaaaccataattgttctcagaacttttttggaacttcctaattttgggtcatttaatttaagaatgagagtcatgatgttttgatttatgaaggtgaatttaatgcaaaagtgggtaacactacattcatagcaaagttttttattaaattttataaatttttaatagccaattatgtcctaattgtattttggggaatgaacagcagcaaatactgtaaatgtacagttttcttttttttttttttggttatgtatacaaaagttttaactactttttggtgtttatgaaaatcatttagttgacaaggtgcctatgccattgttaaattttctttaagtaatttaacaacagatttgctaatttaaaaaaaaaatgaaaaaaaaaaccttaccaccattttgtaaaggtctgaaaccacattgggcaccctttatccaggtccctcccccccaacgtacacttaaaattggtgccgagcagggatataacctgcagttaagtgaaaagaaaaatccagcctccccctccaaaaaaaaaaaaaaaaaa

SEQ ID NO: 128816 - DNA, 359 bp, Homo sapiens
  misc_feature (1)...(359): n = a,t,c or g
aaaacaaaaccaaaccaaaccttaatgacttaggaaggtggctttagtggccgcatgaagcacaccctgattgccgaggaacaagagtgcaaagctaagaaactgaggcattttgaagagtttgaagacacttggcttccttatctgacccccaaagatgaattccatcagccgtggcagctgaaatatcctaaattaattctccaagaagccagcagtgtatctggggagctccataaagaggctcaannnnnnnnnnnnnnnnnnnnnnnnnnnnnnnnnnnnnnnnnnnnnnnnnnnnnnnnnnnnnnnnnnnnnnnnnnnnnnnnnnnnnnnnnnnnnnnnnnnnnnntcgtgcc

SEQ ID NO: 128817 - DNA, 452 bp, Homo sapiens
cctgcagatagaaataatctaggctttggaagaacttgctgccaaagagaaagctaatgaggatgctgtgccagtgtgtttggctgcagatttccccagtgctggcatggggtcatcctgtgatggacaagaagatgaactggacataaagagtagagcagcatacaacgtaactttgctgaattcatggatcctccgaaaatcccacacctgaaagagaaaccttattttggcatgcggaaaatggcagtgcgctggcatcatgctgaaaatctggtggacaggccccaaagaggaaagtgaggacgactctcatcttgaaggcagagatcttgatacttggcatgttggtgttaagatctcatgggatgtaaagacacctggtttggcaacaccccaaggagactgctatttcatgcttggtaatctttggagaaccaaaattatattgg

SEQ ID NO: 128818 - DNA, 1704 bp, Homo sapiens
atgccctttaagtgtaaaaagcagcatactttcaataaaaccagtccaaaggaaggagccatcattttcacccacggctgtctgtgcacgtctccttttaactctgagctcagtgaacacttggggaatttgaaattgtcctcatgggaacatctacaccatagaagtcagcaaacactctcggtcagactccacgtccccactccacagccagttgagcacgaatttatccaactgatttatattcacacaggtgcaaaattacaggcgagcaaggttattattgcaacaaaagatgggaagcgacgtaaaagtcccttgtggcagctgaaatatcctaaactaattctccgagaagccagcagtgtatctgaggagctccataaagaggttcaagaagcctttctcacactgcacaagcatggctgcttatttcgggacctggttaggatccaaggcaaagatctgctcactccggtatctcgcatcctcattggtaatccaggctgcacctacaagtacctgaacacccagctttttacgggccccttgcccagtgaaagggtctaatataaaacacaccgaggcttaaataagccgctgtttgtgagaccttcctcaagctcaatgactacctgcagatagaaaccatccaggctttggaagaacttgctgccaaagagaaggctaatgaggatgctgtgccattgtgtatgtctgcagatttccccagggttgggatgggttcatcctacaacggacaagatgaagtggacattaagagcagagcagcatacaacgtaactttgctgaatttcatggatcctcagaaaatgccatacctgaaagaggaaccttattttggcatggggaaaatggcagtgagcctggcatcatgatgaaaatctggtggacaggattcagctccaactctgggatcccgtggatggaacaacagcctcttcagctgtgccaaagcaaggaagggacaagaggagagaagtccccaacaccctctcccagccaaacagccaagaaggcctcatctcagccttccacagccgctgcgtgcatgctgtattttataaactcacgtcagcacccaagacaacatccctaccagacgtcccttctgacctcctggcagagggcttggcggcatctagagcaggtcaagccttatggaggtgtgataagaaatcccttcttaccttggttcgtaagataaacttgcagggcaagagggatggaggaagatcagccacgaaccagcaatcccagcctcacttggataacaccggccttgaaagacagctcgagcagaaggtgggacgatgccgatcaccttggagaggtctcggccatcttgaaggaaatgctcagaaggggcacctgcttcacggtgttaacaagaatgggcagcacctgcttcggcgccacggggtcagcatccgcgcgggccgcgccccgcacctggcagctgctgacacagcaccgggacgcatttcctgcctgggtcactcagaggcgctcaagcctaggatccaagctggagggctgggtgcggagagtatttggcaggtgttgtgggaaggcgggagtaacagcagcgttttttgtcggcatgatgaagagccggctgccgagcttcctcttcctggcaagcaggcgagtggtggccacatgaaaagaatgaggagctga

SEQ ID NO: 128819 - DNA, 1462 bp, Homo sapiens
atggtaccctccaaaatgacaaccaccatcaaagtagtgacacagtcactacctaagttaccctccaaaatgacagccaccatcaacatagtgacgtggtcactacctaagaatgagcggggagtgttcaaaaaacccaagccccacctcagaccacccaacccaaaccagatgcagcagtccttcgggccggccagaacccccgagcccaggatctcggactgggagcggattcccacctggggattccggttgtcaccagggtggatgcagtgccgcatgttggagacggtgatccactttactgagtcccccagtgtgaatgctgacttcatctcgaaacacctcacagacacatccagaaacaagtgtggccaggaaagaccaagaccccttcttcatcacagcttcagaaacaactggcaaagttgctttattctccttaatttcaacagctttgctattttcgtggaaggagttcattccttccagtgggttctcgctcccaacgacttcaagaatgaaatcacagaccttctcagagtgaagccacagaccctcacagtgagtattacagctcttaaaggtggcacatacacagttgttttttgctcctggtggattcgtggactcgctgacttcaacaacgatcctgcacctcctcacggtgtttttcacagggccagtggatttcataatgtgagtgctgtccagcaccaaaggaaatggccaacacgcatggagcagcctgcagcgtccagcaccaaggagggtggccagcaggcatggcgcagcctgcctgtcccaggaaagcaggagtcacaggacacaactggacccagggaaaggccctggaacaaatgcaggcaaatgtgaggatgctcaggctcagctctgcaaggagagaacgagctttcgggtcaccatggaggagtgggcctcactggtcaagccttccccactctcagcctcagtttccccgcagagtgggaaggccaaagagactgtcagcaaagggcctgtgcaggagccacagtcgtggtcaatacatagttgccagctcttgagagatgacaacctgctaacagtcctcgcttgctctgggcgtctgctcggcctcctggccacgctggaggagcccttcagcccacagctgcgctttgggggcccctctctggggctggcggaggcccgagtgggctccctctgctggcggggagaagcccatgaaggtttctgccagacccccaaaagcacacaggaccctcacgtgtggggtggggtgtacatggagcaggcagcattactgcaggatgtggacaggattctttttcagtttcagggaaacgtggagagaaggattcggtcattttcaggagaagatgcagaactgaagccgcgagaatggccgtatgcagtcatgatggagctggactttggacttaggagaaaaagccattga

SEQ ID NO: 128820 - DNA, 566 bp, Homo sapiens
  misc_feature (1)...(566): n = a,t,c or g
ggtatgtgaacagctgtggaggtcagaatctcgggaantgaatcaggccccagcccatgccccccagcccagccctcaggattgttagatggaacaaggctccatcatcacccaggcatggagggaagatgccctggtccttaccaagcaaggcctggtttccaaagtcctctccgaagaggcctcatgtttgccacatcttaaaagtcccctttctgctgttcttgcactcagcatgttggacagtcaagttccccccgctgagcaaatccacacataaggagggagtcaacacccattgctatgtcggatcagctccagcgtctccaatatcagttttatcagatcccaggaacctgcctgctcccagaggtgacagagaaaaatcaaggaaggatctgtatggtcactgacctggatgaaacccttgtgcatagctcctttaagccaatcagcaatgctgactgcctagtgcctgtagagcttgaggggaccatgcaccagatccatgtgctcatgaggccttatatggatgagttcctgacatgaatggaggaaatgtttaa

SEQ ID NO: 128821 - DNA, 305 bp, Homo sapiens
ctgtctgggctggagatgttccaggctggagcgggggctccaagctctccaggctattgaggcagctgctgggcaatttcgtggtctggacctcctgacaagcacagcaacaggggggcctcctgtggacttgagacttgggcaggggctgctgcaacagacacagcagggccccatccagctgctggaagatgctgagcatgagcagggtctggcggagatcaggggacaggctccactgctcctcttccagcaactccctgaccactccaaagtcttgtttgagctgcagcgctccctgcagg

SEQ ID NO: 128822 - DNA, 2653 bp, Homo sapiens
tttttttttttttttttttggtagcagggttttaaaccttaattttgcgctccgtgacccttcagatagtgatttgaatgattaagtgaaactcttcttaggttaaagtgtcctagtaccacgctaaaatcatcttgttggtctcgttggcgctgtcaccgaccagttatcagcgcccggcttgtccccgcttgcccgccgcgtgccctggcccggatgtgggaggcgaaggcggtgaggcatttccagagcggtgagatgagcgccgcgcataattcaggcgatgccccgtctccgaacagcacgtccgacgcaggggctcggagccgtcatggcctcacgtccgcaatcactgagcagttgagattagtggagcggaccttctcactgctcaccgtctgcaggaaggtcctccgccccggaagaactcgtgcaggcggaagtgtcgcattgcgtgaggccgtgaatggctgcgcttctgcgggatagacttccggccgccggctgcttagcaggcctgcgaaccgcagctctgggcttcctgtctgggctggagatgttccaggctggagcgggggctccaagctctccaggctattgaggcagctgctgggcaatttcgtggtctggacctcctgacaagcacagcaacaggggggcctcctgtggacttgagacttgggcaggggctgctgcaacagacacagcagggtcctcatccagaagatgaacgaggctatgcatgaacagggtttgagtgggcacagggacaggtcacagcagctcttcttccagaaaatacatgaccactccaaagtcctgtctgagctgcagcgctccctgcaggctgagccgaatcccatgggtaagaatgtggtcaagccaggcacccacgatggccgtcagagcctgaccaagggcaggggcctgggcttgaggtggcaacccttgcaatccttgcaacacaggctccagtaggttgcggaccactaaaccagcatactcactaggagcactgggaggttcaggacagagacgaagccgccagtaccgaccccgtggcatgtagagcttgaaaccttgcatggcttgtttatgacattcttgagaaaagacacttagtgactcttcaggcaggagctggatctgtgcagtcagcttctggatctccaggcccagctgctgctccacttccagagctaagctttcctctgaggccaggctatacaaagcttctgcctcatgcaacagaggaggtaagtccttttggatcaggagcaggaaggaagctgggtcccatgctgccaagtactgctgagctctgcccaggaaccagagcaaggtggtctgaagggtacagagacctagggcgacaggcgcaggatctgcaggctggcagaaaatccgtcgtaacctgggctctcgaagggcatccaagagaggaggaaagagctgctgcaaaagttcagcagtgccagaggatgtgggaaggctgctctgacccccaagagctgatcccaaggcctggcagaaaccctgacccagtgcctgactcagctgttgcgctgttgccctggggtccctccagggtcccagatttaggtccagactctgagcacaggctgcccacagcagggtccagtattggctccacaaggccccagcccctccgagccctagtccacagctggctgaacccgccacgcccccgaccaggcccagcagccctggtagcagatccccctcctcttggcaccgcctgcggagctggtccctcaacgccgatccttggagcgcctcgtccagccgacttgccacctggcaaccccgctcccccgtcaagaggcggagcacacgggacgtggggaaaggacgtgcggcccctgggacgtggctcaaggcttttctctgtagtgtgtggtaggcgggaagtgcaaagagcagctcggcgagttgggacgacaggcccgggctggcgggctcccggccgagagcgcgaagctgcatctcgatgacagcctccaggcactgggcggctagtccgatggggcgcgctagcagcagcggctcgagagtctccccagggccgattcgcagaaccgccccttgggaagggtgcagctgcaggtcgcggcaccactggggcaaggggctagggccgccggatggcgagccaggactcagggtcttcatgagtcgcacagccgactgtaggtggtaggcgcagtctcgggcctggaggagctgctcccgctcgcgatgcagccgcagcaacaccgcccggagacgctgcagcgcgggagggatcgggccgccacctgcgggcccccgcctccaggccgcagcatcagcctcgtagtcctcgctcacatccgccggcgtcggccaccacggcgtccctccagaagttccgctcggccagcagtgaacctcccagcgaagaccgcccgttcgacttctctcccactgctcctccccagtgcccccgggttgcgccctcagcgggggcacgataacgagtggaggcaggctacctgagcgagacgcctgggccatggggcggcgggtccagaacgaacctaacgattcccacttccctgcacggaccaacgcccgccgcagctcggacttcgccccatcgcaagagccgttt

SEQ ID NO: 128823 - DNA, 6223 bp, Homo sapiens
aaaaatatacttgctttatttaccaattttctaaaaggcaaacaggtcataaaaagacacaagcagtcaaacaaatctattgcactgggtaaagaaagtttggtttgcacacaaacaaaccacttgtccagcaaggctcaacaaatcatcacagaaactctgagagcttatttacatatctcttcgggaatatattaaaaagaaggctcagtttaaaatagagaaaaactgtttaacacctgtgtaagcacacacactaaagaaaacatgacttgatgcttggcatcacgtaaacaaattcacaagatgatcctattaagtcaactgcttggcacgcgctgaagctacagttaacaatcagtgagcacatattaaatgataaaataatgctgatggtaaacattcataacagcagagtaagattttggcagttttgtgtttcggtaacataactgtaaccttagatgaacacctatcccttcatgatctgactttagaggcaaggagtttgtaacatctaatggccataagaatgcagactgctaccttatcataggcataggcagctgatgttactttgtaaattaacgaaaaattaaagtgttcttgtgtttatgaagaataggtttaatagtcaggcataagatggttttacgatgaaaacctagtggattacaaagagatttcacctccatcaaaaaacagaaaaccctggtcccagttgggcgtggtggctcacgcctgtaatcccagcactttgggaggccgaggtgggtggatcgcttgaggtcaggcgttcgagaccagcctggccaacatgataaaaccccgtctctactggaaatgcaaaaaaatagctgggcgtgctggcgggtgcctgtaatcccagctactcaggaggctgagacaggagaatcctttgaacccgggaggcggaggttgcagtgagttgagatcgggcctttgcacttcagtctgggcaacagggcgagactccatctaaaaaaaaaaaaaaaaaaaaaaaaaaagaaaaccctggtcccttttaagcctcatagtcttggtccaattttaagtcaactgttcttcagtgataactttgaatttccaccagggaccaatattaaattttctgaaccatctttggaatatacaatgcaacatgaggttttgtaaaaagccgggcagactggcctcacttttccccaagtgtccaaatgacctaaaagtgctggggacactggcagaggcctgaagctgctccgagagaggtcgggctcatgaaaagaatgagggctgtgcacccaacccagggtgcagtgggagaggtgagctcactgcacccctgaaaatacagatgcagtcgcaagctgtcagactgagtggcagtggctgctctcggccaggagatgtgatgtgggcttggctgggtggaagcagatgtctgggtggttccaacggaagaaaaccaaacaggactgggtctcacatgtgttggtcacagcctggtttgcaaagggaagtcaccataaagagatgactgatgacatattttaatctccatattggccatcatggtctgaaaaggagacaagaataatgcagaaatatacagagggtctgtctgcgtgtgcattcatccgatggagttggccacacaaaccactaggcttctttagtccagagcaaatgtttcaactttgttcactacaaacaaaacctatgtcagactgaaatattgaccacaccagaagccaaagctgttggtttgccaaacaacgcttcacaccatttaatgtgaaacgttttgaaataaaactaggagaggctgctatctccatttggtatgtataaaaaaacactctaccttgactaaatgataattcagataaaaagcagtccccaagagaggacaaaatttgatctgatccaaacaccctgggaaagctctggaagccagagtccccagctggtgcagcagacagaggtctcgtcacagtcacaggacttctgggagcactgaggcaacttccctgacactaagaggcgcttagtctttctcaagttaaataacaactaaaatctcttccccatcccacaaaactccacatatatattttatatataaaaacatatttctttccgaactctccccactctccacagttttaagtcgccccttcagaaaactatgttgtttttttttctaaaacaaaaaaagcaacatgagcatatgtgtccatttcagtggaaacagccatgaagatctttcatctcttccaagcaccacctggtgtacctcgctggctgccgggctgaggtggggcaggggttacgtctgctcttcgatcctgtgattcaagggggatccattttcgtcttctttggtgtccgacacttcgctgagtcccagagaaggaatatcttcctcatatggtatgcaaatattacctttttccttgttttcacagtaaacacattctgccacgtcgatggctgcgggcaggccgcccgtctgcatccactggtggacctcgcgcagctcctgcttctgactctccgtgaacctgggctggagtttctgtaggagcttcagcttctctctgtcctccttcaaaaccgcttctaaatttcgggaaggcagctggtacgtcatcatgacgctgctgtccgcatctgccatcagcagccagatgggatcctgcaggacgcacttaatgaaatgctcactttcttccataccagtgttcatttttgctttgtgattattctctgaggagtcaatgcttccaaaatatttgctggtatgacttgtgtcactactgcctgccccactcggggaggcgtcgcagcccagtgagccggagcccagagactccgaagcagcagagcccgaggctgagcagaggtcctcattcagcaggaggtttaggaggccgcttgacgtggaaagggcgtcactgttctgtgtgtctgagggttcatcacgggtcagaggcgccttcggctgctggtcccgagaagtgccaggtttgcagtccgcccctacagctgctgtctctgtggcccctgtggtccccatggctccagtgccaccctcaggggcttcctccagctgcagcaggttgagctgcaggggcgagctgctgcgggactgaaagagcggtggggaggccctacccatggccgatggtggggtggcccgggtggctggacaagcacatggctgtctggggatcgaggtccggctggggaactcaggctgtgaggcagaggccatctcggatgtgagtgtggggtggctcggaaactgaggctggctggggaagaaggcctggggcaggtttggggtccccgaggggaaggaataactgggtagcatgaatgccatgacaggcgccaaaggggcagggaaaggtgggggctggactgcaaactggtgctggaggtccacgggcacagcaggcactgtgaagctggcgtggggaggtgccgggggtgctgccacagtccctggcgctggaaacacgggcagtgaataagctgctggcactggggcgggaaagggcacggctgggcagctggactgggacgtgtctgagggtgaccaggctgtggcgttcaagcccaccagcgggggccgggcggacacgggccccccagatccggtgctctcagatgagtctcgaggtttgacccgcttggacttcaattttctgttctttcctgtttttttccaaggtgaatctattccggaagtatttcttagtccaggggcagttcgttcacttggctgccccttggatctttcttgcaagtagtaatggcagtgggactggaaaatgctgagttttcttatttctttgaacttctgcaggaagctctgctcctccttctgtgtgtgtgcagcgagtacctccttggtgaggcccagcttcttgaagggctccttctcttggctgagaccacaggccagggcagggcccgccaggcagtccagggattctggcccactcgcagcatcttccaccatctctaactccggctgcggcttcttgtctcccacatggacgatggtgctgctgtagctgcactggctggtgagcgacgccacactctctgccttgcccggcagtgccagcgaggtcaggtgcgtacctactcccgtgcggctgttcaccctggagggcggctctgcctctccagcgtgtggccctgggctgactgtggccttccgcttatcactggaccttagcgctgggacgtttgctgggaactcgcatttcctcttcagggtggcagcctcattgcagctctccaagtacctgatgacgctgtccaagcagctgatctgctggtaggagcaggtgggctggttcttgcaggccaactcctcggggaagctgacccccaggctgtccttttccatggcagggacagctttcttctcagctgggggattagtttgcatttctgtaacggattttttcttttgttctccagattcatgagaataatgacttctatttttggtcttgttaccatttttacaaatttcggctctcctccggcgtgagtcctcatggccgttgctgtcgctggaggaggtctggctcataaggtgctcgtgggacccgttgctgcccagactcccgtagccactggagccgctgtgggggacgggctgcagcaggagccggtggatctgctctgtgagctcctgaatgctggggtgcagggccttctcctctgtgcaggggtgggctgcaaacacgtcctcattcaaagggcccaccctgactttgtgcctcccaatgatgaaggagattttcctgctccatgtgttgtttatagctggaccagctggtgtccaacgtgatgtactctccgttccgggcgcgaaaccgaatgggagaatagtcgaaaggctgcccgcctgactgcaggatctttttgtggatggccagcatcaagggcctgtcactagggtggagctgcacgagcactggggtttcaatcaggtcctgaggtaggtagcccaggagagggaccgccctttcatccacatcctggaacaaacaatttggtgtatgggtggttgtaaaaattctcttttcaggaggaattctaggggcttcataaccagagtgcactctctctgccagcagaaggcagcaaagctgactctcagcaccttgttggtcccgcaccttgaccaggtagggcgtcatgcggaaggggtggtagcggatttcattctcgtggcttttccggacactgacacggcaaaagaaagatttctcctccatgcattcttgagtaaaagaatctgctccactgcacatgctccacaagggaagcttgtacggggaggtgaaactgtggaacacgcccacatcgtgaggcgccaggaactccacaaacttggcatcgctgaaggcatctcttttacagtgaaatatggatgcaacctggtcagagatgtacaggatcttcccagacaccagggacacggccaccgcaaacatatcggcattcttcacaatgtgctcagaggtaacgctctccatctcctccacggtgtaggagggcacgtctgctccacaggggtgaccctcgctggacatcagcagctggtaatactcttcattggctttcacctgcttcacgctcctgagggcgtacttcaaggtggccagcgtactggccttgcccttggccttcttgtctgcagggaggtggaccttcagctcctttagtgtttttatcagttctttgtgtgtgtccactttcgaagactggtcgctactgcagccacttgtagatgggttgtgttcagattttgccatcatcaggctaaaggtatctggactctggcgggcatccggtggctccaccagcatccccagctccttcccactgtcgtcacagtcactgccctgcgagtcccgccccgtggagcagttttcgttggtctcatgtccactggagccactgctcatgtccacatcttcctgcagtgggacctggctgggctggggctccacgggctccttggtggggttactggggctgggcggaaattccgcgtatccattcatgctgggctctggaacgaagctttcggacctcaggctcctgagctgcgaagcgggggttcgagtccccaaccctcggtgtcaccgcagttcaaacgagcgcaccctgcgcgcggctcgaccac

SEQ ID NO: 128824 - DNA, 489 bp, Homo sapiens
  misc_feature (1)...(489): n = a,t,c or g
cggtcgacgatttcgtccggcactaggaacagccccgagcggcgagacggtccccgccatgtctgcggccatgagggagaggttcgaccggttcctgcacgagaagaactgcatgactgaccttctggccaagctcgaggccaaaaccggcgtgaacaggagcttcatcgctcttggtgtcatcggactggtggccttgtacctggtgttcggttatggagcctctctcctctgcaacctgataggatttggctacccagcctacatctctgtggcttcctgttgtggtgcatggccccgagcccttctaatggggctgaactgctctacaagcgcatcatccgtcctttcttcctgaagcacgagtcccagatggacagtgtggtcaaggaccttaaagacaaggccaaagagactgcagatgccatcactaaagaagcgaagaaagctaccgtgaatttactgggtgaagaanagaagagcacctan

SEQ ID NO: 128825 - DNA, 3184 bp, Homo sapiens
tcatcggaccggcattcccgggtcgacgatttcgtccccgggcggcgagacggtccccgaacatgactgcggccatgagggagaggttcgatcggttcctgcacgagaagaactgcatgagtgaccttctggccaagctcgaggccaaaaccggcgtgaacaggagcttcatcgctctttggtgtcatcggactggtggccttggtactggttgtccggttatggagacatctctccctctgcaacccttgttaggattttgctaccccgccctacatctcaattaaagctataggagagtccccaacaaagaagatgatacccagtgggctgaacctactgggtagtgtaatggtgtgttcagtcattgctgaacttcttctctgatattcttcctgtcatgggttccccttctaactacatggctgaaagtgtggcttcctggttggttggtgcaatggccccgaagccccttctaaatgggggctgaaactgctctaacaagcggcatcatccggtccttttctttccctggaagccacgaagtcccagattggacaagtgttggtcaaggacccttaaagaccaaggcccaaaagagactgcagatgccattcactaaaagaagccgaagaaaagcctaccgtgaattttactggggtgaaagaaaaagaaagagcacctaaaccagactaaaccagactggatggaaactttcttggcctctctggtaccttcctacttggaagcttggatgttatattaggggactggtggtataattattttaataatgttgccttggaaacatttttgagatattaaagattggaatgtgttgtaagtttcttttgcttacttttactgtctatatatatagggagcactttaaacttaatgcagtgggcagtgtccacgtttttgggaaaatgtattttggcctctgggtagggaaaagatgtatgttgctatcctgcagggaaatattaaactttaaaataaaattatataccccacagggctgtgtactttactggggctctccctgcacgcattttctctgtagttacatttaggataatctttatggttctacttcctataatgtacaattttatataattctgaaatgtttttaatgtatttgtgcacatgtacatatgggaaatgttactgtctgactacaacatgcatcatgctcatgggggaggggagcagggggaaggttgtatgtgtcatttataacttctgtacagtaagaccacctgcccaaaagctgggagggaacccttgtgctgggtgtggtctacttaaataattactttaggaaatacgtgattaatatgcaagtgaacaaagtgagaaatgaaatcgaatggagattggcctggttgtttccgtagtatatggcatatgaataccaggatagctttataaagcagttagttagttagttactcactctagtgataaatcgggaaatttacacacacacacacacacacacacacacacacacacacacacacacacacacagagtaccctgtaactctcaattccctgaaaaactagtaatactgtcttatctgctataaactttacatatttgtctattgtcaagatgctacaatggaaaccatttctggttttatcttcaaagcggagaaacatgttgatttagtcttctttcccaatcttcttttttaaaccagtttaaggaacttctgaagatttgtccacctctgattacatgtatgttcttgtttgtatcattagcaaccaacatgctaaatggccggcacctagctctaagagcaattctgggagaatgaaaggaagtataaagtaacccataatctgcttggcaatagttaagtcaatctattcttcagtttttcttctggcctttaaggtcaaacacaagaggcttccctagtttacaagtcagagtcacttgtagtccatttaaatgccctcatccgtattctttgtgttgataaggctgcacatgactacatagtaagtacaggaacagtaaagttaaaacgggatgtctccattgatctggcccaaatcgttataggaggaggcatttgtctgggactaggaaaatctggagtttttacaccatactgtttaggagtccttttggatttaaactggactaaaacaagtggataactaaactatcaagattaaatatccagccagtacaagtattttttaaggcaaataaagatgattagctcaccttgagataacaatcaggtaagatcataacaaatgtctcatgatgtaaaaaatattaaagatatcaatactaagtgacagtatcactctaatataatatggatcagagcatttattttggggaggaaaacagtggtgattaccggcattttattaaacttaaaactttgtagaaagcaaacaaaattgttcttgggagaaaatcaacttttagattaaaaaaattttaagtatctaggagtatttaaahtccttttcccataaataaaagtacagttttcttggtggaagaatgaaaatcagrcaacttctagcatatagactatataatcagattgacagcatatagaatattattatcagacaagatggaggaggtacaaaagttactattgctcataatgacttacaggctaaaattagttttaaaatactatattaaattctgaatgcaattttttttttggttcccttgagaccaaaaatttaagttaactgttgctggccagtctaagtgtaaatgttaaccagccaggagaagttaagaattgagcagttctgttgcatgatttcccaaatgaaatactgccttggctaagagtttgaaaaactaattgagcctgtgcctgggctagaaaacaagcgtttatttgaatgtggaatagtgtttcaaaggtatgtagttacagaattccttaccaaacagcttaaattcttcaagaaagaattcctgcagcagttattcccttacctgaaggcttcaatcatttggatcaacaactgctactctcgggaagactcctctactcacagctgaagaaaatgagcacacccttcacactgttattacctatcctgaagatgtgatacactgaatggaaataaatagatgtaaataaaattgagttctcatttaaaaaaaaaaaaaaaaa

SEQ ID NO: 128826 - DNA, 455 bp, Homo sapiens; identical to SEQ ID NO: 117279
  misc_feature (1)...(455): n = a,t,c or g

SEQ ID NO: 128827 - DNA, 593 bp, Homo sapiens; identical to SEQ ID NO: 117280

SEQ ID NO: 128828 - DNA, 1095 bp, Homo sapiens
gtttggcggggtgaaaggttgcgaagatggcgacggccttgagcgaggaggagctggacaatgaagactattactcgttgctgaacgtgcgcagggaggcctcttctgaagagctgaaagctgcctaccggaggctctgtatgctctaccatccagacaagcacagagacccagagctcaagtcacaggcggaacgactgtttaaccttgttcaccaggcttatgaagtgcttagtgacccccaaaccagggccatctatgatatatatgggaagagaggactggaaatggaaggatgggaggttgtggaaaggaggagaacccctgcttgaaattcgagaggagtttgagcggctgctgagagagagagaagagaggagattgcagcagcgaaccaatcccaagggaacgatcagcgttggagtagatgccaccgacctttttgatcgctatgatgaggagtatgaagatgtgtccggcagtagctttccgcagattgaaattaataaaatgcacatatcccagtccattgaggcacccttgacagcgacagacacagccatcctctctggaagcctctcaacccagaatggaaatggaggaggttccattaactttgcgctcagacgagtaacttcggcaaagggatggggagagttggaatttggagctggagacctacaggggcctttgttcggtctcaagctgttccgtaatctcacaccaagatgctttgtgacaacaaactgtgctctgcagttttcatcccgtggaatccgacccggcctgaccactgtcctagctcggaacctagacaagaacaccgtgggctacctgcagtggcactgcagctccccgctcctgcaggtccagcgtcctcacaggaacaccagggcctgtgctccggagccttccttcagacccttcctccacgtgcccacttgggatgcagaatgcagcggagctaggaccccctccacggcctggacctcggctgcagtaaagttacgtgaggcctgtctctcggggcctggaagtggcagccatcagttgctcttgctgacccctcggagcaagcgccgcacaggtggtggc

SEQ ID NO: 128829 - DNA, 1990 bp, Homo sapiens; identical to SEQ ID NO: 117282

SEQ ID NO: 128830 - DNA, 639 bp, Homo sapiens
cggccgccgccgccaccgccgccgccatagagactgtagccgtggagactgttacttaccaacggggaccaacacgcagcagccgctgccgccgccgcgggagccgctgcccgaactcccggcccgaactccagacctgagcatgcagaattccgagggtggagcggattcgccagcgtccgtggctctgcgtccctcggcggcagccccgcctgtgccagcctccccgcagagggtgttggtccaggcagccagctccaatcccaaaggggcccagatgcagccgatctccctccccagagttcagcaggtaccccagcaggtgcagccggtgcagcacgtgtatcctgcccaggtgcagtacgtggaagggggagacgccgtctacaccaatggagccatacgaacagcctacacctacaaccccgagcctcagatgtacgcccccagcagcacggcttcttacttcgaggccccaggcggtgcccaggtgaccgtggcagcctcgtcccgccagcggtccccttccacagcatggtgggcatcaccatggatgtcggggggagccccatcgtcttcagcgcgggagcctatctcattcacggggggatggacagaccagaacttctggccaacctc

SEQ ID NO: 128831 - DNA, 2094 bp, Homo sapiens
atgaaaccagatgacaacagcacccagaacgagggaggacagagcttcgaggagcgacacgaaacactgcagagagtcaagttcagaggaggcccgaaaactgccccagggaggaaattaattgctttcttagggcagatgaactctggtacctctggaggccagcgagtaccaggagaggaggagctgatggccggaggagccacgtgcctcccaaacaccgaggctcatcagccaatcagaatgaagaatctccacaccccagcattcagactctgtcctctgacccttcaggataacgaggctgatgctttctggcaccaagcatttgtggactggggcatgcccacaggcaaaaagccacagactcttggtctgacctataagacaacacatgacctgagcatgcagaattccggggtggagcggattcgccagcgtccgtggctctgcgtccctcggcggcaccccgcctgtgccagcctccccgcagatgttacccctggaacttgtgattctgggggtggtgcgttggacaagtgcatacctgctcagtggtccaaggaggggcagacgaacagctacacctacaaccccgagcctcagatgtacgcccccagcagcacggctcttacttcgaggccccaggcggtgcccagcatggtgggcatcaccatggatgtcgggggagccccatcgtctccagcgcgggagcctatctcatccacggggggtggacagcaccagacactccctggcccacacctcccgctcatcgcccgcacggtccttcagatccaactcaaaagccccttcctccaggaagttctgctgttagctgccaactctttcttccaaaactcttttctcttttccaaaaatcttcttcgcaagctcccactgggtaaacattcgccagacagtgtccagtggccctggatctacggcctcctggtggcagggtctgagtctttggcctcgctgctatttcccaaagcctccagcagcggggagaccctgggatttgcgacaggacagctggctggggagtcaaggctgccatctctccttgctttcattctggttcccatcgatgtggcgtggggaaaggagcagctggtgactcagaccaccgtctaccgtgtgcagggttctggccagcacctaaacaaggcctggcaagagccagctctcgtaaatatttgtggaatgggtgaaaaggtggatgttcaagtcggattatgtcaacacagggcacacctggacggttggaatagctcccgagctgctagtgtatggcccggtgagactctaactcaccaccaggaccagtgtcaggcaaatttgcccccaggaatagaaacaagtatcttaggaacaaagggggccaggtacccgagccctcaagagcagggaggtgggcgagtgtggttggagcggctggaccctcgtggtcggtttccggaactgacctgtgatgcttgccgcagtctgacgtgccgccagggagagcatagtctgggggaacaggcgataaatcaatcagcacacatgacaaatccggacggggcaactcgaagtaccattacttgggattcgtctgaagccggactcaccactgaaccggctgcaggaggaccgcagtacatggccatgcggcagcagcccatgcaccagaagcccaggtggtgccgggccgagctgggaggagctggctctcccctggagcatggaggatgtctcccacgtcttccccgagttcccagcgcccgacctggcagcttcctgctgcaggacggcgtcacactgcacgacgtcaaggccctgagctggtgtacagacggcactgcgagatgtggtgataacctccagttccactacatcgagaagctgtggctctccttctggaacttaaggcctcctccagcgacggccccacctctcttcctgccagtgacgaagaccccgagggcgccgtcctgcccaagacaagcttatctccctgtgtcagtgcgaccccatcctcaggtggatgagagctgcgaccacatcctctaccaggcgctggtggagattctcatccccgcgtgctga

SEQ ID NO: 128832 - DNA, 3009 bp, Homo sapiens
cagtccggccgggcggagctaggggcgggcccctgcgtctctgggcgctggagcgcggcgactatcacgccgcgtggcggacggacggactgacggacgcgcagccttacccgaaaggccatggcggagcacgcccctcgccgctgctgcctgggctgggacttcagcacgcagcaggtaaaggttgttgctgttgatgcagagttgaatgtcttctatgaggaaagtgtgcattttgacagagatcttccagaatttgggcatgtacttgatgtgcatggtgttcatgtgcacaaggatgggctgacggtcacttctccagtactaatgtgggtccaggcactggatatcatcttggagaagatgaaggcttcgggcttcgaattctctcaagtcctagccttgtccggggcgggccagcaacacggaagtatatactggaaggctggagcccagcaggcactgacaagcttatcaccagacctccggctacaccagcagcttcaggactgtttctccatcagcgactgcccggtgtggatggactccagcaccacagcccagtgccgccagctggaggctgctgtgggtggtgctcaggctctcagctgcctcacggggtcccgtgcctatgagttcaacctggtttgtgatcggaagcacctgaaggacaccacacagtcagtgttcatggctgggctccttgttggcaccctcatgtttgggcccctctgcgaccggattggccgcaaggccacaatcctggcgcagctgctcctcttcaccctcatcggcctggccacagcttttgtgcccagctttgagctctacatggccctgcgctttgctgtggctactgccgtcgctggacttagcttcagcaatgtcaccctactgacagaatgggtggggccctcatggaggacgcaggccgtggtcctggcccagtgcaacttctccctcgggcagatggtgcttgcgggactcgcctacggtttccgcaactggaggctccttcagatcaccggcactgcgcctggcttactgctcttcttctacttctgggctctgccagaatctgcacgttggctcctgacccgtgggaggatggacgaggcgatacaactgatccagaaaacggcctcggtcaataggcggaaactctccccggagctcatgaaccagctggtcccagagaagacaggcccctcagggaatgccctggatctgttcagacacccccagctccggaaggtgaccctgattatcttctgtgtctggtttgtggacagtctggggtactacggcctgagcctccaagtgggggacttcggcctggacgtctatctgacgcagctcatctttggagctgttgaggtgcctgcccgctgttccagcatcttcatgatgcagaggtttggccgcaagtggagccagttggggaccttggtcttgggtggcctgatgtgtatcatcatcatcttcatcccagcagatctgcccgtggtggtcaccatgctggctgtggtggggaaaatggccacagctgctgcctttaccatctcctatgtgtactctgccgagcttttccccaccatcctccggcagacaggcatggggctggtgggcatcttctcacggatcgggggcatcctcacaccacttgtgatcctgctgggagagtaccacgctgccctccccatgctcatctacggcagcctccccatcgtggccggcctgctgtgcaccctgctgccagagacgcatggccagggcctgaaagacaccctccaggacctggagctggggcctcacccacggtcccccaaatcagtgccctcagagaaggaaacagaggccaagggaagaacttccagcccgggagtggcctttgtcagcctgggcaccagtgacaccctgtttctctggctccaagagcccatgcctgccctggaaggccacatcttctgcaacccggttgactcccagcactacatggcactcctgtgctttaaaaatggctccctcatgagagagaagatccgcaacgagtctgtatcccgttcctggagcgatttctctaaggcactgcagtccacagagatgggcaacggtggaaacctgggtttttattttgatgtaatggagatcacccctgaaattattggacgtcataggtttaacacagaaaaccacaagtactttaaaggaaaaggtgcccccggtcaccccatgccctctttgaaggcaaattttgatttgcttgcctgtctgcggggcgttggcagcagcacactgctcctctggccagcagtcctgggtgcacagaccaggcaagctggtgtcaacgaagggcggtcacaggtagctgacttccttcggatccccgtcactgggtgcccagaacagcgcaggaacccgccgagtcctccggcccctctgggcaccgggggtcctgccgaggagcgcctgcagtttcctggggtagctgggtccaggcggggtcgaggccgcatcttgcgagcgggtggcattggcagggcatctccgggcgagggcaccggcgccccacggccgcgcgcagggcaggggcgcgggggccccgggaagcccgagagcggaggaggcggccccgtggccctgcggccaggcgactgtacctgctgcgtgctgaagtcccagcccaggcagcagcggcgaggggcgtgctccgccatggcctttcgggtaaggctgcgcgtccgtcagtccgtccgtccgccacgcggcgtgatagtcgccgcgctccagcgcccagagacgcaggggcccgcccctagctccgcccggccggactgtggaccggagtcacgaggcgggcttgcgctctggcgccgcctgcggggctacgcgagccgggaccgcgtcctgtgcaatcgacggtgcccccacgcagcccgctttccttcgaagcgcaccccctctggttctccccatcttcatcttatgtcttcatgggccgtgccctga

SEQ ID NO: 128833 - DNA, 924 bp, Homo sapiens
atgggcccggccgcgggcgcgcctacctctcgggcttcccggggcccccgcgcccctgccctgcgcgcggccgtggggcgccggtgtcctcgcccggagatgccctgccaatgccacccgctcgcaagatgcggcctcgaccccgcctggacccagctaccccaggaaactgcaggcgctcctcggcaggacccccggtgcacgaaccaactcatctgtgaacatcttcctctagagggtcttggctttggctatttggggaacaaagattccttgagacatgtaaaggttgttgctgttgatgcagagttgaatgtcttctatgaggaaagtgtgcattttgacagagatcttccagaatttggtgggcttgccagtagtgctgttacccagagctcttcagcgaccttcaacaagtgccttagtctcttcagagtctgcacgcagcatagagcctgcagaccaatgcctcccctttcactttcgagcactccttcttggggaaaaggcatcccaagggagcggggcaaaaaagagcagaaagtccaacacgaccaccacttcgcctccaagaagcggctccaggagagctgcaacgccctcttccatacggtactcaggtgccagctggtctttgcccttcggtttccggactcaggctgcgcgcgcgcgcgctactaccctacagaactcactcgctttcggtgtaaactaagcctcacgacgacgcacaggagaagtgcccaaacaaagcggtcccgcgaagcgaccacactccgcatcccggggccaacggcagggaaagagggagcaggtgggagccagcaccaacagcccgccgggccggtctacgaggcccttctcccccagtatgccaaactcgagcagagaatcttgtctcagacccgggggcctccggagtga

SEQ ID NO: 128834 - DNA, 328 bp, Homo sapiens
atgcctgagcctcccaccccctccgtggactcctgtgcggccggagcatccccgacgagcgccaccccctgctccacggtgcccactcccatcgaccacccaagggctgagcaatgcgagcgcacggcgcaggactggcaggcagctccacctgcagccccgctcagggattgtaaatacaccaatcagcaccctgtgtttagctcaaggtttgtgagtgcaccaatcgacactctgtatctagctgctctggtgaggacgtggagaacctttatgtctagctcaagggttgtaaatacaccaatcggcactctgtatctagctcaag

SEQ ID NO: 128835 - DNA, 627 bp, Homo sapiens
gagtgtggattggtgcactcacaaaccctgagctagacacagggtgctgattggcgtgtttacaatccctgagctagacataaaggttctccacgtccccaccagactcaggagcccagctggcttcacccagtggatcccgcaccagggctgcaggtggagctgcctgccagtcctgagccatgcgctcgcaccatatagtattatggtgtttcctcaagtaattgctaaaagatacagggtctaattgttctataatactcatacccattttatctagatgttcaatggatctataagtctccccctgggattcatcatagtaactgtaacggaatctttgaccccaatggcaaaaatcagaagaaaccacaaagaaattactaggatctgctagatatttactgaagagttttccgaattcctgttcttttgactcactcagagctccaaccagtacaggaataatggtatacgtatatcctgcatggggtgcaataatggctctagcaggtctttttgtagactttacttgtgaaagccaaccttctagctgtgcattcagctgtggtcctgagcactagctctaaagagtcagtgaggatggggatccttgttcagcaggaa

SEQ ID NO: 128836 - DNA, 1083 bp, Homo sapiens
atgccaaaatgtgtgcatgcatcgatgtgcattgcagggtgttatgaaacatgcaaccctgtaccaggcacgactgggaatatgggaaagacagtccctaccagtaagagcttcctatgggatgaccagaccctggcggctgccggctgtcaggcccggcccctgcctggctgcgaggccaattactgcggccttaatcaccacggtggcggcggcggcgcggcgttaacaactgtctgctcatcagtctccttcctggggcgtcgtggaggggatgaccccatgcggctctcctcgaaggagcttgaaactggatcccaacaacagcccgatggccgccgtccagggaaacgcctggctccctcctgctgcctgctggtctcctggtgctctgacagcctgaggcctggccggcccccaacctggctgcctctgcgcctgctccttgggctcaggcggatcttggtgcttcctggatgtggtgaggcccctctgcacgtggccctccaggctgtggtccgggagaggactctgagctcctctgatctgctcccatctacttgggatgccaggagagcccctgggagaagcagcaggacgtgggaaccatctagagcacaagctctggagttagacctgattatgaatcccagctctactgcacaccagctgtgtgccttaaacacagtaccaaatggaacccggtcccttggtcagcaaaacggagataataaagtaggacctgtatcctcatcacctaagctggcagagcagaaatgcagcaagaaagagaaagtcatgaagaggccaaagacccatccccgctatctcctagggaaggttctcaaaagcagcaacaaaatgttaatacttccacaccttcccattgcccgaggctcccctacgaatgccgccccctgctccacggcgcccagtcccatcgaccacccaagggctgaggaatgcgagcgcaaggcacagcactggcaggcagctccacctgcagccccagtgcgggatccactaggtgaagccagctgggctcctgagtctggtggggacgtggagagtctttatatctag

SEQ ID NO: 128837 - DNA, 549 bp, Homo sapiens
atgacgaagactgagagagaacagaatgaacaactggatgggggtggctatggggagagacttggagaatactctctcttcctgctatgtgtaccatcagaattgaaccaggggaaatgtgaacgggtctccagttactttgggatgaatctttcgggggttctaaagaaacttccttttcctccaaccagagaatcttggcctcctccacacttcaccggcaccccccacaatcatcatggaggagtcagcaatggtgctttgggatgtgcccagagatgctctctgcaccatgctaccaatgctgggggttgggagaggggtggtgtcagcaattcaagattgtttttctttctcctcagtgcctctttcagtgacgcaaagataaaaccagcgcccagtcccatcgaccacctaagggctgaggagtgcgagcacatggcgcgggactggcaggcagctccacctgcagcccctgtgcgggatcccctgggtgaagccagctgggctcctgagtctggtggggacctggagaacctttatgtctag

SEQ ID NO: 128838 - DNA, 471 bp, Homo sapiens
atggccagtgcagctgaagtaagggatgggtgtagagatcggggcaaaaagcttggtaaagaagcaaagccagatcatgcctgcgcacttgggatcccagacaaacattcgcttctagcagatgctgctgctgaaaattcctactgccccgagcctctgaatttcctgggcacctttccctcttctactgtggtgcacatttcctttccatcatcatcatctgctgtgaatcttttcatgagacctctcctttcagttcaggaagctgttgaagatccagagacttggaaaggtatctttcaagtatcttttaaagcgcccagtcccatcgagcacccaaggactgaggagtgcgggcacacagcacaggactggcaggcagctccacctgcagccgtggtgcatgatccactgggtgaagccagctgggctcctgagtctggtggggacttggagaacctttatgtctag

SEQ ID NO: 128839 - DNA, 1143 bp, Homo sapiens
atgaaaaacttcccggagttcccagagcgctctttaagggagccagatggggccttacattttggatcgagacggtgggggaacaaggaatcgacggcgcatgacacccagacggaacgaccggacggccggatcgatcgaaggacggaacgggtggaagtgtgcgctcgattgacccgattcggatcggcgcgactcggtcgcatcgctttggaccgtcacgcatcggtattggtctgggatgaatgcggatgcggtcggatcggaacgggctcgggatcgcgatcggcgtccggatcggagacggtactcgatatgggttccgcatggcgatgggaatcgggatcggcatggggagggggatccggaacgtcgacggtgatcccgaaccggattcgagtagggatccgtaactggctagggaactcgcatgcggatcgggcctcggagtcgcggcacgcaccgggaacgggaacgcgggaggggctctcggactcgggatgctgggggcttactaacaccaccgcctggaaccgaccggtatcgtcacgctcttccgtgcccttctcctctccccggttattgccccataaaaacaaaagggccctggcatccctggctttaacatcttcccggacccttgaaacgcgcacaacaacacctacacgaacaccgttagcgaaaaacaacccgctgccctacacgaccacgccatccaaggacatctcgacccgctggagaagcacttcagtgggaccagagagaacactgtgcatcccaggattgcagccactggactccagcaactcgaggaagaggcagccattgataccagacctagaattcactaaaggtcaatgccttcaggaattttcatctgatttgatgattgatgccctccccatcatgagccccaggaagtctcccatgccactttccccagagccttcagacaaccccctaattgctttgtgccccgtgcctagccagcaacagcaaacgtctccggaggccatactggaaacggggcgccccgcattccatcacaccccagcccatgcggaactcccactgcctcattcggtgctgccgctaacaaccattcctgcttcgaaaaccgcgtcggagagccccctggcttga

SEQ ID NO: 128840 - DNA, 4392 bp, Homo sapiens
gctcgacgatttcgtgtggggcgggactgatggcggagtgtgagcgggctcggttttgggccgcggcgggagcgggagtcgccgccactcgagtgcgcaggcgcctggcgattaccggtctcaccatggagcggaaagtgcttgcgctccaggcccgaaagaaaaggaccaaggccaagaaggacaaagcccaaaggaagaatgggcatttttgtatcatttcttagatctgaaactcagcaccgaggctctgctccccactctgagagtgatctaccagagcaggaagaggagattctgggatctgatgatgatgagcaagaagatcctaatgattattgtaaaggaggttatcatcttgtgaaaattggagatctattcaatgggagataccatgtgatccgaaagttaggctggggacacttttcaacagtatggttatcatgggatattcaggggaagaaatttgtggcaatgaaagtagttaaaagtgctgaacattacactgaaacagcactagatgaaatccggttgctgaagtcagttcgcaattcagaccctaatgatccaaatagagaaatggttgttcaactactagatgactttaaaatatcaggagttaatggaacacatatctgcatggtatttgaagttttggggcatcatctgctcaagtggatcatcaaatccaattatcaggggcttccactgccttgtgtcaaaaaaattattcagcaagtgttacagggtcttgattatttacataccaagtgccgtatcatccacactgacattaaaccagagaacatcttattgtcagtgaatgagcagtacattcggaggctggctgcagaagcaacagaatggcagcgatctggagctcctccgccttccggatctgcagtcagtactgctccccagcctaaaccagctgacaaaatgtcaaagaataagaagaagaaattgaagaagaagcagaagcgccaggcagaattactagagaagcgaatgcaggaaattgaggaaatggagaaagagtcgggccctgggcaaaaaagaccaaacaagcaagaagaatcagagagtcctgttgaaagacccttgaaagagaacccacctaataaaatgacccaagaaaaacttgaagagtcaagtaccattggccaggatcaaacgcttatggaacgtgatacagagggtggtgcagcagaaattaattgcaatggagtgattgaagtcattaattatactcagaacagtaataatgaaacattgagacataaagaggatctacataatgctaatgactgtgatgtccaaaatttgaatcaggaatctagtttcctaagtctcccaaaatggagacagcagcacatctcaagaaacagactcttgtacacctataacatctgaggtgtcagacaccatggtgtgccagtcttcctcaactgtaggtcagtcattcagtgaacaacacattagccaacttcaagaaagcattcgggcagagataccctgtgaagatgaacaagagcaagaacataacggaccactggacaacaaaggaaaatccacggctggaaattttcttgttaatccccttgagccaaaaaatgcagaaaagctcaaggtgaagattgctgaccttggaaatgcttgttgggtgcacaaacatttcactgaagatattcaaacaaggcaatatcgttccttggaagttctaatcggatctggctataatacccctgctgacatttggagcacggcatgcatggcctttgaactggccacaggtgactatttgtttgaacctcattcaggggaagagtacactcgagatgaagatcacattgcattgatcatagaacttctggggaaggtgcctcgcaagctcattgtggcaggaaaatattccaaggaatttttcaccaaaaaaggtgacctgaaacatatcacgaagctgaaaccttggggcctttttgaggttctagtggagaagtatgagtggtctcaggaagaggcagctggcttcacagatttcttactgcccatgttggagctgatccctgagaagagagccactgccgccgagtgtctccggcacccttggcttaactcctaagcccctgcccagcaccacagcagagatcacacactgaccctccgcccttccccttcaagcattttcctcttcccttttcagggtgaagctcttccttcaagagtttctagatcttgttttttttttaatccaacatgttcatttgggtttgcttacttgaccctgtggagatccccacagccattgggcatcctaggtgaatttggccttggttgggctctgccaaagactaatggactaaaatgtgaaacagcctcttgccctgtacctttccttcccattaggacatcctttaaattataagcatcctttttgaaaagagctatgaaggtgtatgagcccatccttttattcattgactctaagagtcaaattttctagtgcatatcctattgccagcataaggatgaggagggggaaagggtcttaattctatgtacagcagagacattaaacttgctgtgtccgggctgcatcatcttcctggactgtttctgttgttctctgtgttcacattttttcctgcaacttttaagctactgtcttttttaaatagctatatgaacaccaaatttgggtaccattttatcactgttcaaagcactgtcaaattcctttcatcctttaatagttaagatctttgaatcttcagtctgatttttaatgtaagcaaaaacagaaccattgaatagtaatttcttgagaacctcaggtgttctataaacagtcctttcctgtatgtcttctattaccctaagaccagagttattttggttggttgttttgttttattttttgtttttgtatccatggctggcactttactcattgcacttgagtttattgccccataactaaaggatcaggatgatggtagaacggagatctgggtttcagagctttcccatttaagaaaaatagatcttgagattctgattcttttccaaacagtcccctgctttcatgtacagctttttctttaccttacccaaaattctggccttgaagcagttttcctctatggctttgcctttctgattttctcagaggctcgagtctttaatataaccccaaatgaaagaaccaaggggaggggtgggatggcacttttttttgttggtcttgttttgttttgttttttggttggttggttcgttattttttaagattagccattctctgctgctatttccctacataatgtcaatttttaaccataattttgacatgattgagatgtacttgaggcttttttgttttaattgagaaaagactttgcaattttttttttaggatgagcctctcctagacttgacctagaatattacatattcctccagtaagtaatactgaagagcaaaagagaggcaggattggggtcacagccgcttcttcagcatggaccaagtgggccttggggattgcagcgttctcgaagtggctgtaggactcgaatttacagaaagccacagaggtgcaacttgaggctctgctagcaagccaccagtgaggctattgggtaaccacctttctatacaggagattggaatctactttgtcatttatccaccacagtgacaaaggaaaagtggtgccgttatgcaatccatttaactcataaacatattactctgagtaactggccagccattcatcggatccttcattgggtactcctgaaatcagacatgttcctgtagaaagaattttaagttaggctttctatgcacctatcaagaatcaagagaatagattgtatcaaacaacggcagggaaatccttcagcaattctaatccactttgggttttcagctgtttttacatctaaagcaatagactagaactgaattatcttctacatagtaaaatcacaattgtggaattacaggaattctggtgatattaaggtgaaataacaaaacacaaaaggccctattttaacagttgatgtgacagtaagttttaatagaacctgtaacttcattttggaaatgcttctccaccaaataagggctttttcccctatttaaggagccagatggattgaaagatgtggaaataggcagctgtagatcttgatcttccaggtaccccatgtacctttattgagcttaattataatactgtcaaattgccacgatctcactaaaggatttctatttgctgtcagttaaaaataaagccctaaatacatttttattctttctactgagggcattgtctgttttctttgtaaatgccgtacaataaacaaattatttaataaccta

SEQ ID NO: 128841 - DNA, 1474 bp, Homo sapiens
gtggggaggtccaagctaggggagtttgtgcctcctctgtggagttggggaggaaaggtaccgggcgggctctggtcctcctccgacagccctttccagcaggcccggggctgataagacccaggcctggcgttgagcaacagcagctctcttccacatggttgctggagagcgaccctccgagctgccccgaggccatgtggctgcagccacagggtgcccaaacccggtgcacgttcaagacgtgaaaccagagcagagaaggtgccggaggaaaatccaaagaatgggatgttggggtacaagactcacttcctttgggctttgtccttcttggccttggtccttttctttcgggcctggagcgcaagcactgcaggagagagggatggatgaagggcgaatgtggaggaaaggaggcgaccaaggtgagggtggagacccagctgcactgcgggagcccctttgtgggccggccaagaccggagccggctccctcagcttgcagggaggtgtggagggagaggagcgagggggaaccggggctgcacgcggcgctttcgggccagctggagttccaggtgggcgtgggcttggcgggccctgcactcggagcagccagccggccctgctggccccggacaatgaggaggggcttagcacccaggccagcggcttcggagggtgtactggttcccccagcagtgccagcccgccggcgctgtgctcgatttctcaccatgccttagctgtcttcctgcggggcaggtctcgggaccagcagcccgccatgcctgagcctcccaccccgtccatgagctcctgtgccgcccgagcctccccgatgagtgccgccccctgctccagggcgcccagtcccatcgaccacccaagggctgaggagtgtgggcacacggcaccgggactggcaggcagctccacttgcagccctggtgctggatccactgggtgaagccagctgggctcctgagtctggtggggacgtggagagtctttatgtctagctcagggattgtaaatacaccaatcagcaccctgtgtctagctcagggtttgtgaatgcacccaatggacactctgtatctagctactctgggtggggacttggagaacctttatgtctagttcagggattgtaaatacaccaattggcactctgtatctagctcaaggattgcagccactggactccagcaactcgaggaagaggcagccattgataccagacctagaattcactaaaggtcaatgccttcaggaattttcatctgatttgatgattgatgccctccccatcatgagccccaggaagtctcccatgccacgagcagagggtttaataggcaagagggaagggagaaaacagaaggaagaagctccccagtacagagacagagggtggggggctccaaagccacgaaaggaggtggcaagtgtggtggacaccagccag

SEQ ID NO: 128842 - DNA, 525 bp, Homo sapiens
caacagctagtactacttgcctagcttagttatttaagaaaattattatgtaaaaagaaggtagaacccagaggacctggagatctatttcagcattctttgagcaaactcctgtgtcttcagtttttcttatagagacttttccttttgaggagacttggaaatctacattaacgataacttaatgtaaataaattgttaataaagcacctataagtcaaaagaaaatgctcatttaatataattaaaactacatatgacagatactcaatttaccacacgttaaaccaatccatttaatttactgcagcactgaaaaaaaccatgatgctacacttacatttctattacagatcccacagatgcctgccacaaaaataaagcattttcttcaccagcagtcagccagcttacagtattttctcttccactgctggttcattctttgtgctctccggccacagctgcggccacctcgcagtcttttctctctggcctcggagcccgcagctgccgggaacgcgc

SEQ ID NO: 128843 - DNA, 616 bp, Homo sapiens
acccatttcttccttcataataccatgcatattcaccatttcctctacttgctgccttgagttcttctggtgacaacaaggttggcttgtcaaggaaatcctcgggaatttcttgtcgacaaagagcacaccgctttccaagccatgaagctccttttacacatagatagcagaaaacgtgcttacagggcagactgactggatgaacacatgtttgcagacaaatggcacattcagggacggttaaagaaggtgcagtattagaacaggactcgttcgctttcctgtttgtaggaagcatgtttattgaatgatcaatttcaccacagccagccatcatttctattacagatcccacagatgcctgccacaaaaataaagcattttcttcaccagcagtcagccagcttacagtattttctcttccactgctggttcattctttgtgccggagtacgttgcggctggaggtgacaccgcgagctatgcctcctctccccgagtgaggatcctagagtggccggcgttcaccctgctcccccgagagggcctcgctccgactcccacctctccggccacagctgcggccacctcgcagtcttttctccctcgtgcc

SEQ ID NO: 128844 - DNA, 842 bp, Homo sapiens
atgactaaatggaaaagcaatcctcaaattcatatggaattgcaaaggaccctaagtaacccaaacaatcttgaaaaatccaatgtcaaaacttactacaaagctaagatctttgacgataacctcatacagctgacctttcaacaacacaggcaagaccgagacactgagcaggagaaaaaaaaggaggaagagcgagagaagagaaagcagcagcaagagccactccggaaaaaggcaaaaatgcagactgtacgccctggcttcgatctgacccaaggcccaaactgtctgaccccacacgggaaaacatggagcaggctaccgccgaaaaaccatcgccgcccctacacctcgaggccagaaggtccccgggtaaaggcctaaaaccacggcccagaggggaggagagggacccgcctgccacccgaggcagcgaagcgggctcaggcggaagaggctgcgcagtaatggccgacccggagtacgttgcggctggaggtgacaccgcgagctatgcctcctctccccgagtgaggatcctagagtggccggcgttcaccctgctcccccgagagggcctcgctccgactcccacctctccggccacagctgcggccacctcgcagtcttttctctctggcctcggagcccgcagctgccgggaacgcgcgcggccgtcacagtgtgcttgctttgtattagggcccagaggctctgaaagagtgcagttccaacagaaagagatttggggtggaggaagtaaaacgtgtgtaggaccagcaggtggtgctgctcaaaaatccagctttgctatcctgaggaagctctggggcgcctag

SEQ ID NO: 128845 - DNA, 765 bp, Homo sapiens
ctatccacagcccctcctggagtgtgtctcttcatcctgaggtctaaagtcctgataatctcccccagtgaacctgcggtttctctgaggagccaggtcctctgaggacatgggtcccctggtgactgccttgccattactggaccttctcagttgagtgtgcagaccacatcccatgatccctggataataaggataatctccacatctcatgagcattaatttaatcacatttgcaaatttcctttttccatgtgagtaacgtaattcacaatttctcaagtctgcatcttcgtaatgtggatgattcacaatgggatgaagtgtagacagcttgacacttgccattgtaggcatggcacctgcaaagacagcatctgccctgggctggaagagagcccactgccctgaagggtgagttccaggcctggcagcactcaccacaagctgactgaaaggtccttcagccttaagtgaatgttggcggtagccaggcattacctcccacgggcctgtggtagtggtggaaatgaggagagaccactctgcctgtccagcaagagctggacccactgagttgtcacctggtacggtattgtatttgatccactgtaaaagttcttcctgaggcaaatcattaaattctcctgttatgctccattgattacagaggtttgcataaccttgtattgacatcactgttagaatgccaaagataacattctctctgcgaactctgcgaaaaagccagccaaagagcaccat

SEQ ID NO: 128846 - DNA, 774 bp, Homo sapiens
atgcctacaatggcaagcgtgaagctgtctacacttcatcccattgtgaatcatccacattacgaagatgcagacttgagaaattgtgaattacgttactcacatggaaaaaggaaatctgcaaatgtgattaagttaatgctcatgagatgtggagattatccttattatccaggtgaattgcttcagattttctctagtaccagagtgtacccgctcaaactctttgaaccacttagggcagaggaatgcaaagtcctgcccaagtggacccagcggcaaagagaggcaatattgcgggccacacggcacacttatggcccaaaggaggaactctgcctctctgcttcttcatcttcttataatgcaaatacgagaacaaccttgaagctcattggaatacccgactttcccatactatctcttgtgtctgggacaaagctcaacaaaatacttgcaaaccgaatccggcagcacatcaaaaagctgatacaccacaatcaagtaggcttcatccctgggatgcaaggtgggctgcccacgcctggcagcgagcaaggccacctcagggtttctccttcatcaccatccagcactgtgactctgaaacttttcaatttcatggaacctttcgaaaatctgaatctgagcaaagggaaggcctctgtgcacacaatcacgcaagaaaacacagactccttaaaagttcagggttcacagttttcccaaggccatgaaaaacggaccctagacttaaaagtatccacacaatag

SEQ ID NO: 128847 - DNA, 1557 bp, Homo sapiens
atggagatgctgaaggtctttatgcagaggtttgggcgagccaggaatgccgacaagttggtcattggagttgctgaagaggcaaagccagaatttgttaagttcaaggggatcttgacaactgtacagaaactgcagcacatcagccctccaaaaacactaacagacgagagagttgtttgtgagctctgttcagctgagtatcatacttggccaagtcagtcacttctcgttattggggcgtcttctacctgtcacttgaaaaagactgttctttggaacaataaggcggtaacacatacacaggaccaccctgtagccggccacacaggttccgcctccaggtgcttggatctacttaacggacctcccagggggaaagatttgcggtctctccgtccctctaccaggggagggcgccgttccagcccttgcctctgcggcacagatcaaaggacggaggaaaaaaggtgcgggtccggggcactaatgttcgaaaatgcagttttaagtgacctctccccgcgcacgcactgtcggtgggggcagtcccgaggccaggctgcggggcgcctggggggactcgcctcagggggaaatggccctttcagggctcgacgggtccccgggactaaacgctccggccgcggatcggtgccgggggagcccggtcagagaggccgggaccccgagggacgcctaggtgcgtgtcccgaagcccgcgtacctccagccccggcgagacggcgcccaactcgcggctccagtcacacggcccttcctgagaggaaacaccagggaaagcacctctcacttttctcagggtgggaaaactgtgaaggaagaagacaaagcaacaggcagtgccgggagctcaacatagagcacgcggcgctggccgccggcactcgcgccctgaggctgctgccccggagcgcccggcggcggtttcggcgcgcggccgggctggcgatggaagatggaaggaatgaggcgcaccgctgctggaagaaagtatcacaaacttggtggcttaaagcaacagagatttattctcttcaagttttggagactagaagtcggaaaggagtcttaggggctaaaatcaagaagattccaggtgattcgtatatacaacagagtacgaagaccattggtcgagagcagtggttcacaaagaagatggctcctgtaccagcaacatcagcatcacctgaaaaattgttagaaaatgcagattcgcaggccccacagacctacggcatcagaaactctgggatggaccccagcagtagcttcaggacggggctgggcaccagaaggacacagcgggattggagggttcggactttctcctacgtgtgttcagggaaactaagtagcatggcagcagcccagagcccccgggtcagtggctacacagcagcaattataggttcttttgtgggtttccgtgttgtcctgtatgctgaatcatcagaatgcagaggtcactatctcagccacccctgtggacagtctgtggttgtgtggcatcaccctcattcctgcctctga

SEQ ID NO: 128848 - DNA, 1668 bp, Homo sapiens
ctatctgctaggaaacacgagggtgagtgatgagtttttagggtggagctggtcggcagtggggccccgactcccagtccagggctgcttctgttgcaccagtgtcccccagtgacccctgcacttgtttgggtgctggacccctttgagaatctgatgcacgacagggaccatttcccctggaaaacacacgtccccacccttcttgtatgcagaatcatgggatttgccgcagtttgcacccaggcctgtgcggatgccccccgactgcccgagatgctgcacctgccactgctgggggtgtacctgcctatgcccactcacaggggcacctccagggtagctgcctggtgcaggcattggctctaagcagagcagcactatgggcccatctggggctggctcttgcctgggcctgtgagcaccatcacagccagccgatctgggagtatccagggtgttcttgtcattgcggacactgaatagccattggtgggtggcgatgggggcttggaagccgagcatcagtggcaatgagaagcaggccctgtggtttaattccgaagcacatgaacccacagagccgccaacagtcgttattcggcaggagggggtacagagacagcagcctgcggagcgttctaggcaggacagggcagcaaacctgacatgcggagctgggggcaggggtaatggggccagggggtaatggcaggtgaggccatggcctagagggttgccatgcttggtgcaggggaggagaggcccaggtgtggctgcagtggcagcaggagtcagtgtggctgtgcccagtgggatgttgtcagagaatggacctggctgcagcaagcacattctggagatgcggggcagagacgaggcctccgtgagaacctttgaggtgtgagggccttgatctggggtgcagcctccagctttctgcttacagagcaggacctgcaggagctcgctgactgcctgcacagtggaaggaagacctgtttcttttactttcagggacgtggtgatgtggcaccaggcccagtggcaccagcacaccaccgtctcgctggcatttccaccgtggtccctgaagggccggggctctgtgtgggtgaagaccggcagcttcctggagtaaccagagggctgagcctcctccttgacttgttcggagtgtttcttcactgaccggtttaccagccctcggcccgcggcaaatgccgaatgccggtgctgggaacggaagtgggaaatgacggggggtgcgggggagcggccctgactgggactgtacggggacgcatgggggtgcgggcactggaaagctgctatgggctggtctgagcctcttccctctttccgggaaatctgaggcccaccagcagcgggcagcaggtcatgggtatggtcgcggacttggaagcccaggaaggccaccaaggagcaggaagggccgtgtcctgggatcagagtctgcccctgcctgagggagccctcagccactacgctcagcccgtcagaaacctgagagctcatgtccacgacagggccagccagtggggagaggacccggggctcccttggaggcagggcactgctcgttcccgcggccgctcggccccgcccgctccctccaccccgatttcccacagggcttgcaggcat

SEQ ID NO: 128849 - DNA, 495 bp, Homo sapiens
ttagaagacccccttcttggggctagaggggctgctcacagctccctgaatgtgctgctgatggctcccttgaagaccacggcccactcccacccatggtttcctgtttctcacgccacccagcaggaaggtttctgcgtgtcttcccaccatcccctcttcttgctgtggactgttgttggcataacaacagttatgttgttgctgtggactgttgctctgccacttcctgctccctcctcctttacccttcacaggagtttcctccccataaatttcttgtgtatctagtcctgtcttggcatcagcttcttggaggacttgaactgatatgcactcaacagccagtaaatcctgttgtgagtgatggttgaggagagtcatgcaaactgttatggaaggtgggtgagactcctcccgtttcatccaagtgacatctgggcatccaggaaagccctgcaggagattacaggtgcccataggaccaactgccat

SEQ ID NO: 128850 - DNA, 1303 bp, Homo sapiens
gacggtcgcaatgaaactgattgatcaccattacgccaagcttggcacgaggtggggtggcactaacagtagatgtcattggtgaggactgatggcaaagtctcattccctcacagccgcgctgccagctcgcctccccctcgctttgctgggagcctgccctggactccaaaaggacacgggttcacctcctttcccaggctggaggggtactgcccttccctgaggggccttctgactggggcaggaactcttttcgtgtgtccagctgggcctggaggccaagtcaaggtgtgtcacaccacacaccagggcaaggacctcatctccagggaacagggacaagtgagtggctaccagaaagtcccccgggcagcctgggagttccccagagcctggctggtccttacagagcacttcttcccctggggccaccaggaccaaaggcaacctaaacactttgaaaggttaaaagcaagttgttgattgatgggttggggttggcactgggtgggagggttctggggcaccacagagccctcagcccagcagagagtggaggctcagtccgcggggagtgggggttgtgwaggagacatggcccagcccctggtcggggagataagctcccccatgtccaggccagccccaggggcmacaarcccacatggagagaggtggcaggtgaggctgacaggtgggtgcctgtggcctgggcccatgagggcaatggtcctcagtaaccaatggaaaggacacaagggcgccgtggtcaccaccacccaggcaaagaaatgggaggtggccagcacccccacccttcacttttcattattattattattattattattattattattattattatttttttttttttggagagtaggaaggcaacttcattggagcttttggggaaaaaagccttcaaagtcaccttctggcagctctggggagggtcatttggggtggactgagactgtagggcaggtagggtgtgtgccgggcagcagctgtgtccgtgcagccagcacccagcagggcagtctcacaggagccgttgtgagcactttggacttgaagcagctatgaaccaccccccgcccccaccgtctctccctctcacacacacacacacacacacacacacacccgttttaccattttctcagtgctttttctgctttcattcctttgattttagttagaagcacaagccatgatggatgtgggactcttctcaattgctctttaaattgtcactttttaaatcctattaaatgaagtgtcgattcctgac

SEQ ID NO: 128851 - DNA, 830 bp, Homo sapiens
ggcacgaggagactttccagtgtcaacaacaatacctcgataaccacgccaactcttagtcccagccagcagccgcttgcgacagaactgaatgtaacttcaccgagtaaagaggagtgtgggccatgcacagacacagcttatgtttcattaatcacaccaacaaaaagatcctgtggtacagattcacagtctgagaatgaggcttcaccagtaaaacggccacgactacttgagaatacggaacggtccgaggaaaccagtcgatctaaacagaagagtcgacgtcggtgctttcagtgccaaaccaaactggagctggtgcagcaagaattgggatcgtgtcgctgcggttatgtggtctgtatgttacatcgcctccccgagcagcacgaatgcacattcgaccacatgggccgtggccgggaggaagccatcatgaaaatggtgaagctggaccggaaagtggggcgctcctgccagcgcatcggggaggggtgctcctgaaggccaggcatggccaccacgtgacgctgttcttagttcactaatgttagccttatttaggacaaagtcagccagacaccttgtactgggcacgcgtcagactgcagccagtccgtttcctttctttagccagccatcctggtactgtagtttaggggttgatggtggttgaaattgatttctggctggttactaaggtgcctgctagccattgtataaaattaaaacatgaagaatattttttttttgagcatggctagtggatttaaaacaacacatacctgtcactgctggagtcaaacttataaaaagccttaagtgga

SEQ ID NO: 128852 - DNA, 860 bp, Homo sapiens
gccctcacccacctggatctgatgcggcactaggaccactgggactgctcaccctgcctgggctttcaagggaatcctgatcctgtccacccagccccagccccacctgactggtagtgatttcctaacatggggcaaccaggcccacccccacccttccccacctggcgtgcgcagttgcagctgctgaaatcctctgtgaacatgagggggcacaggtggagaaatgtaccctcaggccctcacctaccagagcaaatatcactctcggagctgggccacagccacaaaccgctgttcctaagacagaatccaaaccccactgtcccctgggacgtaatgctgcccttccccttactaaacttgctatatggtaagatgtggactgggtgtccttggacttatggggctgcatagaaacgagaatggaggccacgacatcatcctcttggcccctggaggcacgggcggctccagctgaaaggggcaggagcccgtgggcggcagcttccccagctgctgctcccagcacttctagtgattcttgttggctatgaaatgtctttttaaaaaactcccaatatagaaatctggctgcagaggccagtgtgcagaccccagccaccgcgctgtgctgccattcgccacatctggtccgtgccagatccctgcactggcgaatggcagaccagagccggcggaggcggggcactctggctgcttctcgtgaccttggatcctgtgtagaaaaggcgggtctcgttcgtggactagtcttgagtggagctaattttcaaagtgaggttactgtttctcttcttgtgtgatgagttttttcatagcaagtcaggtaaaaaacc

SEQ ID NO: 128853 - DNA, 2316 bp, Homo sapiens
ttactgttgtgcccatctggggccctctctcttggagacccccttcttggggctagaggggctgctcacagctccctgaatgtgctgctgatggctcccttgaagaccacggcccactcccacccatggtttcctgtttctcacgccacccagcaggaaggtttctgcttgtcttcccaccatcccctcttcttgctgtggactgttgttggcataacaacagttatgttgttgctgtggactgttgctctgtgaagcaatcaggaaggagctgacgcagacccagttcctgtggaccagtgggcagagcacagcccactgctccctgcaggcccgcctcacacccaggccaccaaggccctctcttgccctttgcccccgtgcttgttcatcgccactgggcctctgatttcctctgaggattttcatcacgctcatgacaactatgcggtcaatatctctgtcctttaccccaaggccagtcccgcagcttcccagggcagaggctcccaacagaaagcaaggaagcggctgtttagcctggacactaactggacgagtgcctccaagtactgcagacggtctctgcacacaggcccccatctctttccagccctggcgtgcgcagttgcagctgctgaaatccttaaacttgctatatggtagatgtggactgggtgtccttggactatggggctgcatagaaacgagaatggaggccacgacatcatcctcttggcccccctccccgatgcgctggcaggagcgccccactttccggtccagcttcaccattttcatgatggcttcctcccggccacggcccatgtggtcgaatgtgcagtcgtgctgctcggggaggcgatgtaacatacagaacacataacactcgggcccccagctgtccttccctccactgggtaggtgagagaggttgagatgcccacactcggacccccagctgtccttcactccactgggtaggtgagagaggttgagatgcccacactcggacccccagctgtccttcactccactgggtaggtgagagaggttgagatgcccacactcaggcctccagctgtctttccctcccagaagcgcaggatgctgcaaggctctttttgaagcagagaaatccaagggagacactggtcttgggaagagagggtgggctggggggggtgctggaggagctgcccggccctgcatctgcaaccctacagtcccctgcccacagagcacgcagagccctcctgtgctccgggaacgagatagcagcttggcagctcggcctcgcatagccgcgctgccagctcgcctccccctcgctttgctgggagcctgccctggactccaaaaggacacgggttcacctcctttcccaggctggaggggtactgcccttccctgaggggccttctgactggggcaggaactcttttcgtgtgtccagctgggccttctatgtggtgaccagctcctccgagcgatgcccaggtcgggcacggcccgggcagggcaggtctgcagcgatgccgtggcagaggtgggcatactccatttgttttggcagctgcagccattgattctgcatatttttcctgatgagcccgtgagtatttggtagcaacttcccccatttatcttgcttcccaggggagatgcggggaagggaaccagtgagccaggaggcggccccttgcaggcgctgccgctctccctggccccaatctcgagtcctgggtgtgtgaactcagtgttgcaggccctgccgtctgggatccagtgccctctcctgtgaccccacaactgggcctgagtctccagcaactccgctggtgcatgtggggcccaaggctccatgcgctgaacatgagggaccccggccacctggagccttggcctcctcctgagcttccagggagcagacaccagcgtcagtgtgaatgtggcccagcccatgtgcagagggagaggatgccgggctgggcgtgcatgttgaagtccgtggcccagagaggcttccagagaaggtgacagctgagtaaagcccaggccgctgcctggagagtgcactgggggccgatggggctgggaaggattgaggatggcgacggtggggggtgagcaggggcggtggagggctttgctgtgcacggggaggtggaggctcttctgtgcggagaggggaggtggagggctctgctgtgcacggggaggtggaggctgtgctgggtggagggctctgagcccatcttcccttcccatttctggtgcacaggaacttggaagctgattttggcggtacaccat

SEQ ID NO: 128854 - DNA, 387 bp, Homo sapiens; identical to SEQ ID NO: 114901

SEQ ID NO: 128855 - DNA, 430 bp, Homo sapiens
  misc_feature (1)...(430): n = a,t,c or g
ntgagctggttaatcatcagagtctgacctatggcccatcgagcaagggtgggagcattctgcttccacttttcagaaaagtaagtggctttctcctccctaagacccagagttatgcaatccgcctggacctgcttggctgtgagacttttcttcaaagctccttttggacccagaaggaggcttttctcgatgcttctgagggagccaaggctaatttgattggtggtggcaaattcagagagctgagccagaattctttccgccttttttggctcagttaggaagtggaaaagcccctctgtcagggctgaaaattgctgcgcgcccagatggttcagatgctgcatgtctccgcccgcggctttcggcaccgggtcctcagtgcagtgcagacggcccatggcgcgcgccccagccccgcaggttc

SEQ ID NO: 128856 - DNA, 409 bp, Homo sapiens; identical to SEQ ID NO: 114902

SEQ ID NO: 128857 - DNA, 1990 bp, Homo sapiens
acacaaagcatttcacatgttatgctttttcctgtggcttttaacctgagtttccccggaattgctcttacaaattccaactttggaacagacccaatttcactggagacccaggatcgtcacaaaaccaggaagataatttttaaagacaagagcaagcactagctctctgcaaggtacacgactctttaatccatgcagaaagacaactggatccagaccttttcttcagaacctttttattcatcatctaaccaacagaggtggttggctcgaactcaaactaaaatggcctcaaaaggcccacctcgttacgacatgacagggcaaaaccagaagtagggacagagtttagcctcagttctctgcagagaagaccaaagcaggtatttacacacaaggtgcctcatttaaaaactgaattggcattgttccacccagccacagcacccagagtgtgcaaaaatccgtgggggctctgtatatgtgtcatttcagacaatcccgccgatccctcagccataaaccaagctcttgctttttggggagggaggggtgatcagcatggttatcttgaaatggatggcacccatttgtttacttctgggaacttttgaagggggagggtgacaactttattttctccccctgaaatctgaagatgcagtggccttgtcaagagtatctaaaaatgtggtccctggaagaacaggtgggtgggtggttgcccctaacagagagttttaccaggggtaatttgtgttgggcttcttttcagtactttaatcctgctgttttttcagaaaccctttgcacctggggccccatggagccagcagggccccatggagcattcccacaggcctgtgagtgaagtgcctctcagagcagtcaacccagggaagggaggagggcagggaacggggccaggggagatgcagggacaagaaatcagcagaaacacctccatgctggttctgactcgctccatctcgtgcaggaagctgtagaactgaggcaaggttaattctatatacacattttcggtttgatttcctttcttaaccaccaactttagttgtaaaaaatcataacttccccaactttctaccaaattcgctgctccccagatgtccactcccaaatttcccactcccatatcctatgagctggttaatcatccagagtcgtggccctatggcccagcgagcaagggcggaaagcagtatgcttacacttatcaggaaagtaagtggctgtatcctcactaagacacagagttatgaaatccgcctggacctgcttggctgtgagactcttcttcaaagcaccatttggaaccagaaggaggcttttcacgatgcttctgagggagccaagactgatctgattggtggtggcaaattcagagagctgagccagaaatctttccacctcttttggctcagttaggaagtggaaaagcacctctgtcagggctgagaactgctgcgcgcccagcataattaagctgctgcatgtcgccgcccacggcctccggcaccgggtcctcagtgcagtgcaggcgggcccatggcgcgcgccccagccccgcaggttccaccgccgccgccgccctgctcagcttcctcctccgctgccgctgccaccgctgccggcctctccgcgcatccacaaccgcactttcgccacggccgtcgcagcgcgctcctcccccggccgccctgggctgtccggagccggggagccctcgcagggccgcggacacgcgcggccgccgggctccggggaggggcaggggcggcgccggcaccggcagacgcgaggtttcctgccagctctcccgctgagtgaccaaagtttcctcaaaatagtgcgagggctttgaccggtttccctcgatgcacagatcccacagtgtcatcaccaggatattgacattgatacagtcaagacgcagaacatttccatggcagcaacgatctcccat

SEQ ID NO: 128858 - DNA, 580 bp, Homo sapiens
  misc_feature (1)...(580): n = a,t,c or g
accagcggctgctcacactccctccacaaacctgccggagtctccactcgcccgccaactgtagcctccatatgcgccccacgccnccgcacaagccccctccgtcgcgggtctcttaccttgtggcctttccccgggggacacctgacgctattggagactcctgcggtttgattcatgtccagaggaagttgaggggcccagattctctaccttcaaaacttcctaggcgcgtggagggcggcgacagaggtgcgcgcctcgggggagacgcgaggtgggtcctccttctgcagccgagtctgggcgagcgcgaggggagcctccacgctgcaggcttctgtgcaggggcggtaaaatccgcagcccagagctggagaaggagaagcagctgctgggaccccggagggaagccgggccggcgccagcggctccgagggcgctctgcccagtgctgcctccccgggaaacagttcaggacgctcaagaccagaagcgggagcaaacccaaaaggagctccaaggaggtgtgtgtggggagagccagggggacgcaggactaggctctttcctgacgaaa

SEQ ID NO: 128859 - DNA, 1551 bp, Homo sapiens
atgggggaatcccaagagccattttgtaaggaactccacccaatagagccaaaggaccagaagagggtaaagacaggaagtgtgaggatgtgtgaaggcatcacagtgagagaaaaggctaaaagccatcttccaacattctatgtgagggtctccaaagaagctctccaaaagctccccatgagaaaaaatggtggttctgaagccaagtgtgtgagaaaagaaaaggggcaggaaaaggacctgctgttatggcagcaactggtgaaacgccgtaagccttgcatgagtttgccatgtcccgtagcctgcacgcatcgctccattaaagttaatgaagcacgtgtccgtgacagcagccagcgccagcgcccgcgggagagccccgcgcgcgcttcccgggaaagagctcctctgcaagctctggcccagggggcctcgcaatcatgggaaacagctgcacctgccagcccagccgcaaagcagggtaggatctccagccccagggtggccggcgggagcggatgcacgggcagagccctgctgctggccgcgggtctacaaaacagcacacgttctctcaacccccgcgatccgccaaccatcctcagtcaccgacccctgcaaggcatgcagacgcaccagcggctgctcacactccctccacaaacctgccggagtctccactctccggccaactgtagcctccatctgcgccccacgcccccgcacaagccccctccgtcgctggtcccttaccttgtggcctttccccgggggacacctgacgctattggagactcctgcggtttgattcatgtccagaggaagttgaggggcccagattctctaccttcaaaacttcctaggcgcgtggagggtggcgacagagccgagtctgggcgagcgcgaggggagcctccacgctgcaggcttctgtgcaggggcggtaaaatccgcagcccagagctggagaaggagaagcagctgctgggaccccggagggaagccgggccggcgccagcggctccgagggcgctctgcccagtgctgcctccccgggaaacagttcaggacgctcaagaccagaagcgggagcaaacccaaaaggagctccaaggagatttctgggtggctgtttgctgtaggaacttcattctcatttggatacatgaattgtcactgattttcagttcactcaggttcttcttgtgggtagtcacggtaacgccctggaagaactccaagtacctagagaggaacaatgaaggcctctgctgctgtgctttggaatccatggcagcgtttgcgtgcaatcacaccttcctactcctagccaataacgggagtatggcagggatactagcgcaggcctcgccctggcagatttttaatgataccaaatggaaacctcgtctttctaattggaaatatcctcatttgaagtctacaagaatgctcattacaagcaattgtaatgctgatgagaagttggaagttggaaacaacctaaatattctttaccgggagagcattgggacaaatacctaa

SEQ ID NO: 128860 - DNA, 4270 bp, Homo sapiens
atgactgaagccattacagaagcagcagtagcctcaagtgaggaggtgtcagaggaaagagacgacctggggcctcttgaattacatgacagtggtacctttcaacaagtcgtgaaccttctggacatcattgacagcgagtcagcaaagacggacacaacaggggcaggccttgacatgcggaagaccctggcctcggtgataatcatggagaaggccaccactgagccttctgtagtgataaacactctcatccgctgcctgcaggtgccagagatttccacccagcgcaaggtcaacatttacaacatcctccaggacatcatccagcaggagggggagctggaggagcagtgcgtgcagaggctggtggccattgcctccaaggagatgagggagatcccagagatggagggctatatgaaggcagaggtggccagcgacacactggtggctctgtcccgaaaccacttcagcttggtcatgtacgagctgcagcaccacctcaagcccctcaacctcactgatgaatttgtcatcatcacactggccaagctggccaacggcaatggtaggggcttgagggccctcagccgggcccagtgtgcccttctgaagcatgcgctgagctcctactccatgcaggccttgtggcagccccaacttcctgtaatcatccctcacaacctcacagtgtttgagttcatgccatacatgggcatcaccctggctaccatattcaccatgctgagacttgccaatgaagccaagatacgccaggcgatctgcagtgccatggagaccttctgtgagacggtgcagttttatctgaagcacctggaggagagcgtgtaccccgtgatgactgaggaggagtttgccctgaaggtgttccccatgtatcgctacttcgtgacagtgtggctgaggcactacaaccccgaggtgaagctgggggtgatcaagtccctgaagcccatgctcggcctccttctgcccaacgatgacctgcgggagcaggtctacgactacatccccctgctgctggcggagtaccagggcagtctggaggacacctacccaaaatccaggatgatctcacttcgaaatcctgaactaattccatcacaaagaccctatttccaaataaggtcacattatcagattctgggcgagcctgaattttggaaggacaccggtcaactcaaggcagccttggtcttgaggcagatcctggaactgtcagtcaccaccaacacccctgtcccccaaatgcagctacacaccattttcacagaactgcacgtccaggtgtgcaacaaggccccggcccagcatcagtacagcagccagaatctgatggagatggtgcactgcttcgtagcccttgctcgctcctaccccaaggagctgatgaagttcttcttcagccagatggagacaaacaaggaggccgtccgcgtggggactctgaatctgattagggctatagtgagcgcagatgagcccaggatgagtatcagggccatctacctggctatccgggtagtcaagaacaccatctctgatacccggtccaaggtgaggatggctattctccacatcattgggcagttggctctctgtggctaccaggagagaatcaaaggctggggcctgaagtacctgtctgtgcagctgaccttatccacctacaaactgacaaatcgccgggagaagttttatcagagggacttggaggagaggatggtccacaaagtcaccatggacactgtgaagatcattacctcttctgtcagtgggatgaccaccgagttttgggtgaggctgctgtgctacatcatggagacagactacgtggaagctttgactcctatctgtatcagcctcacaaacctggcagaacaccagctccatggccaggatgtggatgtcagcgtggctggcaagagcaggcaagctcctccctttaaaaatgaggacaaagagctccaagacaaggagcaaggtgctcaggtgctacttcactggagccttggtgccctccaggtgctgatgtcatcaccttacaagggggagggtcgtgggatagccatgctcaacctcttgaggaccctgagccagagcatcgcaccctccatggccgacatgtgggagctggagattgcgctactggtccggtacctggaagaacatactgagttcacttgggatcagaaagcctgggaagacaagctgattcagtttctgcgaaactccctcaagaagacccgggggtctagctggagcctgcgcttgagtaaagagctgaacaaccagattgcgagctttgacagcccctctctggagaagggctttctgtaccgggccttgggcttcaccttggccacaggcctggaggccagcaaggtggaggtcctgctgttggagctgctgtacaagacggactacagcaatgactttgacagcgagggtgtgattatgtgctttggcctgtgtgcccggggccaggtaaaaacggtgctgaatgtgcttcatgacttcgaggagaggatccaggagtcagagcagtcctggcagatcagtgcttggcggaaggaccatccctggaggcgggagacagtgaaaagtgccctcatggtgatgtatagctgcgtggcctcctactgccacccccagttgctcctcaacctcgtggacagccccatcaccgctaagatcattcaccattatgtcagcagctgccaggacatctgtctcaaaatggccttcatgaagagtgttgtgcaggttaccaaggccatcaacaacatcaaggacctggaggactttcactttgcccagaagacgactcttaccagcattatagtggcggtcatcaaggcagaaccgactgacaacctggtttctccagtgcgagccttggcgatggaggccctctcgcacctgagcaagctgaagcctttctactccacagaggaaaacagtgagctgatggatatcagcatacattctgtaatttctctccaactcccaggagaggacaatgagtccattaagaccctgtatgcaaatgccctgagctccctggagcagctgatggagagcctcctgcagaggcagctggaccccaaggggctgcaggagatggtgcagatccacctaaagctggggcagtttggcacaatggtcggactcattgccccgtgcacctgtgatgcccatcaaagaacccgcatggcctcaatgaatgtcctgtccagcctgctagatcttcacgcaagccagacctgctccttgtggggcccttccaagcagaaggagcttgagaaatgtaagggggacctccagagcacagatgtggagaagatcttctgtgcatcctccagaatcgccaaggtggtctgcatggagtttagctgcgatgaggtggtctcgctcatccagaagctctgcgagaacactggggccatgaacctgcagcatgacaaggcctctgtcacctggatagccttcttcctccagatgcgggccaaggagctggaggacaaggtggccgagatcctgagtgccatcctggtgcacctgccggtggtggaccacccagaggtgcggcgccttctcattgacggcatcctgctgctggcgcaccaccaccaggagaccatcctcacatcgctcctgaggcagccactgcccatggagagccacctggcagaggtgtggctggcagtgtcggagaacgtgcccttcgcccggaccatgctccacagcctgatgggccggctgcagtcacggctcagccccagaatcagtgccacctccaaggctgacatctggcgcctggctgcggtggaccccctgatgaccctgtgcaccatccaccttctcattcagaagctggatgagaatgacaagctcccggacttcctccctgacctcatctacaccctcctgctgcagcttggaagcagccaccgaccagaggccgccccgccggtcttgaagatgtggaagctggtccacaccactcctctgccggaggagatgaacctgcaaagttcatgagcggcccagttctgtaccaggagaagctgctgaagccggcagctttgctgctggagaagggtgccgaccaggaggaagacgaggccctgcgggtgctgtccctgcgcgccctcggcaacatggccctgggcgcccccaagaaggtgaagcagtaccggaaggtcttgctggagaagtgcctgggccccctgagggagcccgt

SEQ ID NO: 128861 - DNA, 3013 bp, Homo sapiens
gcctgcctaggagagaaacatgggcactgtcacaccaccacaggggactgctgctgtctgaggtcagcaggccagttcacatgccacgcaaggtggctactgagccaagtcataaaaatcttccagatcatcatggaacaagtcccactcattttcaaagtctgtcagttcatcgtccccatctgccaaaagcataagcaacatctcacccagctcaaaggtgacaacctcttcttcattgttgtcaaaggggtcattgttctctctttcctcaatgagctccgagaagtggttccttcactgggcccagtatctgtttgcctgtctctgtgtatcctttctatggccatcagggaatacctgcttgtaaaaacacatcccccaagatgggcagctcccctgtccttcatcaaaatccctgcacgcctggctgctcattgcctccttgactttctggatgagtttctgcttctcttctttctcccgcctggtactcactgggaatgacaaagttagatgtgatccggcattctgggtaggacactatgatcttgctctcaacttaaggaagcagcaagggatgattttgtagttagatctgtagcagttgcttgttcgtttcagtggcttgctgtgttcacatctgcagcggcctccataaacacagtaccgtcgctgaaaatacttgcccactacgccatgtggactgtcagagagggaatgcaagtagcgacagttatgtccttccttacaaatcccatgcacaaaataccagcaggtgacctgtttagttcagctgttgctgcagctactgccactccttcttcccgtccccagggatgggggtgtgttgttctgggagctgcagcctccactgttactgtttatcccacatacccatttttggtaaaattaactgatcccatggttaagatgatatgtaggccaatatacttttatatcaattgtttctttttgctgaaagcgccaaactgcctctcctcctccatgcagctgcctcatgggggtgggaggcaccaggtgaggccccttatctcagagattgaagtggaaagagtggcacaaacctatctgggtgtgtgttatatgaagaaagaacctgaaagccaaggttggtacgctgttatggattcctggtttcctctgtgtgtgtggttgggggtaggggttggagtacctgtccatggagaataccgaacacatcgtacttttgtccagcattatgaatgtgatgactgtggcatggcttttgggcatgtgtcacaacttactggacatcagaaaatccataaggtaggggaaacccacgaatatggtgaaaatacaaggggctttaggcatcgctcatcatttacaatgctccagagaatatgtacactatataaacactttgaatgtaaccaatgtggtgaaacttttaacagaccttcaaaggttattcaacatcagagcatgcacagtggactgaagccatacaaatgtgatgtatgtcaaaaggcctttaggtttctctcatccctctctatacatcagagatttcatgttggcaacagagtaaacctgactcggcatcaaaaaactcatactcaaaggaagcccttttcctgtaacttttgtggaaaaacctttcaccgtttctcagaaaaaactcaacatctattaattcatactagaaagaaatattatacatgtaattattgcaaaaaggaattcaatccgtactccaaatttattctacatcaaagaactcatacaggagagaaaccccacaagtgtgatgtttgtgagaaatcctttaaaagcatctcaaatcttaataaacatcagaaaactcatactggagagaagcccttttcatgtaatgaatgtaaaaaaacctttgcccagcgcacggatcttgctcgccaccaacaaatccataccggaaagaagtcttttatttgcagtagttgtaaaaagacctttgtccgtctgtcagatctaacacaacataaaggaactcatacgggagagagaccttaccaatgtacgacttgtgaaaaagcctttaaatatcggtcaaactttactaaacatcagaaaactcattctatagggaggccctttgcatgtaatgaatgtggaaagacctatcgccttaactgggaacttaaccaacataaaaaaattcatactggagagaaaccctatgaatgtggtgaatgtggaaagcgttttaacaataattcaaatcttaataaacacaagaaaatccatacaggagagaaacactttgtatgtaatcaatgtggaaaagcttttagcttaaactcaaagctttctcgacatcagagaactcacaataaaaaggaaaactcctctaaaagcgtctcaaatcttaacaaacatcagaaaactcatgctggagagaagccctttccatgtaatgaatgtaagaaagcctttgcccagcgcatggatcttgctcgccaccaacaaatccatactggaaggaaaccttttatttgcagtagttgtaaaaaaacctttgtccgtctgtcagatctaacacaacataaaggaactcatacaggagagagaccttaccaatgtacaacttgtgaaaaagcctttaaatatcagtcaaactttactaaacatcagaaaacccattctatagggaggccctttacatgtaatgaatgtggaaagacctttcgccttaactggaaacttaatcaacataaaaaaattcatactggagagaaaccctatgaatgtggtgaatgtggaaaatgttttaacaataattcaaatcttagtaaacacaagaaaatccatacaggagagaaacactttgtatgtaatcaatgtggaaaagcttttagcttaaactcaaagctttctcgacatcagataactcacaataaaaagaaaccctaaaaaaagaggaaggtgaagaaggatatttagagatgacttaccctttgctaaactcgagatcaatgtagaa

SEQ ID NO: 128862 - DNA, 818 bp, Homo sapiens
atggaagaagagttgttaagagagttgctctattctgaaaactggtggagcataccctacaatgacaccatacaggagttatgctgttgggctgttttgaagaggacattcattaatggaaataccagtaggaagccagggatgaagatggtaacgggccttaaaaagcaagaaaggagaagtaagcaatggggctgtgaaaaagaggctaagtttgtaccagacatgtggattgtactggaagtagggaggcctgaggaaaggggcatagatggaaagagatggggaaaaagctgttctgtggagcagtcagtctgggccttccaaaacccaatttggagtaaggcccagactctcttgaattctatgaaggctatgagaaaggtaaggaaggtgtagaagaaaagtttgaagctaggagaagttggttcatgaggaaaaaggcaataagccatctccataacatggaaatgcaaggtgaagcagcaagtgctgatgtagaagctgcagtaagttatccagaagatctagctaagatcattgatgaaagtgactacactaaacagtggatttcaaatgtagacaaaacagtcttctattggaagaagatgccatctagaactttcatagctacagaagagaagtcaatgcctggcttcaaagcttcaaaggacagcctgactcccttgttagggactaatgcagctggtggcttttagttaaagccactgctcacttatcattcccaaacttctagagcccttaagaactatgctaagttaactctgcttatgctttataaatggaacaaataaaac

SEQ ID NO: 128863 - DNA, 724 bp, Homo sapiens
  misc_feature (1)...(724): n = a,t,c or g
accgggaagggaacgtggaaccaggaaatcacagggaaaggctccctaccatccagaactcagaatttnctccaaaaggaaatatttaaaaaatcagaaacatataccatatgaaaaagtagccaaaacaatctgcaaaaactatctggacttccactgcccgccctgaagatgtggttacttgttcatttaaagaggaatttctcccaggaaatacacatcatgacttcagtattaagaaccgtagcgatcctgaattagaagtcagccgtccgttagcaaggccggagaattttccagcaaaccgatctcactccctgcttgaactgcgccatgtcgggggcgttgggcagcacactggacaggctgtagttccctgctggatgcttcctcggctcctcgaacagatcagccgagcttatggaggaacttgccgacagcctctctaggcgggccctggtctcataatcagcctgggattgtcttccaaaatacatatctgatgaaatggccttgacattgccaaacttcttctgggcctcatctgtattttcagctggctcataatcatggcttgcggcgagcagtaggtctgtctgaatagcctgtggttttcagaactgtttcagtatctttgctggtctcttttttccaataggaatctgaactgtcatcccagctagagaaagaactgctccttaactccactggctcgtcaaagtac

SEQ ID NO: 128864 - DNA, 1136 bp, Homo sapiens
ccgctgcttggtcctcctgcctccagtcttggctgctgctcacccctctcctcactcttcccacagggatctttcagaacacagtcatctgggtactgggtttgccgcagctgtggccagggcagtgatgagacagtgtctgctgtgtgtgtgcagggaactacagcctgtccagtgtgctgcccaacgcccccgacatggcgcagttcaagataagtcatcgtaagtcgaggtttttggtgtgacattgatgaacgtttgaattgtggtgactgtaggtggacgtggatttagcgtgcgtgcggggcctgctgtgcagttgtgatgaatttttgagctggcttgcccttaaccgcactgtccttgccacaccagccctcccctcctgcttgtcacagatggcatcctcccttccaggcctctgcgcaagaacaaggagaggagaaagggctgactcccagcgagggacttgtgcctttttctccccagccagaactgcgtcccaggcccccctagttgcaagctcagtcaggaagcagagggtctgggcacccaacccactaaactgccacactctgccaccctccaggggcagtcagaggggaggctacattggagaggaaggtgtctttgggtctcgggtggtgggcatctgggtgccaggcccaaatggatccccatggcccctaggtgtgcagaggcagagtgtgtactgctcggagtgggcagcggctcctcagccacgagctcttcagcgaggctgacttcatctcacgcctcctggccccaagcccttcacctgcgccagccagcatggcaatgccattgaggaggaggccccagagctgggcccactggggcgcgtgtttgtagatgacttccactacgactacaatttcattcatctccacgaggatctgtgctatgggcccttagaggggcctgacctagacctggcagggacaggggatcggacgcccccactgcacagccgtccaagggccagcctgagcccctcagccctgaggtgcccctgagctctgggcttctgtccacgctagcttggggcagccccaacagcagcagcagagttcctgaggcccagcccccggcccccagcctggctgagacggggc

SEQ ID NO: 128865 - DNA, 1599 bp, Homo sapiens
ggcggcaggaaagcagctgttggtgtggagacaaggccccaaggctctgcccagcccacctggctccccgtgcatggggacacctgcacgacactcctgcttccctgccgggcctggtggcggctggggggccttccctgggcagcctcggtggtgggtgccaagtgtgtctggaccccacctgagcgtggccttctcatgcttcacaaacccatgcctggttggtcgtctgggtacagagtggtcctgcccgccgtggctttcttccggctgagggcccaggtgaccaagctcggcgaagaggtgagcctgcgcttcctgaagagggaggccaagctgtgcggcttcctgcagaagagcttcctggccctggagaagagaatgaaggcctcggagagctcacggctgaagctggagggcagcctgcggggcgagctggagagccggtgggagaagcttcgggggctgatggaggagcgcctgcgggccctgcaggggcagcatgaggagagccacctcctggagcagtgccagggcctggatgctgccgtggcccagctgaccaagtttgtgcagcagaaccaggcgtcgctgaaccgtgtcctactggccgaggagaaagcctgggacgccaaggggcgcttggaggaaagccgggctggggagctggccgcctatgtgcaggagaacctggaggccgcacagctggctggcgagctggcccggcaggagatgcatggagagctggtgctgctccgagagaagagccgggctctggaggcatccgtggcgcagctggccgggcagttaaaggagctgagtggccatctcccggctctgagcagccggctcgatctgcaggagcagatgctgggcctcaggctgtccgaggcaaagaccgaatgggaaggtgcagagaggaagtccctggaggacctggccaggtggcggaaggaggtgaccgaacacctgcgaggggtgcgggagaaggtggatggcctcccccagcagatagagagtgtctccgacaagtgcctgcttcataagagcgactcagacctcaggatttccgccgaaggcaaggccagggagttcaaggttggggccctgcggcaggagctggccacgctactatcatccgtgcagctgctaaaggaagacaaccctgggcggaagatcgcggagatgcagggcaagctggccacgaaccaaataatgaagctggaaaactgcgtccaggccaacaagaccatccagaacctcaggttcaacactgaggcccggctgcgcacgcaggagatggccaccctgtgggagagtgtgctccggctgtggagtgaggagggcccgcggacgccgctgggcagctggaaggcgctcccatccctggtgaggccgcgggtcttcatcaaggacatggcgcctggcaaggtggtgcccatgaactgctggggcgtgtaccaggctgtgaggtggctgcgctggaaggcgtccctcataaagctcagggccctgcggaggccaggaggggtcctggagaagccccacagccaggagcaggtgcagcagctcacaccctcactgtttatccagaaataa

SEQ ID NO: 128866 - DNA, 3217 bp, Homo sapiens
aaagaacacaaaataaaccaatccttcagtctcctgaagaattcatatatgacactagaggtacccacatttattatgtaacagctaattagaggaaaccgtgtgttcacgtttcaacttttccgtaagtcccttcgggaggcctgtaatgcttggggaaagccttcagctgcagggaattaaatgcatatttgcgacttccaacattcttcattgtattttctcttcgacaaccctcactgcgcatgcactccagggcctgggtgaagacctgcggggccatgccatgctcgtgttgcaggatcaggcactgctccagtgtcaccgacatggctgtacggtccttagcgctcttgcagctggtgaaccggaccccattaaggcggcggcagatctcagcagcttgccagagaatgtcgacgttcttattcttccgggcatgcacgttctgacccagaaaccgcagcagctctggcaggcacgtctgactgcgagaccgaggcaggcaatcctcaggcaaaacttccttaaactgctcaaagtaggaatttaaccgcaccaaactctccacgttgatgacttcttgtaaagacgtatcgccaaacctctcggccagtgtctgctgctcattgatgcccacgttgaagaggacgggctgcactcgcagcagcatgccactctggatctcccggggcaaggcgtcaaacagcgggcccggcagagggacccgcacgttaaacccgtcgcgatttcctgtgatgacgggcagcatgtctgcggaggcgctggaagtggcctgagtgactttgaaggtcacgttcctcaagtccatgatcccaaggctcatgtcctccagcattgccagctcctccccgtaggtgctcagcaggctctcgaactgggccagcagcccgatggtgtagagctggcgcaggaagccgtcgtcatgcaggcagttcctcagcttaatgatgaagccgcagatgagggcggtcagcgtctggcagaagaccacgtcacggcggtactgcaggctcaggtaggtggctatggtgggcgcgctgtcctgcatgagcaggaataccatggccttcttggccttgtcactcatcatggccacgcagtcggtgagagtggtcagcagcgggtaaagggcctcactccattcacctgggctggactcttcaggagggggactgcaatctttcttgctggtgcagctgcctgcacaggggaagacatcctcacagccctcgccatgcagccgctccttctgcagcagcttgtccacacgctgaatgatgcactctaggctcttgtccacgttcagccacactttctcccactcctcctcgtgccagtccacctgcagggaagatcggctgtttctccctgtccaccgggccatgagggtgtcctggtcatttctaagcatcacctgctcctcctcagtcgaagtgggagaggccttggaggcaatgtagtcaggccgtgcagcgttcagcccatggatggagttggccaggagcttgcagtcgcagaccgtgaccagctgccgtgtcttgtctgccaagatggcgagtgtcctctcaaggccagtggcagacctgtccttggctgcccttgacagccgctctgcgtagtaactcacttgggttttcagggtgttgatctgggcgatgatctccttggctctgacaacatcctggggtatgtagattatggactggcagccagatgatgtacaacactcctcaaaatgtttcttggtctcttcaaatttgtgcagctttttgcggagacctcctgacttaaaaccttggcagtgtgctgctggcgccccaatggtgacgatgtcgtagttctgatctgatcctccatcgtcttgaactctcatcctttgtatgtgcaagtttgtgggaacaaattctaactttttatctgctttcaaactgcttgctttaaacgagggccctctgtactgatggaggtcggtcaggttctcctggtatgtgaggatgatggtctggtactgggtgacaatttggcgccggaggctctcccagcaaggggacagctctcccagctcctccagctcacacactctggctgcatcttcctctagtaggagcttcacgaactgccggggcacgtgcagggagagcacgctctctgccatctgctccaggatccgcaaatggttaccatcagtggttggaaaccggtacatgcggcagatggcaccaccgaacaccgatttcagcaaagtgtcctttcgcaatgaagcgtatttggatcggattcctaacgcctccgtcaagctctcatcgacaggaagaaccatcctcccattgacagtgtccacagaccgggtcacagggggccgttggtctgacttctcctccatctgccagccaatcacggtgatgttacctacacggtcactctctgcagaccttagtgttaaatgcaacctatgatgcctgtcctggagcagatctttgacaatgaacgttccagagcccagtaaatacattgttccctgagatctatctttgacatcatacacggagagtttgacttgtgtcatctgattgataagagagtcttgaaagaaggcaatactgcttagaaatataggattgttggttccctcaatgatctccgtctgtgcatgcttcgtccagaatgcctgaggaggggtggtgacactcaccgcaacaaaactatttggctttcgatctagcgatggagtatgcagctcactgcaagctaagctaaattctaaaatgggctcatctgggtcttgtatatttcctgccagagagaggcccagcatgtcggccgccacgtcgatggtggaagcccgctgcattgcacgggccctggcaccatggcgagggctgtgctctcttgctgtcatgatgtcattggtgatgatgtgcttcttgatcctcggtcagaccacgtctgattacccgggaagtgctggcaccgagccctagtcactaaagtgagtagcctggacatgtttgctctcggaccatgtggcatttcttcatagaagcatgtccaaatccatcatctggcgctccccggcccccgccagcccccgctgtcccgccggctggcgcgccagagccccgcagcagcagcagcgacgcgcgcgcctggctgtgaagtcggcctgcggcccggcctcaggtgctggtcctcg

SEQ ID NO: 128867 - DNA, 1446 bp, Homo sapiens
tcaaggcccctcactctcaatgtatggaatgtcatggtacttgatgttattgcatgcccattgctgcaaggcatcacacaagatatcctgagacaggcggtgtgcatattccaagatcacagtattggtccctggaggttccttcacttcctctttgacattaactggagaagccatcctaggtagacatctctcttctggcataaagggttcttcactctcatgctgcttctcaccttcatatatggtaggaaatgggaaagtttgctttgatttcatgcagcccatgttatgaagagctgaggatttctctccatttgccagttctgtgtttccttcttgggctttacccacacagttttctagttgcagacctgttgtgcacctcattcggagtttaggaggctggtttggagcctgttgccttagctctgtggggtgatgatgggaatagtgaaaaagagggtgacaaaagcagagagtctcaaagaggggacagaactcagtgactgaccagtttggttgatggttggaaagaggtgtcagatacatctgagctcccaagaatggtggtactttagaagggcctagggtgatggagctaatgcagaactccttgtaacctcttaaggtgtagtggctggcactgaggttggggctgtgaccatggtgagaggtgctccgggtctgggtgtgcctctcagtcttgtagatggcttgggcatgagggagggagggactgacaggaagcaggaagactccatgtgtttggcatggccgcttacttggagaatggcagtgccattgctgagatggagaagaccgggggcagagcaggctggacacagcaacagcgagcatcccagaaaattgggcatcacttgaagggctgggtgtctcatccggtttcctttttctgagcatgctgcatatcacatgggaatctatggcaccatcttgaccagaagcatggcctgcagtcctgaggagagaagtcaaggctattttccaggcccaacctgcaagtacctgttcacactggcctggaccacagagccagatacttaacaggaccaagaaagcagggtcatctctggcccactggtccttcgtctgttttcgataatgaaaatttctgtaaactctctgtggggatgtgaacaggtagagcatctgccaggcagcaaattcaaagtccatttgccgaaagcggaaaagccttctcagatatttgtagcgtttcgctccggctgtgtgtcttgccgcatccctggaattcaagactccgttcccctgcactaaggaattcactgaagtactcggtaacatcttccgccgcggcccgccggaagttgttgccgctggcttccggtcccctgagactggggcctcgctcgctcccgacccggttgcaagtgttgcggtgggagaaagtcgcgtccgcat

SEQ ID NO: 128868 - DNA, 678 bp, Homo sapiens
atggcatcagacctggtgaaccgctgtgaagcatgtgaccttccacagggtcccatctctgtgcatcagtttcctcgcctgtcaaatgaagttacgactactgttggaaggaattcagagtctcccaatcagaggagtgtgagtggaccctggactcccagggaagtgaggagaggtgtggctgcagctgctcatggcttctcaggacagaatgcaaagtgggcggcccacatcccagccacagcaatgtcctttgccttgccgtacagtgttttgcattcaccccatgccctcaccacccaccccctcaacccaggggatgcagtgacgatgccatcatggacttcaacagtgtctgctgccaatgcaagcaagggacgtagtttctcacaatgtttccaatccacagaagagggtcaagagaggaggagaccaagaacttctcaggccaaggttcaacaaggaagcactgcagggaaagtgaacgagctcatcactctggctggacacataaaaagtcaggccccacatgggaaacgcaagcctccaccaaggaccttcctggagagagggttctatggcttcagctactcggctgtgttgctggttgttcagcgttccgtgtttggtgagggaggacccccactggcagtcctccatgggcctcttccacagtga

SEQ ID NO: 128869 - DNA, 2353 bp, Homo sapiens
  misc_feature (1)...(2353): n = a,t,c or g
atggcatcagacctggtgaaccgctgtgaagcatgtgaccttccacagggtcccatctctgtgcatcagtttcctcgcctgtcaaatgaagttacgactactgttggaaggaattcagagtctcccaatcagaggagtgtgagtggaccctggactcccagggaagtgaggagaggtgtggctgcagctgctcatggcttctcaggacagaatgcaaagtgggcggcccacatcccagccacagcaatgtcctttgccttgccgtacagtgttttgcattcaccccatgccctcaccacccaccccctcaacccaggggatgcagtgacgatgccatcatggacttcaacagtgtctgctgccaatgcaagcaagggacgtagtttctcacaatgtttccaatccacagaagagggtcaagagaggaggagaccaagaacttctcaggccaaggttcaacaaggaagcactgcagggaaagtgaacgagctcatcactctggctggacacataaaaagtcaggccccacatgggaaacgcaagcctccaccaagagattcccatgtgatatgcagcatgctcagaaaaaggaaaccggatgagacacccagcccttcaagtgatgcccaattttctgggatgctcgctgttgctgtgtccagcctgctctgcccccggtcttctccatctcagcaatggcactgccattctccaagtaccaccattcttgggagctcagatgtatctgacacctctttccaaccatcaaccaaactgggccctgtgcatggcttcccaccccagtcacgtgactgcattctggactttgagctcatcaggaaagtaactggggcttggtcttccctgactgcaggatcatgggaaacaaagatacaggaattttcagaggaagacatccttgctccacacaggatcacaccaggtccacattcctccaagtctcctgttcacttcctggcctctctgtggggcaggaagaccaagctgtaccaccacaccattcaggacaaagagccaagaagcgtgcctgaagcaggcagctcagggagacgggacggcgggggagctgcacacagcatgctgtgcatggccccagagccagaccatccgggctccaaccccaactgccgctcacccgccacgctacacgctgatgctgatggcaatctgcaaagagaggctgccaaatgtcagggtgatggcacccaggtctccacccatgtggaccatacttctgctccacggcaggcagaaacaggcccagccacaggagagaacgagaaaatggagtcacatgggagatcaaaaagaggccttgttggagcagaccaatgcccagctgaaactcttgattcctacaccctccttgtggggcacaaaaagagggacaaggacagacagaccccagggccagctccacaagtcaattcctttgtgcctgaaaactacctgctgcgtggaccactggcaccgttaggcagtgcaatttccatgaaaaccgcgggcgccgtccacatccgccccagcggggaccttggacgcgcccccgcgcccgctgtccgtccccggccccggcccccgcggcggccgcgtcgcctcctgcccggcccggcccacctacctggcgctccccggcccccggcgccagccccgctgtcccgccgggctgcgcgccagagccccgcagcagcagcagcgccgccgcctggctgtgaagtcgcgggctgcgggcccggcctcaggtgctggtcctcctgccccggcccacggagcccgacccggcggcaaaccagcagcgaaccctccacgcgcgccgcagccctagccagccgccgccgctctagacgccgggcgcagccccgccctggccccgcccccttgtcgcgcatgcgcgctgagggcccggcccgcgccctgcgacccccgccccactaccagcccgagctgggtccgccctctgagacagtagggccggtgaccgagctgctcgcgccaattcctactgctaggttccccacaagatcccacccctatcctgtgactgcttcacctgcaaggagttcttgaacttctggacttgactgagcgatggcatcttcaccctgtcatccactgaggcatctgaggccctgacggatccccaagggaaagtttcctgggaggagccgcgacccggggatgcgcccccaaccttttgccctccggacaagagcacttcctgaagtgcagacgtacttcattgcccagggagattgtttaggaaattgaacatttccaaccagacaagcaaaaaattaaaatcttaattctttgaaaatacanccttctcaaa

SEQ ID NO: 128870 - DNA, 455 bp, Homo sapiens; identical to SEQ ID NO: 119190
  misc_feature (1)...(455): n = a,t,c or g

SEQ ID NO: 128871 - DNA, 359 bp, Homo sapiens
  misc_feature (1)...(359): n = a,t,c or g
attcaggacataggcatgggcaaggacttcatgactaaaacaccaaaagcaatggcaacaaaagccgaaattgacaaatgggatctaattcaactaaagagcttctgcacattaaaagaaattaccatcagagtgaacaggcaaactacagaaaatctacccatctgacaaagggctaatatccagaatgctacctaatttttaaagactttttccggcatcttgaaaaaaaccaccattatttgacataggtaaaactgaaaaaacaaactattcataattacaatttgtgacacattatgtagtagctaggttcatcacataaattacatgntaccccagttcaagttaaatttcag

SEQ ID NO: 128872 - DNA, 2025 bp, Homo sapiens; identical to SEQ ID NO: 119515

SEQ ID NO: 128873 - DNA, 3570 bp, Homo sapiens; identical to SEQ ID NO: 116242

SEQ ID NO: 128874 - DNA, 1380 bp, Homo sapiens
atggataaattcctcgacacatacaccctcccaagaataaaccaggaagaacttgaatctctgaatagaccaataacagcctctgaaattgtggcaataatcaatagcttatcaagcaaaaagagtccaggaccagatggattcacagctgaattctactggagtgttggaagtgctggccaggcaatcaggcaggagaaggaaataaagggtattcaattaggaaaagaggaagtcaaattgtccctgtttgcagatgacatgattgtatatttagaaaaccccattgtctcagccccaaatctccttaagctgataagcaacttcagcaaagtctcaggatacaaaatcaatgtacaaaaatcacaagcattcttatacaccaataacagacaaacggagagccaaatcatgagtgaactcccattcacaattgcttcaaagagaataaaatacctaggaatccaacttataagggatgtgaaggacctcttcaaggagaactacaaaccactgctcaaggaaataaaagaggatacaaacaaatggaagaacattccatgctcatgggtaggaagaatcaatatcgtgaaaatggccatactgcccaaggtaatttacagattcaatgccatccccatcaagctaccaatgactttcttcacaatattggaaaaaaatactttaaagttcatatggaaccaaaaaagagcccgcattgccaagtcaatcctaaaccaaaagaacaaagctggaggcatcacactacctgacttcaaactatactacaaggctacagtaaccaaaacaacatggtactggcaccaaaacagagatatagatcaatggaacagaacagagccctcagaaataacgcctcatatctacaactatctgatctttgacaaacctgagaaaaacaagcaatggggaaaggattccctatttaataaatggtgctgggaaaactggctagccatatgtagaaagctgaaactggatctcttccttacaccttatacaaaaattaattcaagatggattaaagacttaaaggttagacctaaaaccataaaaaccctagaagaaaacctaggcattaccattcagcacataggcatgggcaaggacttcatgtctaaaacaccaaaagcaatggcaacaaaagccaaaattgacaaatgggatctaattaaactaaagagcttctgcacagcaaaagaaactaccatcagagtgaacagggaacctacagaatgggagaaaattttcgcaacctactcatctgacaaagggctaatatccagaatctacaatgaactcaaacaaatttacaagaaaaaacaaacaactccatcaaaaagtgggcgaaggacatga

SEQ ID NO: 128875 - DNA, 2745 bp, Homo sapiens; identical to SEQ ID NO: 119717

SEQ ID NO: 128876 - DNA, 1698 bp, Homo sapiens
atggaagatgaaatgaatgaaatgaagcaagaagggaagtttagagaaaaaagaataaaaagaaacgaacaaagcctccaagaaatatgggactatgtgaaaagaccaaatctgcgtctgattggtgtacctgaaagtgacggggagaatggaaccaagttggaaaacactctgcaggatattatccaggagaacttccccaatctagcaaggcagaccaacattcagattcaggaaatacaaagaatgccacaaagatactcctcgagaagagcaactccaagacacataattgtcagattcaccaaagttgaaatgaaggaaaaaatgtcaagggcagccagagagaaagaaatacaaactaccatcagagaatactacaaacacctctacgcaaataaactagaaaatctagaagaaatggataaattcctcgacacatgcactctcccaagactaaaccaggaagaagttgaatctctgaatagaacagtaacaggatctgaaattgtggcaataatcaatagcttaccaaccaaaaagagtccaggaccagatggattcacagccgaattctaccagagacaatcagagagccaaatcatgagtgaattcccattcacaattgcttcaaagagaataaaatacctaggaatccaacttacaagggatgtgaaggatctcttcaaggagaactacaaaccactgctcaatgaaattaaagaggatacaaagaaatggaagaacattccatgctcatgggtaggaagaatcaatatcgtgaaaatggccatactgcccaaggtaatttatacattcaatgccatccccatcaagctaccaatgactttcttcacagaattggaaaaaactactttcaagttcatatggaatcaaaaaagagcccacgtcgccaagtcaatcctaagccaaaagaacaaagctggaggcatcacgctacctgacttcaaactatactacaaggctacagtaaccaaaacagcatggtactggtaccaaaacagagatatagatcaatggaacagaacagagccctcagaaataatgctgcatatctacagctatctgatctttgacaaacctgagaaaaacaagcaatggggaaaggattccctatttaataaatggtgctgggaaaactggctagccatatgtagaaagctgaaactggatcccttccttacaccttatacaaaaattaattcaagatggattaaagacttaaacattagacctaaaaccatagaaaccctagaagaaaacctaggcattaccattcaggacataggcatgggcaaggacttcatgtctaaaacatcaaaagcaatgtcaacaaaagccaaaattgacaaatgggatctaattaaactaaagagcttctgcacagcaaaagaaactaccatcaaagtgaacaggcaacctacaaaatgggagaaaattttcgcaacctactcatctgacaaagggctaatatccagaatctacaatgaactcaaacaaatttacaagaaaaaaaacaaacaaccccatcaaaaagtgggtgaaggatatgaacagacacttctcaaaagaagacatctatgcagccaaaagacacatgaaaaaatgctcatcatcactggccatcagagaaatgcaaatcaaaaccacaatgagataccatctcacaccagttag

SEQ ID NO: 128877 - DNA, 1596 bp, Homo sapiens
atgatcaagtgggcttcatccctgggatgcaatatatgcaaatcaataaatgtaatccagcatataaacagaaccaaagacaaaaaccacatgattatctcaatagatgcagaaaagacctttgacaaaattcaacaacccttcatgctaaaaactctcaataaattaggtattgatgggacatatctcaaaataataagagctatctatgacaaacccacagccaatatcatactgaatgggcaaaaactggaagtattccctttgaaaactgccacaagacagggatgccctctctcaccactcctattcaacatagtgttggaagttctggccagggcaattaggcaggagaaggaaataaagggtattcaattaggaaaagaggaagtcaaattgtccctgtttgcagaagacatgattgtatatctagaaaaccccattatctcagcccaaaatctccttaagctgataagcaacttcagcaaagtctcaggatacaaaatcaatgtacaaaaatcacaagcattcttatacaccaataacagacaaacagagagccaaatcatgagtgaactcccattcacaactgcttcaaagagaataaaatacttaggaatccaacttacaagggacgtgaaggacctcttcaaggagaactacaaaccactgctcaatgaaataaaagaggatacaaagaaatggaagaacattccatgctcatgggtaggaagaatcagtatcgtgaaaatggccatactgcccaaggtaatttacagattcaatgccatccccatcaagctaccaatgactttcttcacagaattggaaaaaactactttaaagttcatatggaaccaaaaaacagcccgcaacaccaagtcaatcctaagccaaaagaacaaagctggaggcattatgctacctgacttcaaactatactacaaggctacagtaaccaaaacagcatggcactggtaccaaaacagagacatagataaatggaacagaacagagccctcagaaataacgccgcatatctacaactatctgatctttgacaaacctgagaaaaacaagcaatggggaaaggattccctatttaataaatggtgctgggaaaactggctagccgtatgtagaaagctgaaactggatcccttccttacaccttatacaaaaattaattcaagatggattaaagacttaaacgttagacccaaaaccataaaaaccctagaagaaaacctaggcattaccattcagaacttaggcatgggcaaggacttcatgtctaaaacaccaaaagcaatggcaacaaaagccaaaattgacaaatgggatctaattaaactaaagagcttctgcacagcaaaagaaaccaccatcagcgtgaacaggcaacctacaaaatgggagaaaattttcgcaacctactcatctgacaaagggctaatatccagaatctacaatgaactcaaacaaatttacaagaaaaaaacaaacaaccccatcaaaaagtgggcaaaggatatgaacagacacttctcaaaagaagacatttatgcagccaaaagacacatgaaaaaatgctaa

SEQ ID NO: 128878 - DNA, 2760 bp, Homo sapiens; identical to SEQ ID NO: 121968

SEQ ID NO: 128879 - DNA, 3267 bp, Homo sapiens; identical to SEQ ID NO: 128734

SEQ ID NO: 128880 - DNA, 1193 bp, Homo sapiens
atgcagaaacaggagggggctttagtgaggaaaaaggggagaaagaaagaaagaattactgcaagaggaagagtaagagcaaaaggagaaaattggaaaattttaaacatgtatagagtaaagttcatatggaaccaaaaaagagcccgcattgccaagtcaatcctaagccaaaagaacaaagctgcaggcatcaccctacctgacttcaaactatactacaaggctacagtaaccaaaatagcatggtactggtaccaaaacagagatatggaccaatggaacagaatagagccctcagaaataatgccacacatctacaactatctgatctttgacaatcctgacaaaagcaagaaatggggaaaggattccctatttaataaatggtgctgggaaaactggctagccatatggagaaagctgaaactggatcccttccttacaccttatacaaaaattaattcaagatggattaaagacttaaatgttagacctaaaaccataaaaaccctagaagaaaacctaggcaataccattcagaacataggcatgggccaggactacatgtctaaaacaccaaaagcaatggcaacaaaagccaaaattgacaaatgggatctaattaaactaaagagcttctgcacagcaaaagaaactaccatcagagtgaacaggcaacctacagaatgggagaaaatttttgcaatctactcatctgacaaagggctaatatccagaatttacaatgaaccccaacaaatttacaagaaaaaaacaagcaaccccatcaacaagtgggcgaaggatatgaacagacacttctcaaaagaagacatgtatgcagccaaaagacacgtgaaaaaatgctcatcatcactagccatcagagaaatgcaaatcaaaaccacaatgagataccatctcacaccagttagaatggcgatcattaaaaagtcaggaaacaacagggattgcggagatcagtgccactatcaaggacttgaaaggtgcaggggtggtgattcccaccacatccctgttcaactcttccgtttggcctgtgaagaagatggaccttggagaatgacagtggattaccataagcttaaccaagtggtgactccaattacagctgctgtaccagatgtggttttattgcttgagcaaattaacacatctcctggtacctg

SEQ ID NO: 128881 - DNA, 2307 bp, Homo sapiens
atcaacaaaattgatagaccactagcaagactaataaagaagaaaagagagaagaatcaaatagatgcaataaaaaatgataaaggggatatcaccaccaatcccacagaaatacaaactaccatcagagaatattataaacacctctacgcaaataaactagaaaatctagaagaaatggataaattcctcgacacatacatcctcccaagactaaaccaggaagaagttgaacctctgaatagaccaataacaggctctgaaattgaggaaataatcaatagcttaccaaccaaaaaaactccaggaccagatggattcacagccgaattctaccagaggtacaaagaggagctggtaccaatccttctgaaactattccaatcaatagaaaaagagggaatcctccctaactcattttatgaggccagcatcatcctgataccaaagcctgacagagacacaaccaaaaaagagaatttcagaccaatatccctgatgaacatcgatgtaaaaatcctcaataaaatactggcaaaccgaatccagcagcacatcaaaaagcttatccaccatgatcaagtgggcttcatccctgggatgcaaggctggttcaacatacgcaaatcaataaatgtaatccagcatataaacagaaccaaagacaaaaaccacatgattatctcaatagatgcagaaaaggcctttgacaaaattcaacaacccttcatgctaaaaactctcaataaattaggtattgatgggacgtatctcaaaataataagagctatctatgacaaacccacagccgatatcatactgaatgggcaaaaactggaagcattctctttgaaaactggcacaagacagggatgccctctctcaccactcctattcaacatagtgttggaagttctggccagggcagtcaggcaggagaaggaaataaagggcattcgattaggaaaagaggaagtcaaattgtccctgcttgcagatgacatgattgtatatctagaaaaccccatcgtctcagccccaaatctcctcaagctgataagcaacttcagcaaaagaataaaatacctaggaatccaacttacaagggatgtgaaggacctcttcaagaagaactacaaaccactgctcaatgaaataaaagaggatacaaacaagtggaagaacattccatgctcatgggtaggaagaatcaatatcgtgaaaatggccatactgcccaaggtaatttatagattcaatgccatcccaatcaagctaccaatgactttcttcacagaattggaaaaaactactttaaagttcatatggaaccaaaaaagagcctgcatcgccaagtcaatcctaaaccaaaagaacaaagctggaggcatcatgctacctgacttcaaactatactacaaggctacaggaaccaaaacagcatggtactggtaccaaaacagagatatagatcaatggaacagaacacagccctcagaaataatgccacatatctacaactatctgatctttgacaaacctgacaaaaacaagaaatggggaaaggattccctatttaataaatggtgctgggaaaactggctagccatatgtagaaagctgaaactggatcccttccttacaccttatacaaaaattaattcaagatggattaaagacttaaacgttagccctaaaaccataaaaaccctagaagaaaacctaggcaataccattcaggacataggcatgggcaaggacgtcatgtctaaaacaccaaaagcaatggcaacaaaagccaaaattgacaaatgggatctaattaaactaaagagcttctgcacagcaaaagaaacgaccatcagagtgaacaggcaacctacagaatgggagaaaatttttgcaacctactcatctgacaaagggctaatattcagaatctacaatgaactcaaacaaatttacaagaaaaaaacaaacaacctcatcaaaaagtgggcgaagaacatgaacagacacttctcaaaagaagacatttatgcagccaaaaaacacatgaaaaaatgctcatcatcactggccatcagagaaatgcaaatcaaaaccacaatgagataccatctcacaccagttggaatggcaatcattaaaaagtcaggaaacaacagtctaagtaaccagatgtacagaatacaaaagatgcaggtacaagcccaaattcaagcttacaatgtgattacaaataataattataataacaatggcattcagctacgggacctgacactgaagatacctactgaatag

SEQ ID NO: 128882 - DNA, 3099 bp, Homo sapiens; identical to SEQ ID NO: 128084

SEQ ID NO: 128883 - DNA, 3095 bp, Homo sapiens
atgggagactttaacaccccactgtcaacattagacagatcaacgaggcagaaagtcaaaaaggataaccaggaattaaactcagctctgcaccaagtggacctaatagacatctacagaactctccaccccaaatcaacagaatatacatttttttcagcaccacaccacacctattccaaaattgaccacatagttggaagtaaagctctcctcagcaattgtaaaagaacagaaattataacaagctatctctcagaccacagtgcaatcaaactagaactcaggattaagaatctcactcaaaaccgctcaactacatggaaactgaacaacctgctcctgaatgactactgggtacataacgaaatgaaggcagaaataaagatgttctttgaaaccaacgagaacaaagacacaacataccagaatctctgggacgcattcaaagcagtgtgtagagggaaatttatagcactaaatgcccacaagagaaagcaggaaagatccaaaattgacaccctaacatcacaattaaaagaactagaaaagcaagagcaaacacattcaaaagctagcagaaggcaagaaataactaaaatcagagcagaactgaaggaaatagagacacaaaaaaccctgcaaaaaattaatgaatccaggagctggttttttgaaaggatcaacaaaattgatagaccgctagcaagactaataaagaaaaaaagagagaagaatcaaatagacgcaataaaaaatgataaaggggataccaccaacgatcccacagaaacacaaactaccatcagagaatactacaaacacctctatgcaaataaactagaaaatctagaagaaatggataaattcctcgacacatacactctcccaagactaaaccaggaagaagttgaatatctgaatagaccaataacaggatctgaaattgtggcaataatcaatagcttaccaaccaaaaagagtccaggaccagatggattcacagccgaattctaccagaggtacaaggaggaactggtaccattccttctgaaactattccaatcaatagaaaaagagggaatcctccctaactcattttatgaggccagcatcattctgataccaaagccaggcagagacacaacaaaaaaagagaattttagaccaatatccttgatgaacatggatgcaaaaatcctcaataaaatactggcaaaccgaatccagcagcatatcaaaaagcttatccaccatgatcaagtgggcttcatccctgggatgcaaggctggttcaatatacgcaaatcaagaaatgtaatccagcatataaacagagccaaagacaaaaaccacatgattttctcaatagatgcagaaaagccctttgacaaaattcaacaacctttcatgctaaaaactctcaataaattaggtattgatgggacgtatttcaaaataataagagctatctatgacaaacccacagccaatatcatactgaatgggcaaaaactggaagcattccctttgaaaactggcacaagacagggatgccctctctcaccactcctattcaacatagtgctggaagttctggccagggcaattaggcaggagaaggaaataaagggtattcaattaggaaaagaagaagtcaaattgtccctgtttgcagacgacatgattgtatatctagaaaaccccattgtctcagcccaaatcttctttaagctgataagcaacttcagcaaagtctcaggaaacaaaatcaatgtacaaaaatcacaagcattcttatacaccaacaacaggcaaacagagagccaaatcatgagtcaactcccatacacaattgcttcaaagagaataaaatacctaggaatccaacttacaagggatgtgaaagacctcttcaaggagaactacaaaccactgctcaaggaaataaaagaggacacaaacaaatggaagaacattccatgctcatgggtaggaagaatcaatatcgtgaaaatggccatactgcccaaggtaatttacagattcaatgccatccccatcaagctaccaatgactttcttcacagaattggaaaaaactaccttaaagttcatatggaaccaaaaaagagcccacatcgccaagtcaatcctaagccaaaagaacaaagctggaggcatcacactacctgacttcaaactatactacaaggctacagtagccaaaacagcatggtactggtaccaaaacagagatatagatcaatggaacagaacagagccctcagaaataacgccacatatctacaactatctgatctttgacaaacctgagaaaaacaagcaatggggaaaggattccctatttaataaatggtgctgggaaaactggctaaccatatgtagaaagctgaaactggatcccttccttacaccttatacaaaaatcaattcaagatggattaaagacttaaacgttagacctaaaaccataaaaaccctagaagaaaacctaggcattaccattcaggacataggcatgggcaaggacttcatgtctaaaacaccaaaagcaatggcaacaaaagacaaaattgacaaacgggatctaattaaactaaagagcttctgcacagcaaaagaaactaccatcagagtgaacaggcaacctacaaaatgggagaaaattttcgcaacctactcatctgacaaagggctaatatccagaatctacaatgaactcaaacaaatttacaagaaaaaaacaaacaaccccatcaaaaagtgggcaaaggacatgaacagacacttctcaaaagaagacatttatgcagccaaaaaacacatgaaaaaatgctcatcatcactggccatcagagaaatgcaaatcaaaaccacaatgagataccatctcacaccagttagaatggcaatcattaaaaagtcaggaaacaacagctattcagctagtgggttttctattatgacggtaaaagtgccctttacactggcgtccaaggtgtgtccttctaaatctttccttttgcaagtcttcccagactcacagtgtaatgaaggcgataaagatgaaag

SEQ ID NO: 128884 - DNA, 3657 bp, Homo sapiens; identical to SEQ ID NO: 120146

SEQ ID NO: 128885 - DNA, 3192 bp, Homo sapiens; identical to SEQ ID NO: 118064

SEQ ID NO: 128886 - DNA, 2067 bp, Homo sapiens
atgatcagagcagaactgaaggagatagagacacaaaaaacccttcaaaaaatcaatgaacccaggagctggtttttggaaaagatcaacaaaattgatagaccactagcaagactaataaagaagaaaagagagaagaaccaattaaatgcaataaaaaatgataaaggggatatcaccactgatcccacagaaatacaaactaccatcagagaatactataaacacctctatgcaaataaactagaaaatcttgaagaaatggataaattcctggacacatacaccttcccaagactaaaccaggaagaagttgaatccctgaatagaccaataacaggctctgaaattgaggcaataattaatagcttaccaaccaaaaaaaagtccaggaccagatggattcacagccgaattctaccagaggtacaaggaggagctgatgcagaaaaggcctttgacaaaattcaacagcccttcatgctaaaaactctcaataaattaggtattgaagggaagtatctcaaaataataagagctatttatgacaaacccacagctaacatcatactcaacgggcaaaaactgaaagcattccctttgaaaactggcataagacagggatgccctctctcaccactcctattcaacatagtgttggaagttctcaccagggaaatcagggaagagaaagaaatgaagggtattcaattaggaaaagaggaagtcaaattgtccctgtttgcagatgacatgattgtatctctagaaaaccccatcgtctcagcccaaaatctccttatgcagataagcaacttcagcaaagtctcaggatacaaaatcaatgtacaaaaatcacaagcattcttatacaccaataacagacaaacagagagccaaatcatgagtgaactcccattcacaattgctacaaagaaaataaaatacccaggaatccaacttacaagggatgtgaaggtcctcttcaaggagaactacaaaccactgctcaatgaaataaaagaggatacaaatgaatggaagaacattccatgctcatggataggaagaatcaatatcgtgaaaatggccatactgcccaaggtaatttatagattcaatgccatcaccatcaagctaccaatgactttattcaaagaatttgaaaaaactactttcaagttcatatggaaccacaaaagagccagcattcccaagtcaatcctaagccaaaagaacaaagctggaggcatcaagccacctgacttcaaaaaatactacaaggctacagtaaccaaaacagcatgggactggtaccaaaacagagttatagaacaatggaatagaatggagccctcagaaataatgccacacatctacaactatctgatctttgaccaacctgacaaaaacaagcaagggggaaaggattccctatttaataaacggtgctgggaaaactggctaaccatatgtagaaagctgaaactggatcccttccttacaccttatacaaaaatcaattcaagatggattaaagacttaaacgttagacctaaaaccataaaaaccctagaagaaaacctaggcaataccattcaggacataggcatgggcaaggacttcatgtctaaatcaccaaaagcaatggcaacaaaagccaaaattgacaaatgggatctaattaaactaaagagcttctgcacagcaaaagaaactaccatcggagtgaacaggcagcctacagaatgggagaaaatttttgcaatctactcatctgacaaagggttaatatccagaatctacaatgaagtcaaacaaatttacaagaagaaaacaaacaaccccatcaaaaagtgggcaaaggatatgaatagacacttctcaaaagaagacatttatgcagccaaaagacacatgaaaaaatgctcatcgtcactggccatcagagaaatgcaactcaaaaccagaatgagatatcatctcacaccagttagaatggtaatcattaaaaagtcaggaaacaacagagacatggatgaaattgaaaatcatcattctcagtaa

SEQ ID NO: 128887 - DNA, 3093 bp, Homo sapiens
atggaagatgaaatgaatgaaatgaagcgagaagggaagtttagagaaaaaggaataaaaagaaacgagcaaagcctccaagaaatatgggactatgtgaaaagaccaaatctacatctgattggtgtacctgaaagtgacggggagaatggaaccaagttggaaaacactctgcaggatattatccaggagaacttccccaatctagcaaggcaggccaacgttcagattcaggaaatacagagaacgccacaaagatactcctcgagaagagcaactccaagacacgtaattgtcagattcaccaaagttgaaatgaaggaaaaaatgttaagaacagccagagagaaagaaacagaaactaccatcagagaatactataaacacctctatgcaaataaactagaaaatctagaagaaatggataaattccttgacacatacactctcccaagactaaaccaggaagaagctgaatctctgaatagaccaataacaggatctgaaattgtggcaataatcaatagcttaccaaccaaaaagagtccaggaccagatggattcacagccgaattctaccagaggtacaaggaggaactggtaccattccttctgaaactattccaatcaatagaaaaagagggaatcttccctaactcattttatgaggccagcatcatcctgataccaaagctgggcagagacacaaccaaaaaagagaattttagaccaatatccttgatgaacattgatgcaaaaatcctcaataaaatactggcaaaccaaatccagcagcacatcaaaaagcttatccaccatgatcaagtgggcttcatccctgggatgcaaggctggttcaatatacacaaatcaataaatgtaatccagcatataaacagaatcaaagacaaaaaccacatgattatctcaatagatgcagaaaaggcctttgacaaaattcaacaatgcttcatgctaaaaactctcaataaattaggtattgatgggatgtatttcaaaataataagagctatctatgacaaacccacagccaatatcatactgaatgggcaaaaactggaagcattccctttgaaaactggcacaagacagggatgccctctctcaccactcctattcaacatagtgttggaaggtctggccagggcaattagtcaggagaaggaaataaagggtattcaattaggaaaagaggaagtcaaattgttcctgtttgcagacgacatgattgtatatctagaaaaccccattgtctcagcccaaaatctccttaagctgataagcaacttcagcaaagtctcaggatacaaaatcaatgtacaaaagtcacaagcattcttatacaccaacaacagacaaacacagagccaaatcatgagtgaactcccattcacaattgcttcaaagagaataaaatacctaggaatccaacttataagggatgtgaaggacctcttcaaggagaactacaaaccactgctcaaggaaataaaagaggatacaaacaaatggaagaacattccatgctcatgggtaggaagaatcaatatcgtgaaaatggccatactgcccaaggtaatttacagattcaatgctatccccatcaagctaccaatgactttcttcacagaattggaaaaaactactttaaagttcatatgggaccaaaaaagagcccgcatcgtcaagtctatcctaagccaaaagaacaaagctggaggcatcacgttacctgacttcaaactatactacaaggctacagtaaccaaaacagcatggtactggtgccaaaacagagatatagatcaatggaacagaacagagccctcagaaataaggccgcatatctacaagtatctgatctttgacaaacctgagaaaaacaagcaatggggaaaggattccctatttaataaatggtgctgggaaaactggctagccatatgtagaaagctgaaactggatcccttccttacaccttatacaaaaattaattcaagatggattaaagacttaaatgttagacctaaaaccataaaaaccctagaagaaaacctaggcattaccattcaggacataggcatgggcaaggacttcatgtctaaaacaccaaaagcaatggcaacaaaagccaaaattggcaaatgggatctaattaaactaaagagcttctgcacagcaaaagaaactaccatcagagtgaataggcaacctacaaaatgggagaaaattttcgcaacctactcatctgacaaagggctaatatccagaatctacaatgaactcaaacaaatttacaagaaaaaaacaaacaaccccatcaaaaaatgggcgaaggacatgaacagacacttctcaaaagaagacatttatgcagccaaaaaacacatgaaaaaatgctcaccatcactggccatcagagaaatgcaaatcaaaaccacaatgagataccatctcacaccagttagaatggcaatcattaaaaagtcaggaaacaacagcctgatgtggtggagagatttgacgagactgagactctggttgaagagagaggcaatcccaggagaggggcggaaagcggcaaaagttaatgcgggagtcggagagaagggcatctacacagcaagcagcaggggcggcccgccatctgcgcgctcgaaggcggtcacggtggtcgcggaaggggcggcgtccagatcctggctttccatggatgcgcccgagctgggcccggggctggtggagcgtctggagcagctggcgacgtgtcctctgtgcgggggctccttcgaggacccggtgcttctggcgtgcgagcacagcttctgccgcgcgtgtctggcccgccgctgggggactccgccggcgaccggcaccgaggcttcccccaccgcctgtccctgctgcggcctgccgtgtccccgccgcagcctgaggtctaatgtgcggctggcggtggaggtgcgaatcagccgcgagctgcgagagaagctggctgagcctggggcccgtgcggggagacgccgaggggggcgcatccccaccatgggctgcctggacctgcccggagag

SEQ ID NO: 128888 - DNA, 3195 bp, Homo sapiens
atggagctgaaaaccaaggctcaagaactacgtgaagaatgcagaagcctcaggagccaatgcgatcaactggaagaaagggtatcagcgatggaagatgaaatgaatgaaatgaagcgagaagggaagtttagagaaaaaagaataaaaagaaacgaacaaagcctccaagaaatacgggactatgtgaaaagaccaaatctacgtctgattggtgtacctgaaagtgacagggagaatggaaccaagctggaaaacactctgcagaatattatccaggagaacttccccaatctagcaaggcaggccaacgttcagattcaggaaatacagagaacgccacaaagatactccttgagaagagcaactccaagacacacaattgtcagattcaccaaagttgaaatgaaggaaaaaatgttaagggcagccagagagaaaggtcgggttaccctcaaagggaagcccatcagactaaagcggatctctcggcagaaactctacaagccagaagagatgtgtagagggaaatttacagcactaaatgcccacgagagaaagcaggaaagatccaaaattgacaccctaacatcacaattaaaagaactagaaaagcaagagcaaacacattcaaaagctagcagaaggcaagaaataactaaaatcagagcagaactgaaggaaatagagacacaaaaaacccttcaaaaaattaatgaatccgggagctggttttttgaaaggatcaacaaaattgatagaccgctagcaagactaataaagaaaaaaagagagaagaataaaatagatgcaataaaaaatgataaaggggatatcaccactgatcccacagaaatacaaactaccatcagagaatactacaaacacctctacgcaaataaactagaaaatcgagaagaaatggataaattcctcaacacatacactctcccaagactaaaccaggaaaaagttgaatctctgaatagaccaataacaggagctgaaattgtggcaataatcaatagcttaccaaccaaaaagagtccaggaccagatggattcacagccgaattctaccagaggtacaaggaggaactggtgccattccttctgaaactattccaatcaacagaaaaagagggaatcctccctaactcatttgatgaagccagcatcatcctgataccaaagcccagcagagacacaaccaaaaaagagaattttagaccagtatccttgatgaacattgatgcaaaaagcctcaataaaacactggcaaaccgaatccagcagcacatcaaaaagcttatccaccatgatcaagtgggcttcatccctgggatgcaaggctggttcaatatacacaaatctataaatgtaatccagcatataaacagaaccaaagacaaaaaccacataattatctcaatagatgcagaaaaggcctttgataaaattcaacaacacttcatgctaaaaactctcaataaattaggtattgatgggacgtatctcaaaataataagagctatctatgacaaacccacagccaatatcatactgaatgggcaaaaactggaagcattccctttgaaaactggcacaagacagggatgccctgtctcaccactcctattcaacatagtgttggaacttctggccacggcaattaggcagaaggaaataaagcgtattcaattaggaaaagaggaagtcaaattgtccctgtttgcagacgacatgactgtatatctagaaaaccccactgtctcagcccaaaatctccttaacctgataagcaacttcagcaaagtctcaggatacaaaatcaatgtacaaaaatcacaagcattcttatacaccaataacagacaaacagagagccaaatcatgagtgaactcccattcacaattgcttcaaagagaataaaatacctaggaatccaccttacaagggacgtgaaggacctcttcaaggaaaactataaaccactgctcaatgaaataaaagaggatacaaagaaatggaagaacattccatgctcatgggtaggaagaatcaatatcgtgaaaatggccatactgcccaaggtaatttatagattcaatgccatccccatcaagctgccaatgactttcttcacagaattggaaaaaactactttaaagttcatatggaaccaaaaaagagcccgcatcgccaagtcaatcctaagccaaaagaacaaagctggaggcatcatgctacctgacttcaaactatactacaaggctacagtaaccaaaacagcatggtactggtaccaaaacagagatatagatcaatggaacagaacagagccctcagaaacaacgccatatatctacaactatctgatctttgacaaacctgagaaaaacaagcaatggggaaaggattccctattcaataaatggtgctgggaaaactggctagccatatgtagaaagctgaaactggatcccttccttacaccttatacaaaaatcaattcaagatggattaaagacttaaacgttagacctaaaaccataaaaaccctagaagaaaacctaggctttaccattcaggacataggcatgggcaaggacttcatgtgtaaaacaccaaaagcaatggcaacaaaagccaaaattgacaaatgggatctaatgaaactaaagagcttctgcacagcaaaagaaactaccatcagagtgaacaggcaacccacaaaatgggagaaaattttcacaacctactcatctgacaaagggctaatatccagaatctacaatgaactcaaacaaatttacaagaaaaaaacaaacaaccccatcaaaaagtgggcaaaggacatgaacagacacttctcaaaagaagacatttatgcagccaaaaaacacatgaaaaaatgctcatcatcactggccatcagagaaatgcaaatcaaaaccacaatgagatatcatctcacaccagttagaatggcaatcatgaaaaagtcaggaaacaacaggtgcctgcattcaatgcctccagccctgcatgctgggagccacagaggtttcatggacacatatttatttattcaaggtcagcccttcaaccctttaggcctttactgccctgtgccatctcatgaagttgtgaactacggccctcctaagaagtcagcacaattcagcagctga

SEQ ID NO: 128889 - DNA, 3213 bp, Homo sapiens; identical to SEQ ID NO: 116408

SEQ ID NO: 128890 - DNA, 3147 bp, Homo sapiens; identical to SEQ ID NO: 124344

SEQ ID NO: 128891 - DNA, 1336 bp, Homo sapiens
atggcaacacgactgtcgggtgatggatcactttccgatgagggtgctgtgcaggccgccagctgtgccagtgcagactcccgatcagcatggctgcaccgctccccactaacccacacttgccggaacagggaaccaggaaacatcacacctcggattcaatgccatccccatcaagctacgaatgactttcttcacagaactggaaaaactactttaaagttcatatggaaccaaaaaagagcccgcatcaccaagtccatcctaagccaaaagaacaaagctggaggcatcacactacctgacttcaaactatactacaaggctatagtaaccaaaacagtgtggtactggtaccaaaacagagatatagaccaatggaacagaacagagccctcagaaataatgccacatatctacaactatctgatctttgacaaacctgacaaaaacaagaaatggggaaaggattccctatttaataaatggtgctgggaaaactggctagccatatatagaaagctgaaactggatcccttccttacatcttatacaaaaattaattcaagatggattaaagacttaaatgttagacctaaaaccataaaaaccctagaagaaaacctaggcaataccattcaggacataggcatgggcaaggacttcatgtctaaaacaccaaaagcaatggcaacaaaagacaaaattgacaaatgggatctaattgaactaaagagcttctgcacagcaaaagaaactaccatcagagtgaacaggcaacctacagaatgggagaaaatttttgcaacctactcatctgacaaagggctaatatccagaatctacaatgaactcaaacaaatttacaagaaaaaaacaaacaaccccatcaaaaagtgggtgaaggatatgaacagacacttctcaaaagaagacatttatgcagccaaaagacacatgaaaaaacgctcatcatcactggccatcagagaaatgcaaatcaaagccacaatgagataccatctcacaccagttagaatggcaatcattaaaaagtcaggaaacagcagtagaagcaacatcgttcattcagttactcaggcaaatgccttggaatcatcctggattcctctgttcctcattccccacatccaatacatcagcaaaccacaagcctcttccttcaaaatgtatcacgtcactgaccccattttaccgccttcttcccaacacctagaccaagctgccatcatcaacctctgcctgcaatggcctctgctgtggtttgaatgtatgtgtccctccaaaattcatatgctgaaactcacaccccaag

SEQ ID NO: 128892 - DNA, 3156 bp, Homo sapiens; identical to SEQ ID NO: 124193

SEQ ID NO: 128893 - DNA, 2745 bp, Homo sapiens; identical to SEQ ID NO: 128662

SEQ ID NO: 128894 - DNA, 2001 bp, Homo sapiens
atgtcttctgccttcaggaaaaccacaatccagttgaaaaatcacgattacgcactcgataagttagatgattacacgctttgtaacttagctccaaattcaaggctaacaatgacaataagtggcactcagcaaggaacagaaagtttgactcgggtagtccagaacagggagaagctaaacagaggcgggatagttcaggaagaatcagaggcagagcaagtgttatgtagtgctaacaagctccttccccggcaaatgaagggcagtgatactcaccagacgcgactgactagaaaaagacaatgggaatctgacgttttggaaagatctccaaacatcagagcacaaacagaaagagctttttggttgcctcttcacaaaggatcagaaatacaaactaccatcagagaatactataaacacctctatgcaaatcaacttgaaaatctagaagaaatggataaattcctcgacacacacactctcccaagactaaaccaggaagaagttgaatctctgaataggccaataacaggctctgaaattgaggcaataattaatagcttaccaaccaaaaaaagtccaggaccagatggattcacagccgaattctaccagaggtacaaggaggagctgagaataaaatacctaggaatccaacttacaagggatgtgaaggacctcttcaaggagaactacaaaccagtgctcaatgaaatcaaagaggatacaaacaaatggaagaacattccatgctcattggtaggaagagtcaatattgtgaaaatggccatactgcccaaggtaatttatagattcaatgccatccccatcaagctaccaatgactttcttcacagaattggaaaaaactactttaaagttcgtatggaaccaaaaaagagcccgcactgccaagtcaatcctaagaaaaaagaacaaagctggaggcatcatgctacctgacttcaaactatactacaaagctacagtaacaaaaacagcatggtactcctaccaaaacagagatatagaccaatggaacagaacagagacctcagaaataatgccgcatatctacaactatctgatctttgacaaacctgacaaaaagaagaaatggggaaaggattccctatttaataaatggtgctgggaaaactggctagccatatgtagaaagctgaaactggatcccttccttacaccttatacaaaaagtaattcaagatggattaaagacttacatgttagacctaaaaccataaaaaccctagaagaaaacctaggcattaccattcaggacataggcatgggcaaggacttcatgtctaaaacaccaaaagcaatggcaacaaaagccaaaattgacaaatgggatctcattaaactaaagagcttctgtacagcaaaagaaaccaccatcagagtgaacaggcaacctacagaatgggagaaaatgtttgcaacctactcatctgacaaaggactaatatccagaatctacaatgaactcaaacagatttacaagaaaaaaacaaacaatcccatcaaaaagtgggtgaaggatatgaacagacccttctcaaaagaagacatttatgcagccaaaaaacacatgaaaaaatgttcatcatcactggccatcagagaaatgcaaatcaaaaccacaatgagacaccatctcacaccagttagaatggcgatcattaaaaagtcaggaaacaacagtaaggataatcaagatgatgtagaagcaaagcccatcatcaaactggcattgagtccctatcaggttaaagcctcaactaagctctcagaaattcccttaaaaaatatgactgttgacaggtcacttgatgtagaactgagatcctgctcacctttcaaggctcaagtttcatccccatgtgaagctttctatgctcacagcagcccacgtgctgatctcttctttctcagagcattgtgtctcctggtgcccccaatccgaacttaa

SEQ ID NO: 128895 - DNA, 3033 bp, Homo sapiens; identical to SEQ ID NO: 118078

SEQ ID NO: 128896 - DNA, 2622 bp, Homo sapiens
atgagaacaaagacacaacataccagaatctcttgggacgcattcaaagcagtgtgtagagggaaatttatagcactaaatgcccacaagagaaagcaggaaagatccaaaattgacaccctaacatcacaattaaaagaactagaaaagcaagagcaaacacattcaaaagctagcagaaggcaagaaataactaaaatcagagcagaactgaaggaaatagagacacaaaaatcccttcaaaaaattaatgaatccaggagctggttttttgaaaggatcaacaatattgatagaccgctagcaagactaataaagaaaaaaagagagaagaatcaaatagacacaataaaaaatgataaaggggatatcaccaccgatcccacagaaatacaaactaccatcagagaatactacaaacacctctatgctaataaactaaaaaatctagaagaaatggataaattcctcgacacatacaccctcccaagactaaaccaggaagaagttgaatctctgaatagaccaataacaggatctgaaattgtgacaataatcaatagcttaccaaccaaaaagagtccaggaccagatggattcacagccgaattctaccagaggtacaaggaggaactggtaccattccttctgaaactattccaatcaatagaaaaagagggaatcctccctaactcattttatgaggccagcatcattctgataccaaagccaggcagagacacaaccaaaaaagagaattttagaccaatatccttgatgaacattgatgcaaaaatcctcaataaaatactggcaaaccgaatccagcagcacatcaaaaagcttatccaccatgatcaagtgggcttcatccctgggatgcaaggctggttcaatatacgcaaatcaataaatgtaatccagcatgtaaacagagccaaagacaaaaaccacatgattatctcaatagatgcagaaaaagactttgacaaaattcaacaacccttcatgctaaaaactctcaataaattaggtattgatgggacgtatctgaaaataataagagctatctatgacaaacccacagccaatatcatactgaatgggcaaaaactggaagcattccctttgaaaactggcacaagacagggatgccctctctcaccactcctattcaacatagtggtggaagttctggccagcgcaattaggcaggagaaggaaataaaggcccaaaatctccttaagctgataagcaacttcagcaaagtctcaggatacaaaatcaatgtacaaaaatcacaagcattcttatacaccaataacagacaaacagagagccaaatcatgagtgaactcccattcataattgcttcaaagagaataaaatacctaggaatccaacttacaagggacgtgaaggacctcttcaaggagaactacaaaccactgatcaaggaaataaaagaggatacaaacaaacggaagaacattccatgctcacgggtaggaagaatcaatatcgtgaaaatggccatactgcccaaggtaatttacagattcaatgccatccccatcaagctaccaatgactttcttcacagaattggaaaaaactactttaaagttcatatggaaccaaaaaagagcccacatcgccaagtcaatcctaagccaaaagaacaaagctgggggcatcacactacctgacttcaaactatactacaaggctacagtaaccaaaacagcatggtactcgtaccaaaacagagatatagatcaatggaacagaacagagccctcagaaataacgccacatatctacaactatctgatctttgacaaacctgagaaaaacaagcaatggggaaaggattccctatttaataaatggggctgggaaaactggctagccatatggagaaagctgaaactggatcccttccttacaccttatacaaaaatcaattcaagatggattaaagacttaaacgttagacctaaaaccataaaaaccctagaagaaaacctaggcattaccattcaggacataggcatgggcaaggacttcatgtctaaaacaccaaaagcaatggcaacaaaagacaaaattgacaaatgggatctaatgaaactaaagagcttctgcacagcaaaagaaactaccatcagagtgaacaggcaacctacagaatgggagaaaatttttgcaacctactcatctgacaaagggctaatatccagaatccacaatgaactcaaacaaatttacaagaaaaaaacaaacaaccccaacaaaacgtgggcgaaggacatgaacagacacttctcaaaagaagacatttatgcagccaaaaaacacatgaaaaaatgctcatcatcactggccatcagagaaatgcaaatcaaaaccacaatgagataccatctcacaccagttagaatggcagtcattaaaaagtcaggaaacaacagggacatggatgaaactggaaaccatcattctcagcaaactgtcacaaggacaaaaaaccaaacaccgcatattctcactcatacgtgggaactgaacaatgagatcacatggacacaggaaggagaatatcacactctggggactgtg

SEQ ID NO: 128897 - DNA, 3831 bp, Homo sapiens; identical to SEQ ID NO: 124226

SEQ ID NO: 128898 - DNA, 4137 bp, Homo sapiens
atgaggaaaaaacagagcagaaaaactggaaactctaaaaagcagagcacctctcctcctccaaaggaacgcagttcctcaccagcaatggaacaaagctggacggagaatgactttgacgagttgagagaagaaggtttcagacgatcaaactactccaagctacaggaggaaattgaaaccaaaggccaagaagttgaaaacttggaaaaaaatttagacaaatgtataactagaataaccaatatagagaagtgcttaaaggagctgatggagctgaaagccaaggctcgagaactacatgaagaatgcagaagcctcaggagccgatgcgatcaactggaagaaagggtatcagtaatggaagatgaaatgaatgaaatgaagcaagaagggaagtttagagaaaaaagaataaaaagaaatgaacaaagcctccaagaaatatgggactatgtgaaaagaccaaatctacctccgattgatgtacctgaaagtgacagggagaatggaaccaagttggaaaacactctgcaggatgttatccaggagaacttccccaacctagcaaggcaggccaacattcagattcaggaaatacagagaatgccacaaagatactcctcgagaagagcaactccaagacacataattgtcagattcaccaaagttgaaatgaaggaaaaaatgttgagggcagccagagagaaagcattcaagcaggcctcccggagagaagatgacattgccaaggtaaccagtggcatgagagttttattcaagccaggaaccacagaggtacaggagctggccctttgctatggtggaatggccaacagaaccatctcagccctcaagaccactcagaggcagctttccaagctctggaaggaggagctgctgcaggacgtgtgtgcaggactggcagaggagctgcatctgcctcccgatgcccctggtggcatggtggacttccggtgcaccctcaccctcagcttcttcttcaagttctacctgacagtccttcagaagctgggccaagagaacctggaagacaagtgtggtaaactggaccccactttcgccagtgcaactttactgtttcagaaagaccccccagccgatgtccagctcttccaagaggtgcccaagggtcagtctgaggaggacatggtgggccggcccctgccccacctggcagcggacatgcagcctctggtgaggccgtgtactgtgacgacattcctcgctacgagaatgagctgtctctccggctggtcaccagcacccgggcccacgccaagatcaagcatcgagatgaagttcaagaatatgctgtttcctatgattgtctgcccagcctggatccctgagctgaattcggtagaacatggacccgacggtatctcctttggagctgcttgccccctgagcattgtggaaaaaaccctggtggatgctgttgctaagcttcctgcccaaaagacagaggtgttcagaggggtcctggagcagctgcgctggtttgctgggaagcaagtcaagtctgtggcgtccgttggagggaacatcatcactgccagccccatctccgacctcaaccccgtgttcatggccagtggggccaagctgacacttgtgtccagaggtgagctgcctgaagcagaggtccaggaagaaggacttgggggagaaaagtctcaccagataggtcattttctggagaaacagagctcaaagttcagtgacccagctttccctgtgatttggatccagggaagcatggagaatgtacctggtttggtggacgggaaagctggatattttctctgtagagaattcacagcaggaactgctacctgcatgccttacctagtggggcaccaggagaactgtccagatggaccacaccttcttccctggctacagaaagaccctgctgagcccggaggagatactgctctccatagagatcccctacagcagggagaaatacaaactaccatcagagaatactacaaacacctctccgcaaataaactagaaaatctagaagaaatggataaattcctcgacacatacactctcccaagactaaaccagaaagaagttgaatctctgaatagaccaataacaggagctgaaattgtgccaataatcaacagcttaccaaccaaaaagagttcaggactagatggattcacagccgaattctaccagaggtacaaggaggaactgcatataaacagaaccaaagacaaaaaccacatgattatctcaatagatgcagaaaaggcctttgacaaaattcaacaacccttcatgctaaaaactctcaataaattaggtattgatgggacgtatctcaaaataataagagctatctatgacaaacccacagccaatatcatactgaatgggcaaaaactggaagcattccctttgaaaactggcacaagacagggatgccctctctcaccactcctattcaacatagtgttggaagttctggccagggcaatcaggcaggagaaggaaataaagggtattcaattaggaaaagaggaagtcaaattgtccctgtttgcagatgacatgattgtatatctagaaaaccccattgtctcagcccaaaatccccttaagctgataagcaacttcagcaaagtctcaggatacaaaatcaatgtacaaaaatcacaagcattcttatacaccaataacagacaaacagagagccaaatcatgagtgaactcccattcacaattgcttcaaagagaataaaatacctaggaatccaacttacaagggacgtgaaggacctcttcaaggagaactacaaaccactgctcaatgaaataaaagaggatacaaacaaatggaagaacattccatgctcatgggtaggaagaatcaatatcatgaaaatggccatactgcccaaggtaatgtatagattcaatgccatccccatcaagctaccaatgcctttcttcacagaattggaaaaaactactttaaagttcatatggaaccaaaaaagagcccgcatcatcaagtcaatcctaagcccaaagaacaaagctggaggcatcacgctacctgacttcaaactatactgcaaggctacagtaaccaaaacagcatggtactggtaccaaaacagaaatatagatcaatgcaacagaacagagccctcagaaataatgccacatatctacaactatctgatctttgacaaacctgacaaaaacaagcaatggggaaaggatcccctatttaataaatggtgctgggaaaactggctagccatatgtagaaagctgaaactggatcccttccttacaccttacacaaaaattaattcaagatggattaaagacttaaacattaggcctaaaaccataaaaaccctagaagaaagcctaggcattaccattcaggacataggcatgggcaaggacttcatgtctaaaacaccaaaagcaatggcaacaaaagacaaaattgacaaatgggatctaattaaactaaagagcttctgcacagcaaaagaaactaccatcagagtggacaggcaacctacagaatgggagaaaattttcacaacctactcatctgacaaagggctaatatccagaatctacaatgaactcaaacaaatttacaagaaaaaatcaaacaaccccatcaaaaagtgggcaaagcatatgaacagatgcttctcaaaagaagacatttatgcagccaaaagacacaggctgaaagacactcctcggaagcagctgcgatttgaaggggagcgtgtgacgtggatacaggcctcaaccctcaaggagctgctggacctcaaggctcagcaccctgacgccaagctggtcgtggggaacacggagattggtaagggccagggaggctgccctggggctgccagggggtctgggggtgtttctaggtcctcttgcccatcctcacctccccctgactttacttgcctctgcaccctatccctctgccccactgactacctggagcccactggaaatccctggacactccagttcctgcaaaggcccctagctgtggagtcccacaggcctgctcagccccttgctggatgtgtgacctcagaatag

SEQ ID NO: 128899 - DNA, 3555 bp, Homo sapiens
atgggagactttaacaccccactgtcaacattagacagatcaaggagacagaaagtcaacaaggatacccaggaattgaactcagctctgcaccaagtggacctaatagacatctacagaactctgcaccacaaatcaacagaatatacatttttttcagcaccacaccacacctattccaaaattgaccacatagttggaagtaaagctctcctcagcaaatgtaaaagaacagagattataacaaactatctctcagaccacagtgcaatcaaactagaactcaggattaagaatctcactcaaaaccgctcaactacatggaaactgaacaacctgctcctgaatgactactggatacataacaaaatgaaggcagaaataaagatgttctttgaaaccaacaagaacaaagacacaacataccagaatctctgggatgcattcaaagcagtgtgtagagggaaatttatagcactaaatgcccacaagagaaagcaggaaagatccaaaattgacaccctaacatcacaattaaaagaactggaaaagcaagagcaaacacattcaaaagctagcagaaggcaagaagtaactaaaatcagagcagaactgaaggaaatagagacacaaaaaacccttcaaaaaattaatgaatccaggagctggttttttgaaaggatcaacaaaattgatagaatgctagcaagactaataaagaagaaaagagagaagaatcaaatagacacaataaaaaatgataaaggggatatcaccaccgatcccacagaaatacaaactaccatcagagaatactacaaacacctctatgcaaataaactagaaaatctagaagaaatggataaattcctcgacacatacactctcccaagactaaaccaggaagaagttgaatctctgaatagaccaataacaggagctgaaattgtggcaataatcaatagcttaccaaccaaaaagagtccaggaccagatggattcacagccgaattctaccagaggtacaaggaggaactggtaccattccttctgaaactattccaatcaatagaaaaagagggaatcctccctaactcattttatgaggccagcattattctgataccaaagccgggcagagacacaaccaaaaaagagaattttagaccaatatccttgatgaacattgatgcaaaaatcctcaataaaatattggcaaaacgaatccagcagcatatcaaaaagcttatccaccatgatcaagtgggcttcatccctgggatgcaaggctggttcaatatacgcaaatcaataaatgtaatccagcatataaacagaaacaaagacaaaaaccacatgattatctcaatagatgcagaaaaagcctttgacaaaattcaacaacccttcatgctaaaaactctcaatagattaggtattgatgggacgtatttcaaaataataagagctatctatgacaaacccacagctaatatcgtactgaaggggcaaaaactggaagcattccctttgaaaactggcacaagacagggatgccctctctcaccactcgtattcaacatagtgttggaagttctggccagggcaattaggcaggagaaggaaataaagggtattcaattaggaaaagaggaagtcaaattgtccctgtttgcagacgacatgattgtatatctagaaaaccccattgtctcagcccaaaatctccttaagctgataagcacttcagcaaagtctcaggatacaaaatcaatgtacaaaaatcacaagcattcttatacaccaacaacagacaaacagagccaaatcatgagtgaactcccattcacaactgcttcaaagataataaaatacctaggaatccagcttacaagggatgtgaaggacctcttcaaggagaactacaaaccactgctcaaggaaataaaagaggatacaaacaaatggaagaacattccatgctcatgggtaggaagaatcaatattgtgaaaatggccatactgcccaaggtaatttacagattcaatgccatccccatcaagctaccaatgactttcttcacacaattggaaaaaactactttaaagttcatatggaaccaaaaaagagcccgcatcgccaaggcaatcctaagccaaaagaacaaagctggaggcatcacactacctgacttcaaactatactacaaggctacagtaaccaaaacagcatggtactggtaccaaaaacagagatatagatcaatggaacagaataaagccctcagaaataacgccgcatatctacaactatctgatccttgacaaacctgagaaaaacaagcaatggggaaaggattccctatttaataaatggtgctgggaaaactggctagccatatggagaaagttgaaactgggtcccttccttacaccttatacaaaaattaattcaagatggattaaagacttaaacgttagacctaaaaccataaaaaccctagaagaaaacctaggcattaccatgccaggaccataggcatgggcaaggacttcatgtccaaaacaccaaaagcaatggcaacaaaagccaaaattgacaaatgggatctaattcaactaaagagctactgcacagcaaaagaaaataccatcagagtgaacaggcaacctacaaaatgggagaaaattttcgcaacctactcatctgacaaagggctaataaccagaatctacaatgaactccaacaaatttacaagaaaaaaacaaacaaccccatcaaaaagtgggcaaaggacatgaacagacacttctcaaaagaagacatttatgcagccaaaaaacacatgaaaaaatgctcatcatcactggccatcagagaaatgcaaatcaaaaccacaatgagataccatctcacaccagttagaatggcaatcattaaaaagtcaggaaacaacaggaatccaacttacaagggatgtgaaggacctcttcaaggagaactacaaaccactgctcaaggaaataaaagaggatacaaacaaatggaagaacattccatgctcatgggtaggaagaatcaatatcgtgaaaatggccatactgcccaagaattggaaaaaactactttaaagttcatatggaaccaaaaaagagcccgcatcgccaaggcaatcctaagccaaaagaacaaagctggaggcatcacactacctgacttcaaactatactacaaggctacagtaaccaaaacagtatggagaagtgatatcaaaagacaacgactacaccaaaatttggagaaaaaggtgaatccagacagtcacagtactaacttcatcttcgagaaattcatctctcctgtggggtttattgaagctataacccaagaaatcaaggaacgtggattctacattgatctgagagtgatttttgttgttctccgatggaagttggacagcaaagctaaagcagtgatcaaacatcttggtggaccaggcctcaactgtgatcgcccagacaaggctggttcaggtttgctgaaattaggatag

SEQ ID NO: 128900 - DNA, 3348 bp, Homo sapiens; identical to SEQ ID NO: 120176

SEQ ID NO: 128901 - DNA, 3451 bp, Homo sapiens
cacaccaaaaacccatctgtacatcaccatcgtcaaagaccaaaagtagataaaaccacaaagatggggaaaaaacagaacagaaaaactggaaagtctaaaacgcagagcgcctttcctcctccaaaggaacgcagttcctcaccagcaatggaacaaagctggatggagaatgactttgacgagctgagagaagaaggcttcagacgatcaaattactctgagctacgggaggacattcaaaccaaaggcaaagaagttgaaaactttgaaaaaaatttagaagaatgtataactagaataaccaatacagagaagtgcttaaaggagctgatggagctgaaaaccaaggctcgagaactacgtgaagaatgcagaagcctcagaaattggataaagagtcaagacccatcactgtgctgtattcaggaaacccatctcatgtgcagagacacacataggctcaaaataaaaggaaggaggaagatctaccaagccaatggaaaacaaaaaaaggcaggggttgcaatcctagtctctgataaaacagactttaaaccaacaaagatcaaaagagacaaagaaggccattacataatggtaaagggatcaattcaacaagaagagctaactatcctaaaaatatatgcacccaatacaggatcaccaagattcatgaagcaagtcctgagtgacctacaaagagacttagactcccacacattaataatgggagactttaacaccccactgtcaacattagacagatcaacgagacagaaagtcaacaaggatacccaggaattgaactcagctctgcaccaagcggacctaatagacatctacagaactctccaccccaaatcaacagaatatacatttttttcagcaccacaccacacctattccaaaattgaccacatactgggaagtaaagctctcctcagcaaatgtaaaagaacagaaattataacaaactatctctcagaccacagtgcaatcaaactagaactcaggattaagaatctcactcaaaacggctcaactacatggaaactgaacaacctgctcctgaatgactactgggtacataacgaaatgaaggcagaaataaagatgttctttgaaaccaacgagaacaaagacacaacataccagaatctctgggacgcattcaaagcagtgtgtagagggaaatttatagcactaaatgcccacaagagaaagcaggaaagatccaaaattgacaccctaacatcacaattaaaagaactagaaaagcaagagcaaacacattcaaaagctagcagaaggcaagaaataactaaaatcagagcagaactgaaggaaatagagacacgaaaaacccttcaaaaaattaatgaatccaggagctggttttttgaaaggatcaacaaaattgatagaccactagcaagactaataaagaaaaaaagagagaagactcaaatagacacaataaaaaatgataaaggggatatcaccaccgatcccacagaaatacaaactaccatcagagaatactacaaacacctctacgcaaataaactagaaaatctagaagaaatggatacattcctcgacatatacactctcccaagactaaaccaggaagaagttgaatctctgaatagaccaataacaggagctgaaattgtggcaataatcaatagtttaccaaccgtgggcttcatccctgggatgcaaggctggttcaatatacgcaaatcaacaaatgtaatccagcatataaacagagccaaagacaaaaaccacatgattatctcaatagatgcagaaaaagcctttgacaaaattcaacaacccttcatgctaaaaactctcaataaattaggtattgatgggacgtatttcaaaataataagagctatctatgacaaacccacagccaatatcatactgaatgggcaaaaactggaagcattccctttgaaaactggcacaagacagggatgccctctctcaccgctcctattcaacatagtgttggaagttctggccagggcaatcaggcaggagaaggaaataaagggtattcaattaggaaaagaggaagtcaaattgtccctgtttgcagatgacatgattgtttatctagaaaaccccatcatctcagcccaaaatctccttaagctgataagcaacttcagcaaagtctcaggatacaaaatcaatgtacaaaaatcacaagcattcttatacaccaacaacagacaaacagagagccaaatcatgagtgaactcccattcacaattgcttcaaagagaataaaatacctaggaatccaacttacaagggatgtgaaggacctcttcaaggagaactacaaaccactgctcaaggaaataagaggacacaaacaaatggtgcccaaggtaatttacagattcaatgccatccccatgaagctaccaatgactttcttcacagaattggaaaaaactactttaaagttcatatggaaccaaaaaagagcccgcatcgccaagtcaatcctaagccaaaagaacaaagctggaggcatcacactacctgacttcaaactatactacaaggctacagtaaccaaaacagcatggtactggtaccaaaacagagatatagatcaatggaacagaacagaggcctcagaaataatgccgcatatctacaactatctgatctttgacaaacctgagaaaaacaagcaatggggaaaggattccctatttaacaaatggtgctgggaaaactggctagccatatgtagaaagctgaaactggatcccttccttacaccttatacaaaaatcaattcaagatggattaaagatttaaacgttagacctaaaaccataaaaaccctagaagaaaacctaggcattaccattcaggacataggcgtgggcaaggacttcatgtccaaaacaccaaaagccaatggcaacaaaagccaaaattgacaaatgggatctaattaaactcaagagcttctgcacagcaaaagaaactaccatcagagtgaacaggcaacctacaacatgggagaaaattttcgcaacctactcatctgacaaagggctaatatccagaatctacaatgaactcaaacaaatttacaagaaaaaaacaaacaaccccatcaaaaagtgggccaaggacatgaacagacacttctcaaaagaagacatttatgcagccaaaaaacacatgaagaaatgctcatcatcactggccatcagagaaatgcaaatcaaaatacctgtgagccaaataaacctcttttatttacaaattactcaacctcatgtatgcctttctagtcgtacaaatggcctaaaacagaaaattggtatgaaggagtgcagttttgttataaagatacctgaagatgtggaagtggctttggaactgggtaatgagcagcaa

SEQ ID NO: 128902 - DNA, 2606 bp, Homo sapiens
atggtggcctccagatcctctagagtcggtgtcttctatggaggtcaaaacagcgtggatggcgtctccaggcgatctgacggttcactaaacgagctctgcttatatagacctcccaccggggcgtacttggcatatgatacacttgatgtactgccaagtgggcagtttaccgtaaatactccacccattgacgtcaatggaaagtccctattggcgttactatgggaacatacgtcattattgacgtcaatgggcgggggtcgttgggcgatgcagccacttggccagctgggtcagctcgaacacctcggagaccggcgcgatcaggtcctcgaccgaagtggacgctcccgacgactcgatgctgctcagcacctgcgacatcgacctgaccgccgcccgcagggcatggttggggtgcttaccaaccaaaaagagcccaggaccagatggattcacagcagaattctaccagaggtgcaaggaggaactggtaccgttccttctgaaactattccaatcgatagaaaagagggaatccttcctaacttatttgatgaggccagcatcatcctgataccaaagcggggcagagacaccaccaaaaaagagaattttagaccaatatccttgatgaacattgatgcaaaaatcctcaataaaatactggcaaaccgaaaccagcagcacatcaaaaagcttatccaccatgatcaagtgggtttcatccctgggatgcaaggctggttcaatatatgcaaatcaataaatgtaatccagcatataaacagaaccaaagacaaaaaccacatgattatctcaatagatgcagaaaaggcctttgacaaaattcaacaacccttcatgctaaaaactcttaataaattaggtattgatgggacgtatctcaaaataataagagctatctatgacaaacccacagccaatatcatactgaatgggcaaaaactggaagcattccctttgaaaactggcacaagacagggatgccctctctcaccactcctattcaacatagtgttggaagttctggccagggcaatcaggcaggagaaggaaataaagggtattcaattaggaaaagaagaagtcaaattgtccctgtttgcagatgacatgattgtatatctagaaaaccccatcgtctcagcccaaaatctccttaagctaataagcaacttcagcaaagtctcagcatacaaaatcaatgtacaaaaatcacaagcattcttatacaccaataacagacaaacagagagccaaatcatgagtgtattcccattcacaattgcttcaaagagaataaaatacttaggaatccaacttgcaaggaatgcgaaggacctcttcaaggagaactacaaaccactgctcaatgaaataaaagaggatacaaagaaatggaagaacattccatgctcatgggtaggaagaatcaatatcgtgaaaatggccatactgcccaaggtaatttacagattcaatgccatccccatcaagctaccaatgactttcttcacagaattggaaaaaactactttaaagttcatatggaaccaaaaaagagcccgcatcgccaagtcaatcctaagccaaaagaacaaagctggaggcatcacgctacctgacttcaaactacactacaagattacagtaaccaaaacagcatggtactggtaccaaaacagagatatagatcaatggaacagaacagagccctcagaaataacgccgcatatctacaactatctgatctttgacaaacctgagaaaaacaagcaatggggaaaggattccctatttaataaatggtgctgggaaaactggctagccatatgtagaaagctgaaactggatcccttccttacaccttatacaaaaattcatccaagatggattaaagacttaaacgttagacctaaaaccataaaaaccctagaagaaaacctaggcaataccattcaggacataggcatgggcaaggacttcatgtctaaaacaccaaaagcaatggcagcaaaagccaaaattgacaaatgggatctaattcaactaaagagcttctgcacagcaaaagaaactaccatcagagtgaacaggcaacctacaaaatgggagaaaattttcgcaacctactcatctgacaaagggctaatatccagaatctacaaagaactcaaacaaatttacaagaaaaaaaacaaacaaccccatcaaaaagtgggcgaaggacatgaacagacacttctcaaaagaagacatttatgcagccaacaaacacatgaaaaaatgctcaccatcactggccatcagagaaatgcaaatcaaaaccactatgagataccatctcacaccagttagaatggcaatcattaaaaagtcaggaaacaacagccagacagtgaagccacagaacaaagctcattttgccaaaatggaccgccaatgtgtccacggcttgtctccccgtttagaacacagcccccgggggcgctcttccccacggtgcgcagaatgctgcctctactcttgcctgcatgctcagacttcaaacggggctgtgaaaataaatctaatgacag

SEQ ID NO: 128903 - DNA, 2862 bp, Homo sapiens
atgggaacctctgaagtgcagaatggagaggagagagctggcaccagcggccagggcagcgtggagcagctcagcggcagctcagtccagctccctcctggcctcaaactctgctttgagccctacttttccagctgtgcttctgactgcattcttcatgccagccccctctccttaatggctgcatcaggctcccaaaaccccaatctgtgggcttcctggttgtgctgcaaatgggttcagtgcccagaacgtcagcttggctgccacctgacttcaagtgtcatctatggcctcaggtactacccccaggccaaacgcagtgaattagaactcagggactgtgagggcctctgcaatcagacatctcccctcagctcacttgatgggatgggctggaaagcagcagcagaagagagcaactctggaatcagaaacatctggattccaattccagcatttgctactcacaagcaatacaatgtcagacaggtgataagcccctctccaccttactggtctcatcgaggaaatggaaataacagcctctgtgtcacaaggttatcaggaggactgaagcaaccagtagcaggcacaggaagaggtttagaaggtgggagcggaacaagggacctgatgccattcttgtcagcagcacccaaggaacagcccccaatcctggcacctgcacgtaggagctggttttttgaaaagatcaacaaaattgatagactgctagcaagactaataaagaagaaaagagagaagaatcaaatagatgcaataaaaaatggtaaaggggatatcaccactgatcccacagaaatacaaactaccatcagagaatactataaacacctctatgcaaataaactagaaaatctagaagaaatggataaattcctcgacacatacaccctcccaagactaaaccaggaagaagctgaatctctgaatagaccaataacaggctctgaaattgaggcaataattaatagcttatcaaccaaaaaaagtccaggaccagatggattcacagccgaattctaccagaggtacaaggaggagctggtaccattccttctgaaactattccaatcaacagaaaaagagggaatcctccctaactcattttatgaggccagcatcatcctgataccaaagcctggcagagacacaacaaaaaaagagaattttagaccaatatccttgatgaacattgatgcaaaaatcctcaataaaatactggcaaaccgaatccagcagcacatcaaaaagcttatccaccatgatcaagtgggcttcatccctgggatgcaaggctggttcaacatacgaaaatcaataaacgtaatccagcatataaacagaaccaaacacaaaaaccacatgattatctcaatagatgcagaaaaggcctctgacaaaattcaacaacccttcatgctaaaaactctccgtaaattaggtattgatgagacacaaacagagagccaaatcatgagtgaactcccattcacaattgcttcaaagagaataaaatacctaggaatccaacttacaagggacgtgaaggacctcttcaaggagaactacaaaccactgctcaatgaaataaaagaggatacaaacaaatggaagaactttccatgctcatgggtaggaagaatcaatattgtgaaaatggccatagtgcccaaggtaatttatagattcaatgccagccccatcaagctaccaatgactttcttcacagaattggaaaaaactactttaaagttcatatggaaccaaaaaagagcctgcattgccaagtcaatcctaagccaaaagaacaaagctggaggcatcatgctacctgacttcaaactatactacaaggctacagtaaccaaaacagcatggtactggtaccaaaacagagatatagaccaatggaacagaacagagccctcagaaataacgccgcatatctacaactatctgttctttgacaaacctgacaaaaacaagcaatggggaaaggattccctatttaataaatggtgctgggaaaactggctagccatatgtagaaagctgaaattggatcctgtacttacaccttatacaaaaattaattcaagatggattaaagacttacatgttagacctaaaaccataaaaaccctagaagaaaacctaggcattaccattcaggacataggcatgggcaaggacttcatgtctaaaacaccaaaagcaatggcaacaaaagccaaaattgacaaatgggatctaattaaactaaagagcttctgcacagcaaaagaaactaccatcagagtgaacaggcaacctacagaatgggagaaaatttttgcaacctactcatctgacaaagggctaatatccagaatctacaatgaactcaaacaaatttacaagaaaaaaacaaacaaccccatcaaaaagtgggcgaaggacatgaacagacacttctcaaaagaagacatttatgcagacaaaaagcacatgaaaaaatgctcatcatcactgatcatcagagaaatgcaagtcaaaaccacaatgagataccatctcacaccagttagaatggcgatcattaaaaagtcaggaaacaacagagacagtgttctggctgccttaaacattacttacaagagctgtcagcaaaaccctgtctccagggaccattactttgagggaactctgccaatcgcagcattattgagaaggcgtattttttatgttcctcaaatgcctactgtcaaactaaaccaaagttctgaaaggtcacaaacacttccaagtttggggaaggaaacctactcccagattcaagtgtggcctgaaggccag

SEQ ID NO: 128904 - DNA, 3724 bp, Homo sapiens
atggggaaaaaacagaacagaaaaactggaaactctaaaacgcagagcgcctctcctcctccaaaggaacgcagttcctcaccagcaacagaacaaagctggatggagaatgattttgacgagctgagagaagaaggcttcagacgatcaaattactctgagctatgggaggacattcaaaccaaaggcaaagaagttgaaaactttgaaaaaaatttagaagaatgtataactagaataaccaatacagagaagtgcttaaaggagctgatggagctgaaaaccaaggctcgagaactacatgaagaatgcagaagcctcaggagccgatgcgatcaactggaagaaagggtatcagcaatggaagatgaaatgaatgaaatgaagcgagaagggaagtttagagaaaaaagaataaaaagaaatgagcaaagcctccaagaaatatgggactatgtgaaaagaccaaatctacgtctgattggtgtacctgaaagtgatgtggagaatggaaccaagttggaaaacactctgcaggatattatccaggagaacttccccaatctagcaaggcaggccaacgttcagattcaggaaatacagagaatgccacaaagatactcctcgagaagagcaactccaagacacataattgtcagattcaccaaagttgaaatgaaggaaaaaatgttaagggcagccagacagaaagcaccacaccacacctattccaaaattgaccacatagttggaagtaaagctctcctcagcaaatgtaaaagaacagaaattataacaaactatctctcagaccacagtgcaatcaaactagaactcaggattaagaatctcactcaaagccgctcaactacatggaaactgaacaacctgctcctgaatgactactgggtacataacgaaatgaaggcagaaataaagatgttctttgaaaccaacgagaacaaagacaccacataccagaatctctgggacacattcaaagcagtgtgtagagggaaatttatagcactaaatgcctacaagagaaagcaggaaacatccaaaattgacaccataacatcacaattaaaagaactagaaaagcaagagcaaacacattcaaaagctagcagaaggcaagaaataactaaaatcagagcagaactgaaggaaatagagacacaaaaaacccttcaaaaaatcaatgaatccaggagctggttttttgaaaggatcaacaaaattgatagaccgctagcaagactaataaagaaaaaaagagagaagaatcaaatagacacaataaaaaatgataaaggggatatcaccaccgatcccacagaaatacaaactaccatcagagaatactacaaacacctctacgcaaataaactagaaaatctagaagaaatggatacattcctcgacacatacactctcccaagactaaaccaggaagaagttgaatctctgaatagaccaataacaggctctgaaattgtggcaataatcaatagtttaccaaccaaaaagagtccaggaccagatggattcacagccgaattctaccagaggtacaaggaggaactggtaccattccttctgcaactattccaatcaatagaaaaagagggaatcctccctaactcattttatgaggccagcatcattctgataccaaagccgggcagagacacaaccaaaaaagagaattttagaccaatatccttgatgaacattgatgcaaaaatcctcaataaaatactggcaaaccgaatccagcagcacatcaaaaagcttatccaccatgatcaagtgggcttcatccctgggacgcaaggctggttcaatatacgcaaatcaataaatgtaatccagcatataaacagagccaaagacaaaaaccacatgattatctcaatagatgcagaaaaagcctttgacaaaattcaacaacccttcatgctaaaaactctcaataaattaggtattgatgggacatatttcaaaataataagagctatctatgacaaacccacagccaatatcatactgaatgggcaaaaactggaagcattccctttgaaaactggcacaagacagggatgccctctctcaccgctcctattcaacatagtgttggaagttctggccagggcaatcaggcaggagaaggaaataaagggtattcaattaggaaaagaggaagtcaaattgtccctgtttgcagacgacatgattgtttatctagaaaaccccatcgtctcagcccaaaatctccttaagctgataagcaacttcagcaaagtctcaggatacaaaatcaatgtacaaaaatcacaagcattcttatacaccaataacagacaaacagagagccaaatcatgagtgaactcccattcacaattgcttcaaagagaataaaatacctaggaatccaacttacaagggatgtgaaggacctcttcaaggagaactacaaaccactgctcaaggaaataaaagaggacacaaacaaatggaagaacattccatgctcatgggtaggaagaatcaatatcgtgaaaatggccatactgcccaaggtaatttacagattcaatgccatccccatcaagctaccaatgactttcttcacagaattggaaaaaactactttaaagttcatatggaaccaaaaaagagcctgcatctccaagtcaatcctaagccaaaagaacaaagctggaggcatcacactacctgacttcaaactatactacaaggctacagtaaccaaaacagcatggtactggtaccaaaacagagatatagatcaatggaacagaacagagccctcagaaataatgccacatatctacaactatctgatctttgacaaacctgagaaaaacaagcaatggggaaaggattccctatttaataaatggtgctgggaaaactggctagccatatgtagaaagctgaaactggatcccttccttacaccttatacaaaaatcaattcaagatggattaaagatttaaacgttagacctaaaaccataaaaaccctagaagaaaacctaggcattaccattcaggacataggcgtgggcaaggacttcatgtccaaaacaccaaaagcaatggcaacaaaagccaaaattgacaaatgggatctaattaaactaaagagcttctgcacagcaaaagaaactaccatcagagtgaacaggcaacctacaacatgggagaaaattttcacaacctactcatctgacaaagggctaatatccagaatctacaatgaactcaaacaaatttacaagaaaaaaacaaacaaccccatcaaaaagtgggcgaaggacatgaacagacacttctcaaaagaagacatttatgcagccaaaaaacacatgaagaaatgctcatcatcactggccatcagagaaatgcaaatcaaaaccactatgagatatcatctcgcaccagttagaatggcaatcattaaaaagtcaggaaacaacagcactattcacagtagcaaagacatggattcaacccaaatgtgcatcaatgatacactgtatgaagaaagtgtagaacatatacaccatgaaatacaatccagccataaaaaaggagttcacatcctttgcagcaatatggatggagctgaaagccactttcctaagcaaactaatgcaagaacagaaagccaaatactgcatgttctcactt

SEQ ID NO: 128905 - DNA, 2375 bp, Homo sapiens
ccaggccatgaccttagagggaagatggcagcaatcccagagaagttctacaaaacagagagatgggacttcttttcccatggtagagcccacaaagactgaagagcccttcatgagctccctgccccctcatcctaaccaggccgcagagtggcaaagtggaagacctagaccaaaaacaggagctgaaattgtggcaataaccaatagcttaccaaccaaaaagagtccaggaccagatggattcacagcagaattctaccagaggtacaaggaggaactggtaccattccttctgaaactattccaatcagtagaaaaagagggaatcctccctaactcattttatgaggccagcatcatcctgctaccaaagccaggcagagacaaaaccaaaaaagagaattttagaccaatatccttgatgaacattgatgcaaaaatcctcaataaaatactggcaaaccgaattcagcagcacatcaaaaagcttatccaccatgatcaagtgggcttcgtccctgggatgcaaggctggttcaatatacgcaaatcaataaatgcaatccagcatataaacagaaccaaagacaaaaaccacatgattatctcaatagatgcagaaaaggcctttgacaaaattcaacaacccttcatgctaaaaactctcaataaattaggtattgatgggaagtatctcaaaataataagagctttctatgacaaacccacagccaatatcatactgaatgggcaaaaactggaagcattccctttgaaaactggcacaagacagggatgccctctctcaccactcctattcaacatagtgttggaagttctggacagggcaattaggcaggagaaggaaataaagggtattcaattaggaaaagaggaagtcaaattgtccctgtttgcagatgacatgattgtatatctagaaaaccccattgtctcagcccaaaatctccttaagctgataagcaacttcagcaaagtctcaggatacaaaatcaatgtacaaaaatcacaagcattcttacacaccaataacagacaaacagagagccaaatcatgagtgaactcccattcacaattgcttcaaagagaataaaatacctaggaatccaaattacaagggacgtgaaggacctcttcaaggagaactacaaaccactgctcaaggaaataaaagaggatacaaacaaatggaagaacattccatgctcatgggtaggaagaatcaatattgtgaaaatagccatactgcccaagataatttacagattaaatgccatccccatcaagctactaatgactttcttcacagaattggaaaaaactactttaaagttcatatggaaccaaaaaagagcccgcatcgccaagtcaatcctaagccaaaagaacaaagctggaggcatcacgctacctgacttcaaactatactacaagcctacagtaaccaaaacagcatggtactggcaccaaaacagagctatagagcaatggaacagaacagagccctcagaaataacgacacatatctacaactatctgacctttgacaaacctgagaaaaacaagcaatggggaaaggattccctatttaataaatggtgctgggaaaactggctagccatatgtagaaagctgaaactggatcccttccttacaccttatacaaaaatcagttcaaaatggattaaagacttaaacgttagacctaaaaccataaaaacccaagaagaaaacctaggcattaccattcaggacataggcatgggcaaggacttcatgtctaaaacacaaaaagcaatggcaacaaaagccaaaattgacaaaggggatctaattaaactaaagagcttctgcacagcaaaagaaactagcagcagtgtgaacaggcaacctacaaaatgggagaaaatttttgcaacctactcatctgacaaagggctaatatccagaatctacaatgaactcaaacaaattcacaagaaaaaaacaaacaaccccatcaaaaagtgggcaaaggatatgaacagacacttctcaaaagaagacatttatgcagccaaaaaacacatgaaaaactgttcaccatcactggccatcagagaaatgcaaatcaaaaccacaatgagataccatctcacaccacttagaatggcaatcattaaaaagtcaggaaacaacagacgcacagcaactttaagtttgctgccagctatacgtcatgaaagggaagcttttcatcaaagggaagaagaaaaggaagggggaagaatcctacttttacaaaacagagtaattctttgctcctgctccctttgcccacatctctcacctgcgtccaaaccaaaacaca

SEQ ID NO: 128906 - DNA, 2376 bp, Homo sapiens
atgggagactttaacaccccactgtcaacattagacagatcaacgagacagaaagtcaacaaggatacccaggaattgaactcagctctgcaccaagcggacctaatagacatctacagaaccctccaccccaaatcaacagaatatacatttttttcagcaccacaccacacctattccaaaattgaccacatacttggaagtaaggctctcctcagcaaatgtaaaggaagagaaattataacaaactgtctctcagaccacagtgcaatcaaactagaactcaggattaagaatctcactcaaaaccgctcaactacatggaaactgagcaacctgctcctgaatgactactgggtacataacgaaatgaaggcagaaataaagatgttctttgaaaccaacgagaacaaagacacaacataccagaatctctgggacacattcaaagcagtgtgtagagggaaatttatagcacttaatgcccacaagagaaagcaggaaagatccaaaattgacaccctaacatcacaattaaaagaactagaaaagcaagagcaaacacattcaaaagctagcagaaggcaagaaataactaaaatcagagcagaactgaaggaaatagagacacaaaaaacccttcaaaaaattaatgaatccaggagctggttttttgaaaggatcaacaaaattgatagaccgctaacaagactaataaagaaaaaaagagagacgaatcaaatagatgcaataaaaaatgataaaggggatatcaccgccgatcccacagatagacaaactaccatcagagaatactacaaacacctctacgcaaataaactagaaaatctagaagaaatggatatattcctcgacacatacaccctcccaagactaaaccaggaagaatttgaatctctgaatagaccaataacaagatctgaaattgtggcaataatcaatagcttaccaaccaaaaagagtccaggaccagatggattcacagccgaattctaccagaggtacaaagaggaactgagaataaaatacctaggaatccaacttacaagggatgtgaaggacctcttcaaggagaactacaaaccactactcaaggaaataaaagaggatacaaacaaatggaagaacattccatgctcatgggtaggaagaatcaatatcgtgaaaatggccatactgcccaaggtaatttacagattcaatgccatccccatcaagctaccaatgactttcttcacagaattggaaaaaactactttaaagttcatatggaaccaaaagagagcccgcattgccaagtcaatcctaagccaaaagaacaaagctggaggcatcacactacctgacttcaaactatactacaaggctacagtaaccaaaacagcatggtactggtaccaaaacagagatatagatcaatggtacagaacagagcccttagaaataacgccgcatatctacaactatctgatctttgacaaacctgagaaaaacaagcaatggggaaaggattccctatttaatctatggtgctgggaaaactggctagccatatgtagaaagctgaaactggatcccttccttacaccttatacaaaaatcaattcaagatggattaaagacttaaacgttagacctaaaaccataaaaaccctagaagaaaacctaggcattaccattcaggacataggcatgggcaaggacttcatgtctaaaacaccaaaagcaatggcaacaaaagacaaaattgacaaatgggatctaattaaactaaagagcttctgcacagcaaaagaaactaccatcagagtgaacaggcaacctacaaaatgggagaaaattttcacaacctactcatctgacaaagggctaatatccagaatctacaatgaactcaaacaaatttacaagaaaaaaacaaacaaccccatcaaaaagtgggcgaaggacatgaacagacacttctcaaaagaagatatttatgcagccaaaaaacacatgaaaaaatgctcgtcatcactggccatcagagaaatgcaaatcaaaaccacaatgagataccatctcacaccagttagaatggcaatcattaaaaagtcaggaaacaacagactctgcagggaactgaggataaaagcggctgcaggggagcaagacctggagcgtcatcgagagattgcaaaaacaattcactgccaacagactgtcccagcagggtcccagtgctatggtcgtggccctgattggcatgctgcccctcggatgcccaatcagatggaaccggaagaaatcgaatacagagtcagtccactttatctctgtataaccacccaaatgaacagcatgggaaattga

SEQ ID NO: 128907 - DNA, 1665 bp, Homo sapiens; identical to SEQ ID NO: 119499

SEQ ID NO: 128908 - DNA, 1467 bp, Homo sapiens
cctgctttattaatcttcatggcactcatcagtacctgaaaaatgacctcaacttctttgcttattttggtgtctgtgtcttcctaactacaaaataaactccattcagcactgtgtcactgacgcgcataactccagtgcccgccacagtgcctggcatgaagcaagccctttatcaagatgtgttaaatgaattcaacacactacagtcatcagagggagctgggggagatgcttttagcccagttatggacacactttgagcttaaagatctctacggtctctaggagacaggctggtaaatatctgcactcagtgctgatgacatgcgtttttccagcgcacagctggaacgggaaattaacacagcagccttccatgtttcctctcttactgatatccccacagggagcatgggagaagagggaatagttgaaaggtctgtgagactgagtgtggtacccaaagtgtgttggtacccaaagtgtgtggtcaagactggaggggaccccaggaccttcaagcagaaaaaccaggggaaggaggctggtataatccgagcacaggattccacaggtttaaaatatggtggtatcatggaagccaaaagggatacgcccatggaacagaccagcccatcagattacgctgcattctacacttctgatcttgacaacctgacaacacaagcacaggggaaggatccctatttaatactggtgctggaaaactggctagccatatgtagaaagctgaaactggatccattccttacaccttatacaaaaatacattcaagatggattaaagacttacatgttagacctaaaaccataaaaaccctagaagaaaacctaggcagtaccattcaggacataggcatgggcaaggacttcatgtctaaaacaccaaaagcaatggcaacaaaagccaaaattgacaaatgggatctaattaaactaaagagcttctgcacagcaaaagaaactaccatcagagtgaacaggcaacctacagaatgggagaaaatttttgcaacctactcatctgacaaagggctaatatccagaatctacaatgaactcaaacaaatttacaggaaaaaaacaaacaaccccatgaaatgtgggcaaagggtattagaagataatctaagtcattcagactgggctagtgagcctgagctgctaagtgatgtcagctgtcctccttttcttgaaagtggagcggagtctcagtctgacatccacactcgaaaacctttccccgtcagcaaagcatcacaatcagcccctggtaaccactgccctgatctctgtccttttgaaaagcacatgcctcaggtgtactacactaaccctggggtaacggctgctctagacctgtcccaacgagcccacaaacaagccttgaggagcaaaacatctaccaataatttaactcattgccaaaacaaaattcactaa

SEQ ID NO: 128909 - DNA, 3413 bp, Homo sapiens
ctttcccaagtttcaagatagctattcctaaaaatgatcatgggcatgaacaacatttttggggatatagagttccaaataatgccatggaagatacagcttatcaactggtccaccagtaccctacaagaatgcaggcccggagatgcaggatcgcgctgtcacagtggtcctcttcgcatcctctcccggcaaagagagatgctccggttaccagcggcgcgcatccccgcaggcgcctctcctctcgccgatacccacccaggcagtcccgacaggcgcgcctgcctacctggtggccggctgtcagcgaagcggcggtgcctcagccccttctcagctgctacagcgctcccagcgccatgttcccggtctccccgggcgcacgctggggaactactactggctggaagttctttgaaaccaacgagaacaaagacacaacataccagaatctctgggacgcattcaaagcagtgtgtagagggaaatttataccactaaatgcccacaagagaaagcaggaaagatccaaaattgacaccctaacatcacaattaaaagaactagaaaagcaagagcaaacacattcaaaagctagcagaaggcaagaaataactaaaatcagagcagaactgaaggaaatagagacacaaaaaacccttcaaaaaatcaatgaatccaggagctggttttttgaaaggatcaacaaaattgatagaccgctagcaagactaataaagaaaaaaagagagaagaatcaaatagacacaataaaaaatgataaaggggatatcaccaccaatcccacagaaatacaaactaccatcagagaatactacaaacacctctacgcaaaaaaactagaaaatctagaagaaatggatacattcctcgacacatacactctcccaagactaaaccaggaagaagttgaatctctgaatagaccaataacaggagctgaaattgtggcaatattcaatagtttaccaaccaaaaagagtccaggaccagatggattcacagccgaattctaccagaggtacaaggaggaactggtaccattccttctgaaaatattccaatcaatagaaaaagagggaatcctccctaactcattttatgaggccagcatcattctgataccaaagccaggcagagacacaaccaaaaaagagaattttagaccaatatccttgatgaacattgatgcaaaaatcctcaataaaatactggcaaaccgaatccagcagcacatcaaaaagcttatccaccatgatcaggtgggcttcatccctggaatgcaaggctggttcaatatacgcaaatcaataaatgtaatccagcatataaacagagccaaagacaaaaaccacatgattatctcaatagatgcagaaaaagcctttgacaaaattcaacaacccttcatgctaaaaactctcaataaattaggtattgatgggacgtatttcaaaataataagagctatctatgacaaacccacagccaatatcatactgaatgggcaaaaactggaagcattccctttgaaaactggcacaagacagggatgccctctctcaccgctcctattcaacatagtgttggaagttctggccagggcaatcaggcaggagaaggaaataaagggtattcaattaggaaaagaggaagtcaaattgtccctgtttgcagacgacatgattgtttatctagaaaaccccatcatctcagcccaaaatctccttaagctgataagcaacttcagcaaagtctcaggatacaaaatcaatgtacaaaaatcacaagcattcctatacaccaacaacagacaaacagagagccaaatcatgagtgaactcccattcacaattgcttcaaagagaataaaatacctaggaatccaacttacaagggatgtgaaggacctcttcaaggagaactacaaaccactgctcaaggaaataaaagaggatacaaacaaatggaagaacattccatgctcatgggtaggaagaatcaatatcgtgaaaatggccatactgcccaaggtaatttacagattcaatgccatccccatcaagctaccaatgactttcttcacagaattggaaaaaactactttaaagttcatatggaaccaaaaaagagcccgcatcgccaagtcaatcctaagccaaaagaacaaagctggaggcatcacactacctgacttcaaactatactacaaggctacagtaaccaaaacagcatggtactggtaccaaaacagagatatagatcaatggaacagaacagagccctcagaaataacgccacatacctacaactatctgatctttgacaaacctgagaaaaacaagcaatggggaaaggattccctatttaataaatggtgctgggaaaactggctagccatatgtagaaagctgaaactggatcccttccttacaccttatacaaaaatcaattcaagatggattaaagatttaaacgttagacctaaaaccataaaaaccctagaagaaaacctaggcagtaccattcaggacataggcgtgggcaaggacttcatgtccaaaacaccaaaagcaatggcaacaaaagccaaaattgacaaatgggatctaattaaactaaagagcttctgcacagcaaaagaaactaccatcagagtgaacaggcaacctacaacatgggagaaaattttcgcaacctactcatctgacaaaaggctaatatccagaatctacaatgaactcaaacaaatttacaagaaaaaaacaaacaaccccatcaaaaagtgggcgaaggacatgaacagacacttctcaaaagaagacatttatgcagccaaaaaacacatgaaaaaatgctcatcatcactggccatcagagaaatgcaaatcaaaaccactatgagatatcatctcacaccagttagaatggcaatcattaaaaagtcaggaaacaacagtgaaggttatccggacttgctgaatactgagtatgagcagatttcttttggaaatcaaagaggaactaaggttgtgcctggtgacccaagggaaacaaaaacacatgcagatgcagaagccagaagcagaatttggctagtgctggcgtcagtggtgcaggatagatggaccaatatttatgaggaaatctcccaccttgctccatggaacaaacaggtcactgagcagcagccaaaatctgctgctgcacagagcttaaggcctgggcccagtgatcctgttggcctctcctttcctgggtactgtgaatcaggtgcaccagcagcatttcttcatgccagggctgagacattaaaattaagtagtgcaactatgtctgctacagaaatcaaaggggaagggcagtctcagacaggaaggactcagtaa

SEQ ID NO: 128910 - DNA, 2910 bp, Homo sapiens
atggataaattcctcaacacaaacaccctcccaagactaaaccaggaagaagttgactctctgaatagaccaataacaggatctgaaattgtggcaatagtcaatagcttaccaaccaaaaagagtccaggaccagatggattcacagccgaattctaccagaggtacaaggaggaactgagaataaaatacctaggaatccaacttacaaaggatgtgaaggacctcttcaaggagaactacaaaccactgctcaaggaaataaaagaggataaaaacaaatggaagaacattccatgctcatgggtaggaagaatcaacatcatgaaaatggccatactgcccaaggtaatttatagattcaatgccatccccatcaagctaccaatgactttcttcatagaattggaaaaaactactttaaagttcatatggaaccaaaaaagagccctcatcgccaagtcaatcctaagccaaatgaacagagctggaggcatcatgctccctgacttcaaactatactacatggctacagtaaccaaaacagcatggtactggtaccaaaacagagatatagatcaatggaacagaacagagccctcagaaataacgccgcatatctacaactatctgatctttgacaaaccggagaaaaacaagaaatggggaaaggattccctatttaataaatggtgctgggaaaactggctagccatatgtagaaagctgaaactggatcccttccttacaccttacacaaaaattaattcaagatggattaaagacttaaacgttagacctaaaaccataaaaaccctagaagaaaacctaggcattaccattcaggacacaggcatgggcaaggacttcatgtctaaaacaccaaaagcaatggcaacaaaagccaaaattgacaaatgggatctcattaaactaaagagcttctgcacagcaaaagaaactaccattagagtgaacaggcaacctacaaaatgggagaaaattttcgcaacctactcatctgacaaagggctaatatccagaatctacaatgaactcaaacaaatttacaagaaaaaaacaaacaaccccatcaaaaagtgggcaaaggacatgaacagacacttctcaaaagaagacatttatgcagccaaaaaacacatgaaaaaatgctcaccatcactggccatcagagaaatgcaaatcaaaaccacaatgagataccacctcacgccagttagaatggcaatcattaaaaagtcaggaaacaacagagccggtaggtgccaggaacagtcaggagcccagccccctaccgagttaatggggtgggagccccgtgctcccaagtgcagctgcagccgcctagccctggctcatgacccaagcatcccggcactctcagactttggcactgacaaggagggagaccaagtgttggaagttctggccagggcaatcaggcaggagaaggaaataaagggtattcaattaggaaaagaggaagtcaaattggccctgtttgcagatgacatgattgtatatctagaaaaccccatcatctcagcccaaaagctccttaagctgatagacaacttcagcaaagtctcaggatacaaaatcaatgtgcaaaaatcacaagcattcttatataccaataacagacaaacagagagccaaatcatgagtgaacttccattcataattgcttcaaagagaataaaatacctaggaatccaccttacaagggatgtgaaggacctcttcaagaagaactacaaaccactgctcaatgaaataaaagtggatacaaacaaaatggaagaacattccatgctcatgcgtaggaagaatcaatatcatgaaaatggccatactgcccaagaattggaaaaaactactttaaagttcatatggaaccaaaaaagaacccacattgccaagtcaatcctaagccaaaagaacaaagctggaggcacactacctgagttcaaactatactacaaggctacagtaaccaaaacagcatggtactggtaccaaaacagagatatagaccaatggaacagaacagagccctcagaaataatgccacatatctacaactatctgatctttgacaaacctgacagaaacaagaaatggggaaaggattccctatttaataaatggttctgggaaaactgcctagccatatgtagaaagctgaaactggatcccttccttacaccttatacaaaaattaattcaagatggattaaagacttaaactttagacctaaaaccataaaaaccctagaagataacctaggtaataccattcaggacataggcatgggcaaggacttcatgtctaaaacaccaaaagcaatggcaacaaaagccaaaattgacaaatgggatctaattgaactaaagagcttctgcacagcaaaagaaactaccatcagagtgaacaggcaacctacagaatgggagaaaatttttgcaatctactcatctgacaaagggctaatatccagaatctacaatgaactcaaacaaatttacaagaaaaaaacaaacaaccccatcaaaaagtgggcaaaggatatgaacagacacttctcaaaagaagacatttatgcagccaaaagacacatgaaaaaatgttcatcatcactggccatcagagaaatgcaaatcaaaaccacaatgagataccatctcacaccagttagaacggcgatcattaaaaagtcaggagacaacagggacatggatgaaggtggaaaccatcattctcagcaaactattgcaaggacaaaaaaccaaacactgcatgttctcactcataggtgggaattgaacaatgagaacacatggacacaggaaggggaacatcacacaccggggactgttgtggggtga

SEQ ID NO: 128911 - DNA, 3004 bp, Homo sapiens
gagcacccagattcataaagcaagtcctgagtgacctacaaagagacttagactcccacacattaataatgggagactttaacaccccactgtcaacattagacagatcaacgagacagaaagtcaacaaggatacccaggaattgaactcagctctgcaccaagtggacctaatagacatctacagaactctccaccccaaatcaacagaatacacatttttttcagcaccacaccacacgtattccaaaattgaccacatacttggaagtaaagctctcctcagcaaatgtaaaagaacagaaattataacaaactatctctcagaccacagtgcaatcaaactagaactcaggattaagaatctcactcaaaaccgctcaactacatggaaactgaacaacctgctcctgaatgactactgggtacataacgaaatgaagctagaaataaagatgttctttgaaaccaacgagaacaaagacacaacataccagaatctctgggacgcattcaaagcagtgtatagagggaaatttatagcactaaatgcccacaagagaaagcaggaaagatccaaaattgacaccctaacatcacaattaaaagaactagaaaagcaagagcaaacacattcaaaagctagcagaaggcaagaaataactaaaatcagagcagaactgaaggaaatagagacacaaaaaacccttcaaaaaattaatgaatccaggagctggttttttgaaaggatcaacaaaatagatagactgctagcaagactaataaagagaaaaagagagaagaatcaaatagatgcaataaaaaatgataaaggggacatcaccaccaatcccacagaaatacaaactaccatcagagaatactacaaacacctctacgcaaataaactagaaaatctagaagaaatggataaattcctcgacacatacactctcccaagactaaaccaggaagaagttgaatctctgaatagaccaataacaggatctgaaattgtggcaataatcaatagcttaccaaccaaaaagagtccaggaccagatggattcacagccgaattctaccagaggtacaagaaggaactggtaccattccttctgaaactattccaatcaatagaaaaagagggaatcctccctaactcattttatgaggccagcatcattctgataccaaagccaggcagagacacaaccaaaaaagagaattttagaccaatatccttgatgaacattgatgcaaaaaccctcaataaaatactggcagaccgaatccagcagcacatcaaaaagcttatccaccatgatcaagtgggcttcatccctgggatgcaaggctggttcaatatacacatatcaataaatgtaatccagcatataaacagagccaaagacaaaaaccacatgattatctgcatagatgcagaaagggcctttgacaaaattcaacaacccttcatgctaaaaactcttaataaattagtgttggaagttctggccagggcaattaggcaggagaaggaaataaagggtattcaagtaggaaaagaggaagtcaaattgtccctgtttgcagatgacatgattgtatatctagaaaaccccattgtctcagcccaaaatctccttaagctgataagcaacttcagcaaagtctcaggatacaaaatcaatgtacaaaagtcacaagcattcttatacaccaataacagacaaacagagagccaaatcatgagtgaactcccattcacaattgcttcaaagagaataaaatacctaggaatccaacttacaagggatgtgaaggacctcttcaaggagaactacaaaccactgctcaacgaaataaaagaggatacaaacaaatggaagaacattctatgctcatgggtaggaagaattaatatcgtgaaaatggccatactgcccaaggtaatttacagattcaatgccatccccatcaagctaccaatgcctttcttcacagaattggaagaaactactttaaagttcatatggaaccaaaaaagagcccgcattgccaaggcaatcctaagccaaaagaaaaaagctggaggcatcacactacctgacttcaaactatactacaaggctacagtaaccaaaacagcatggtactggtaccaaaacacagatatagaacaatggaacagaacagagccctcagaaataatgctgcatatctacaactatctgatctttgaccaacctgagaaaaacaagcaatggggaaaggattccctatttaataaatggtgctgggaaaactggctagccatatgtagaaagctgaaactggatcccttccttacaccttatacaaaaatcaattcaagatggattaaagacttaaacgttagacctaaaaccataaaaaccctagaagaaaacctaggcattaccattcaggacataagcatgggtaaggacttcatgtctaaaacaccaaaagcaaaggcaacaaaagccaaaattgacaaatgggatctaattaaactaaagagtttctgcacagcaaaagaaactaccatcagagtgaacaggcaacctacaaaatgggagaaaattttcgcaacctactcatctgacaaagggctaatatccagaatctacaatgaactcaaacaaatttacaagataaaaacaaacaaccccatcgaaaagtgggtgaaggacatgaacagacacttctcaaaagaagacatttatgcagccaaaaaacacatgaaaaaatgctcatcatcactggccatcagagaaatgcaaatcaaaaccactatgagataccatctcacagcagttagaatggcaatcattaaaaagtcaggaaacaacagtctaattgtcggcgccagcatggacacctccctcctctccgggccgattccgtatgatatacaacactttgatcgtttcggaagcgtgacagttcgacgcgggtgcgcgatcgagttttacaacac

SEQ ID NO: 128912 - DNA, 2928 bp, Homo sapiens
atggaggaaactgcccccatgattcaattatctccacctggccctgctcttgacatgtggggaattattacaattcaagatttcaataagtgtatgactcttaaattccggttaaaaaatttttcaaggatcaacaaaattgatacaccgctagcaagactaataaagaagaaaagagagaagaatcgaatagacacaataaaaaatgataaaggggatatcaccagtaatcccacagaaatacaaagtaccatcagagaatactacaaacacctctacacaaataaactagaaaatctagaagaaatggataaattcctcgacacatacaccctcccaagactaaaccaggaagaagttgaatctctgaatagaccaataacaggctctgaaattatggcaataatcaatagcttaccaaccaaaaagagtccaggaccagatggattcacagccaaattctaccagaggtacaaggaggaactggtaccattccttctgaaactattccaatcaatagaaaaagagggaatcctccctaactcattttatgaggccagcatcatcctgataccaaagccgggcagagacacaaccaaaaatgagaattttagaccaatatctttgatgaacattgatgcaaaaatcctcaataaaatactggcaaaccgaatccagcaacacatcaaaaagcttatccaccatgatcaagtgggcttcatccctgggatgcaaggctggttcaatatacgcaaatcaataaatgtaatccagcatataagcagaaccaaagacaaaaaccacatgattatctcaatagatgcagaaaaggcctttgacaaaattcaacaacccttcatgctaaaaactctcaataaattagggaataaaatacctaggaatccaacttacaagggatgtgaaggacctcttcaaggagaggtccttgaaccactgctcaatgaaataaaagaggatacaaacaaatggaagaacattccatgctcatgggtaggaagaatcaatatcgtgaaaatggccatactgcccaaggtaatttatagattcaatgccatccccatcaagctaccaatgactttcttcacagaattggaaaaaactactttaaagttcatatggaaccaaaaaagagccctcatcgccaagtcaatcctaagccaaaagaacaaagctggaggcatcacgctacctgacttcaaactatactacaaggctacagtaaccaaaacagcatggtactggtaccaaaacagagatatagatcaatggaacagaacagagccctcagaaataacgctgcatatctacaactatctcatctttgacaaacctgagaaaaacaagcaatggggaaaggattccctatttaataaatggtgctgggaaaactggctagccatatgtagaaagctgaaactggatcccttccttacaccttatacaaaaattaattcgagatggattaaagacttaaacgttagacctaaaaccataaaaaccctagaagaaaacctaggcattaccattcaggacataggcatgggcaaggactacatgtctaaaacaccaaaagcaatggcaacaaaagccaaaattgacaaatgggatctaattaaactcaagagcttctgcacagcaaaagaaactaccatcagagtgaacaggcaacctacaaaatgggagaaaattttcgcaacctactcatctgacaaagggctaatatccagaatctacaatgaactcaaacaaatttacaagaaaaaaacaaacaaccccatcaaaaagtgggtgaaggacatgaacagacacttctcaaaagaagacatttatgcagccaaaaaacacatgaaaaaatgctcaccatcactggccatcagagaaatgcaaatcaaaaccacaatgagataccatctcacaccagttagaatggcaatcattaaaaagtcaggaaacaacagccccacatgcgtcagtcaggattggaaattgacgcaggctgtggggctctggagtgctgaggcagaagcgccgaagtccgctcagcggcgcccactagcggaaggccacagagcggcggtgcaacgggacggctcagggctccaactgctctgcactgtgaagctgcaagtcctcccttgcatcatcgcacagggaaacggagggagaaaggccaccagctccttagaggcagagttgacctcttggcggccattatgtttagaggacggcactggcttcagaggggaagatacattggaaacagttaatgcagaaggcagggaaaataggaggaaagcaggccacagggcagcaggatcatctgcctcacggcgatgtagaaacacaggaaggagtgtgcaaagactaaggccccagaagacccaggctttcccgacccactgccacttctgcctcatcttagtggtcaaagctacacagctaaacccaaaatcaagggtgaggaaagttccctttgcccccatgaaacatggcaaagcactggcagggccatgggctaatatatgtgctggcaagtcttccaatgagatccggacgtgtgaccgccatggctgtggacagtactctgctcaaagaagtcagaggcctcaccagggtgtggacatcttgtgctctgctggatctactgtgtacgcaccattcactggaatgattgtgggccaggagaaaccttatcaaaacaagaatgctatcaataatggtgttcgaatatctggaagaggtttttgtgtcaaaatgttctacattaagccaattaagtataaaggtcctattaagaagggagaaaaacttggaactctattgcccttgcagaaagtttatcctggcatacaatcgcatgtgcacattgaaaactgtgactcgagtgaccctactgcatacctgtaa

SEQ ID NO: 128913 - DNA, 2580 bp, Homo sapiens
atgggagactttaacaccccactgtcaacattagacagatcaatgagacagaaagtcaacaaggatacccaggaattgaactcagctctgcaccaagcaaacctaatagacatctacagaactctccaccccaaatcaacagaatatacatttttttcagcaccacaccacacctattccaaaattgaccacatacttggaagtaaagctctcctcagcaaatgtaaaagaacagagattataacaaactatctctcagaccacactgcaatcaaactagaactcaggattaagaatctcactcaaaaccgctcaactacatggaaactgaacaacctgctcctgaatgactactggatacataacgcaatgaaggcagaaataaagatgttctttgaaaccaacgagaacaaagacacaacataccagaatctctgggacacattcaaagcagtgtgtagagggaaatttatagcactaaatgcccacaagagaaagcaggaaagatccaaaattgacaccctaacatcacaattaaaagaactagaaaagcaagagcaaacacattcaaaagatagaagaaggcaagaaataactaaaatcagagcagaactgaaggaaatagagacacaaaaaacccttcaaaaaattaatgaatccaggagctggttttttgaaaggatcaacaaaattgatagaccgctagcaagactaataaagaaaaaaagagagaagaatcaaatagacacaataaaaaatgataaaggggatatcaccaccgatcccacagaaatacaaactaccatcagagaatactacaaacacctctacgcaaataaactagaaaatctagaagaaatggataaattcctcgacacatacactctcccaagactaaaccaggaagaagttgaatctctgaatagaccaataacaggctctgaaattgtggcaataatcaatagtttaccaaccaaaaagagtccaggaccagatggattcacagccgaattctaccagaggtacaaggaggaactggtaccattccttctgaaactattccaatcaatagaaaaagagggaatcctccctaactcattttatgaggccagcatcattctgataccaaagccgggcagagacacaaccaaaaaagagaattttagaccaatatccttgatgaacattgacgcaaaaatcctcaataaaatactggcaaaacgaatccagcagcacatcaaaaagcttatccaccatgatcaagtgggcttcatccctggcatgcaaggctggttcaatatacgcaaatcaataaatataatccagcatataaacagagccaaagacaaaaaccacatgattatctcaatagatgcagaaaaagcctttgacaaaattcaacaacccttcatgctaaaaactctcaataaattagaattggaaaaaactactttaaagttcatatggaaccaaaaaagagcccgcatcgccaaggcaatcctaagccaaaagaacaaagctggaggcatcacactacctgacttcaaactatactacaaggctacagtaaccaaaacagcatggtactggtaccaaaacagagatatagatcaatggaacagaacagagccctcagaaataacgccgcatatctacaactatctgatctttgacaaacctgagaaaaacaagcaatggggaaaggattccctatttaataaatggtgctgggaaaactggctagccatatgtagaaagctgaaactggatcccttccttacaccttatacaaaaatcaattcaagatggattaaagacttaaatgttagacctaaaaccataaaaaccctagaagaaaacctaggcattaccattcaggacataggcatgggcaaggacttcatgtccaaaacaccaaaagcaatggcaacaaaagacaaaattgacaaatgggatctaattaaactaaagagcttctgcacagcaaaagaaactaccatcagagtgaacaggcaacctagaaaatgggagaaaattttcgcaacctactcatctgacaaagggctaatatccagaatctacaatgaactcaaacaaatttacaagaaaaaaacaaacaaccccatcaaaaagtgggcgaaggacatgaacagacacttctcaaaagaagacatttatgcagccaaaagacacatgaaaaaatgctcatcatcactggccatcagagaaatgcaaatcaaaaccacaatgacataccatctcacaccagttagaatggcaatcattaaaaagtcaggaaacaacaggtgccagcagaaggatgggaccctccagattctgcaggagaagggggaggactcctccttgccctggcggcacctccactgctgccaccgaggccgacggtacagcacccacagcttcctacccacgccaggccaggtggctccgcagtgctcctactcccacttcccaggacccccagacttgctgctgctgccaccactaaggccaatgccaatacaaccactgctgctgtcaccctcgatgcaccggcactccctacaaggcccctactag

SEQ ID NO: 128914 - DNA, 5725 bp, Homo sapiens
tttgaataaagcatctaagagagaacacttgagttcaacagagaagtcacaggaaatactggagacatggaaggagtacaaagagacttagactcccacacattaataatgggagactttaacaccccactgtcaatattagacagatcaacgagacagaaagtcaacaaggatacccaggaattgaactcagctctgcaccaagcggacctaatcgacatctacagaactctccaccccaaatcgacagaatatacatttttttcagcaccacaccatacctattccaaaattgaccacatacttggaagtaaagctctcctcagcaaatgtaaaagaacagaaattataacaaactgtctctcagaccacagtgcaatcaaactagaactcaggattaagactctcactcaaagccactcaactacatggaaactgaacaacctgctcctgaatgactactgggtacataacgaaatgaaggcagaaataaagatgttctttgaaaccaacgagaacaaagacacaacataccagaatctctgggacgcattcaaagcagtgtgtagagggaaatttatagcactaaatgcccacaagagaaagcaggaaagatccaaaattgacaccctaacatcacaattaaaagaactagaaaagcaagagcaaacacattcaaaagctagcagaaggcaagaaataactaaaatcagagcagaactgaaggaaatagagacacaaaaaacccttcaaaaaatcaatgaatccaggagctggttttttgaaaggatcaacaaaattgatagaccgctagcaagactaataaagaaaaaaagagagaagaatcaaatagacacaataaaaaatgataaaggggatatcaccactgatcccacagaaatacaaactaccatcagagaatactacaaacacctctacgcaaataaactagaaaatctagaagaaatggatacattcctcgacacatacactctcccaagactaaaccaggaagaagtcgaatctctgaatagaccaataacaggagctgaaattgaggcaataatcaatagtttaccaaccaaaaagagtccaggaccagatggattcacagccgaattctaccagaggtacaatgaggagctggtaccattccttctgaaactattccaatcaatagaaaaagagggaatcctccctaactcattttatgaggccagcatcattctgataccaaagccaggcagagacacaaccaaaaaagagaattttagaccaatatccttgatgaacattgatgcaaaaatcctcaataaaatactggcaaaccgaatccagcagcacatcaaaaagcttatccaccatgatcaagtgggcttcatccctgggatgcaaggctggttcaatatacgcaaatcaataaatgtaatccagcatataaacaaagccaaagacaaaaaccacattattatctcaaggaagcattccctttgaaaactggcacaagacagggatgccctctctcaccgctcctattccatagtgttggaagttctggccagggcaatcaggcagaagaaggaaataaagggtattcaattaggaaaagaggaagtcaaattgtccctgtttgcagacgacatgattgtttatctagaaaaccccattgtctcagcccaaaatctccttaagctgataagcaacttcagcaaagtctcaggatacaaaatcaatgtacaaaaatcacaagcattcttatacaccaagaacagacaaacagagagccaaatcatgagtgaactcccattcacaattgcttcaaagagaataaaatacctaggaatccaacttacaagggatgtgaaggacctcttcaaggagaactacaaaccactgctcaaggaaataaaagaggacacaaacaaatggaagaacattccatgctcatgggtaggaagaatcaatatcgtgaaaatggccatactgcccaaggtaatttacagattcaatgccatccccatcaagctaccaatgactttcttcacagaattggaaaaaactactttaaagttcatatggaaccaaaaaagagcccgcatcgccaagtcaatcctaagccaaaagaacaaagttggaggcatcacactacctgacttcaaactatactacaaggctacagtaaccaaaacagcatggtactggtaccaaaacagagttatagatcaatggaacagaaaagagccctcagaaataacaccgcatacctacaactatctgatctttgacaaacctgagaaaaacaagcaatggggaaaggattccctatttaataaatggtgctgggaaaactggctagccatatgtagaaagctgaaactggatcccttccttacaccttatacaaaaatcaattcaagatggattaaagatttaaatgttagacctaaaaccataaaaaccctagaagaaaacctaggcattaccattcaggacataggcatgggcaaggacttcatgtccaaaacaccaaaagcaatggcaacaaaagccaaaattgacaaatgggatctaattaaactaaagagcttctgcacagcaaaagaaactaccatcagagtgaacaggcaacctacaacatgggagaaaattttcacaacctactcatctgacaaagggctaatatccagaatctacaatgaactcaaacaaatttacaagaaaaaaacaaacaaccccatcaaaaagtgggtgaaggacatgaacagacacttctcaaaagaagatatttatgcagccaaaaaacacatgaaaaaatgctcatcatcactggccatcagagaaatgcaaatcaaaagcttccagaggaaggatcaggcagcaatatttgctattctgcagcctccactggtgataaccaggcaaacagggtctggagtggacctgaagcaaactccaacagacctgaagctgagggacctaactgttagaagaaaaatgaacaaacagaaagaaagatagagagaaaccagaggagaagttaaaaattctaaaaaccagagcacctctgctcctccaaaggactgcagttccttggccgatcccaaaaaaatacaaactaccatcagagaatactataaacacctctatccaaataaactagaaaatcaagaagaaatggataaatttctggacacatacaccctcccaagattaaaccaggaagaagttgaatctctgaatagaccaataacaggttctgaaattgtggcaataatcaatagcttaccaaccaaaaagagtccaggaccagatggattcacagccgaattctaccagaggtacaaggaggaactggtaccattccttctgaaactattccaatcaatagaaaaagagggaatcctccctaactcattttatgaggccagcatcatcctgataccaaagctgggcagagacacaaccaaaaaagagaattttagaccaatatccgtgatgaacattgatgtaaaaatcctcaataaaatactggcaaaccgaatccagcagcacatcaaaaagcttatccaccatgatcaagtgggcttcatccctgggatgcaaggctggttcaatatacacaaatcaataaatgtaatccagcatataaacagaaccaaagacaaaaaccacatgattatctcaatacatgcagaaaaggcctttgacaaaattcaacaacacttcatgctaaaaactctcaataaattaggtattgatgggacgtatctcaaaataataagagctatctatgacaaacccacagccaatatcatactgaatgggcaaaaactggaagcattccctttgaaaattggcacaagacagggatgccctctctcaccactcctattcaacatagtgttggaagttctggccagggcaattaggcaggagaaggaaataaagggtattcaattaggaaaagaggtagtcaaattgtccctgtttgcagatgacatgattgtatatctagaaaaccccatcgtctcagcccaaaatctccttaagctgataagcaactttggcaaagtctcaggatacaaaatcaatgtacaaaaatcacaagcattcttatacaccaataacagacaaacagagagccaaatcatgagtgaactcccattcacaattgcttcaaagagaataaaatacctaggaatccaacttacaagggatgtgaaggacctcttcaaggagaactacaaaccactgctcaatgaaataaaagaggatacaaacaaatggaagaacattccatgctcatgggtaggaagaatcaatatcgtgaaaatggccgtactgcccaagctaccaatgactttcttcacagaattggaaaaaaactactttaaagttcatatggaaccaaaaaagagcccgcatcgccaagtcaatcctaagccaaaagaacaaagctggaggcatcacgctacctgacttcaaactatactacaaggctacagcaaccaaaacagcatggtactggtaccaaaacagagatctagatcaatggaacagaacagagccctcagaaataacaccacatatctacaactatctgatctttgacaaacctgacaaaaataagcaatggggaaaggattccctatttaataaatggtgctgtgaaaactggctagccatatgtagaaagctgaaactggatcccttccttacaccttatacaaaaattaattcaagatggattaaagacttaaacattagacctaaaaccataaaaaccctagaagaaaacctaggcattaccattcaggacataggcatgggcaaggacttcatgtctaaaacaccaaaagcaatggcaacaaaagccaaaattgacaaatgggatctaattaaacaagagagcttctgcacagcaaaagaaactaccatcagagtgaacaggcaacctacaaaatgggagaaaattttcgcaacctactcatctgacaaagggctaatatccagaatctacagtgaactcaaacaaatttacaagaaaaaaacaaacaaccccatcaaaaagtgggcgaaggacatgaacagacacttctcaaaagaagacatttatgcagccaaaaaacacatgaaaaaatgcccatcatcactggccatcagagaaatgcaaatcaaaaccacaatgagataccatctcacaccagttagaatggccatcattaaaaagtcaggaaacaacaggtgctggagaggatgtggagaaataggaacacttttacactgttggtgggactgtaaactagttcaaccattgtggaagtcagtgtggcgattcctcagggatctagaactagaaataccatttgacccagccatcccattactgggcatacacccaaaggactataaatcatgctgctataacgacacatgcacacctgttatctctggtctgaaggtacttaagaaagtagctgagcccctcagtccaggccatggtctcatggtcagtcttgcagtcttgtccccatttctgcttcctggggcaacggaaagtaagaccgccataggaatgttggaatttctggttctggaagtggggccatcggcaatgaaaatctgcatgaagcagggaggaatttgtgctggagtagtgccccaaatccaaggtatactggacttaaaagtccttgaaatttctctgcaacttgcttcagcttct

SEQ ID NO: 128915 - DNA, 6142 bp, Homo sapiens
ctaccgccacagctcgcagtccgcagagcagccggagtcgctgaggttgtttctgaggctattcaggcagcccgggctgcctgtgctgcctgtgtcgccgctggcactgccactctgcgcactctgtttggcttgccttcctctttgccgcgcgggcagctgagtgcagctactgctcacggctcctcccgccccgacagttcgccgactgcaaggagccagtgccgagccagccctgttctttcctgactttttaatgattgccattctaactggtgtgagatggtatctcattgtggttttgatttgcatttctctgatggccagtgaagatgagaattttttcatgtgttttttggctgcataaatgtcttcttttgagaagtgtctgttcatgtcctttgcccactttttgatggggttgtttgtttttttcttgtaaatttgtttgagttcattgtagattctggagattagccctttgtcagatgagtagattgcaaaaattttctcccattctgtaggttgcctgttcactctgatggtagtttcttttgctgtgcagaagctctttagtttaattagatcccatttgtcaattttggcttttgttgccattgcttttggtgttttagacatgaagtccttgcccatgcctatgtcctgaatggtaatgcctaggttttcttctagggtttttatggttttaggtctaatgtttaagtctttaatccatcttgaattgatttttgtataaggtgtaaggaagggatccagtttcagctttctacatatggctagccagttttcccagcaccatttattaaatagggaatcctttccccattgcttgtttttctcagggttgtcaaagatcagatagtcgtagatatgcggcgttatttctgagggcactgttctgttccattgatctatatctctgttttggtaccagtaccatgctgttttggaaactgtagccttgtagtatagtttgaagtctggtagtgtgatgcctccagctttgttcttttggcttaggattgacttggcgatgtgggctcttttttggttccatatgaactttaaagtagttttttccaattcttgggcagtatggccattttcacgatattgattcttcctacccatgagcatggaatgtttttccatttgtttgtattctcttttatttccttgatcagtggtttgtagttctccttgaagaggtccttcacatcccttgtaagttagattcctaggtattttattctcctttatttccttctcctgcctaattgccctggccagaacttccaacactatgttgaataggagtggtgagaaagggcatccatgtcttgtgcccgttttcaaagggaatgcttccagtttttgcccattcagtatgatattggctgtgggtttgtcatagatagctcttattattttgaaatatgtcccatcgataactaatttattgagagtttttagcatgaagcattgttgaattttgtcaaagggcttttctgcatctattgagataatcaggtggtttttgtctttggctctgtttatatgctggattacatttattgatttgcgtatattgaaccagccttgcatcccagggatgaagcccacttgatcatggtggataagctttttgatgtgctgctggattcggtttgccagtattttattgaggatttttgcatcaatgttcatcaaggatattggcctaaaattctcttttttgcttgtgtctctgtcaggctttggtatcagaatgatgctggcctcataaaatgagttagggaggattccctctttttctattgattggaatagtttcagaaggaatggtaccagttcctccttgtacctctggtagaattcagctgtgaatccatctggtcctggactctttttggttgtgttggaagttctggccagggcaattaggcaggagaaggaaataaagggtattcaattaggaaaagaggaagtcaaattgtccgtgtctgcagatgacatgattgtatatctagaaaaccccattgtctcagcccaaaatctccttaagctgataagcaacttcagcaaagtctcaggatacaaaatcaatgtgcaaaaatcacaagcattcctatacaccaacaacagacagagagccaaatcaataaaatacctaggaatccaacttacaagggatgtgaaggacctcttcaaggagaactacaaaccactgctcaaggaaataaaagaggatacaaacaaatggaagaacattccatgctcatgggtaggaagaatcaatatcgtgaaaatggccatactgcccaaggtaatttacagattcaatgccatccccatcaagctaccaatgcctttcttcacagaattggaaaaaactactttaaagttcatatggaaccaaaaaagagcccgcatcgccaagtcaatcctaagccaaaagaacaaagctggaggcatcacactacctgacttcaaactatactacaaggctacaataaccaaaacagcgtggtactggtaccaaaacagagatatagatcaatggaacagaacagagccctcagaaataacaccgcatatctacaactatctgatctttgacaaacctgagaaaaacaagcaatggggaaaggattccctatttaataaatggtgctgggaaaactggctagccgtatgtagaaagctgaaactggatcccttccttacaccttatacaaaaatcaattcaagatggattaaagacttaaatgttagacctaaaaccataaaaaccctagaagaaaacctaggcattaccattcaggacataggcatgggcaaggacttcatgtctaaaacaccaaaagcaatggcaacaaaagccaaaattgacaaatgggatctaattaaactaaagagcttctgcacagcaaaagaaactaccatcagagtgaacaggcaacctacaaaatgggagaaaattttcgcaacctactcatctgacaaagcactaatatccagaatctacaatgaactcaaacaaatttacaagaaaaaaacaaacaaccccatcaaaaagagggcgaaggacatgaacagacacttctcaaaagaagacatttatgcagccagaaaacacatgaaaaaatgctcaccgtcactggccatcagagaaatgcaaatcaaaaccacaatgagataccatctcacaccagttagaatggcaatcattaaaaagtcaggaaacaacagtcataccccagcagcaactggctgcatggcatggagagagaatctgtgcatttgggagaggaacagcacagtgattgtgagacgtagcattggacacagtgctgccctgtcacagcagaaagcaacaccaggcttaactcaactgaatactgcccatagagggaccatttggaccagccctacacagaggggaaccactaatccctgcgattggaaagagagctctggctggcatcaggtgaatgccgctctgggacgaagcttccagaggaaggaattggcagcaatctttgctgttctgcagcctttgctagtgatacccaggaaaacagggtctagagtggacatccagcaaactccagcagacctgcagcagagaggcctgactgttagaaggaaaactaatgaacagagaggaatagcatcaacatcaacaaaaaggatttccacacagaaaccccatccaaaggtcaccaacatcaaagagcaaagtgaatactataaatacctctatgcaaataaactagaaaatctagaagaaattgttaaattcctggacacatacacccccccaagactaaaccaggaagaagtcaaatccctgactagaccaataacaagttctgaagttgaggcagtaattaatagcataccaaccaaaaaaagcccagaaccagacagattcacagctgaattctaccagaagtacaaacaggagctggtaccatttgttctgaaactattccaaacaacagaaaaagagggaatcctccttaacttactctacgaggccagcatcatcctgataccgaaacctgagagagacacaaccaaaaaagagaattttagaccaatatccttgatgaacattgatgcaaaaatcctcaataaaatactggcaaaccgaatccagcagtacatcaaaaagcttattcaccatgatcaagtgggcttcatccctgggatgcaaggctggttcaacatacgcaaatcaataaatgtaatccagcatataaacagaaccaaagacaaaaaccacatgattatctcaatagatgtagaaaaggcctttgacaaaattcaacaacccttcatgctaaaaactctcaataaattagagaataaaataactaggaatccaacttacaagggatgtgaagcacctcttcaaggagaactacaaaccactgctcaaggaaataaaagaggatacaaacaaatggaagaacattccatgctcatgggtaggaagaatcaatatcgtgaaaatggccatactgcccaagaattggaaaaaacgactttaaagttcatatggaaccaaaaaagagcctgcatcaccaagtcaatcctaagccaaatgaacaaagctggaggcatcacactacctgacttcaaactatcttacaaggctacagtaaccaaaacagcatggtactggtaccaaaatagagatatagatcaatggaacagaacagagccctcagaaataacgccacatatctacaactatctgatatttgacaaacctgagaaaaacaagcaatggggaaaggattccctatttaataaatggtgctgggaaaactggctagccatatgtagaaagctgaaactggatcccttccttacaccttatacaaaaatcaattcaagatggattaaagacttaaacattctacctaaaaccataaaaaccctagaagaaaacctaggcattaccattcaggacatagacatgggcaaggacttcatgtctaaaacaccaaaagcaatggcaacaaaagccaaaattgacaaatgggatctaattaaactaaagagcttctgcacagcaaaagaaactaccatcagagtgaacaggcaacctacaaaatgggagaaaattttcacaacctactcatctgacaaagggctaatatccagaatctacaatgaactcaaacaaatttacaagaaaaaaacaaacaaccccatcaaaaagtgggcaaaggacataaacagacacttctcaaaagaagacatctatgcagccaaaaaacacatgaaaaaatgttcatcatcactggccatcagagaaatgcaaatcaaaaccacaatgagataccatctcacaccagttagaatggcaatcattaaaaagtcaggaaacaacagaatcaaagttgtaaaactacaaattgttcttcaaatgaagccccagatgcagtccatgactaagatccaccgcggacccctggacaggcctgctagcccatgttccgatgctagtgacatcgaaggcacccctcccgaggaaatctcaactgcacgacccctactatgcgccagttcagcaggaaacaattttagcacaggtcatggggcctgtccacccactggccgagaggtgccagtagtagcattagatgcttctccccctacaactgtggctgcaacaaggggaaggtacgctgtttacttcctgctcccaaaaatatgcaagctttgtttcctgctgctaagatgccctgagaaaccaatgcatattagtaatcatagcccctctggaccatgtgagggaggttcagaggccagctgtatcctctgccccaaaggaccacctttgcagacagaggcactgaagactgtggaaccaaacgaaaccatcatcctaggtggctctgttggacttaatataggccattatatttctaaccaatataaacagaattcttctttaaaggatttaccccacacaatatcgccagaagcagggtcatcaacaagtcttatggttagaacagactggtgttctcatcctttcagtcacttggcaaatatggccacccttccaccttcaacttcacatgataaaggagcaggttga

SEQ ID NO: 128916 - DNA, 2876 bp, Homo sapiens
atgaaggcagaaataaaggtgttctttgaaaccaacgagaacaaagacacaacataccagaatctctgggacacattcaaagcagtgtgtagagggaaatttatagcactaaatgcccacaagagaaagcaggaaagatccaaaattgacaccctaacatcacaattaaaagaactagaaaagcaagagcaaacacattcaaaagctagcagaaggcaagaaataactaaaatcagagcagaactgaaggaaatacagacacaaaaaacccttcaaaaaatcaatgaatccaggagctggttttttgaaaggatcaacaaaattgatagatcgctagcaagactaataaagaaaaaaagagagaagaatcaaatagacacaataaaaaatgataaaggggatatcaccaccgatcccacagaaatacaaactaccatcagagaatactacaaacacctctatgcaaataaactagaaaatctagaagaaatggataaattcctcgacacatacactctcccaagactaaaccaggaagaagttgaatctctgaatagaccaataacaggagctgaaattgtggcaataatcaatagtttaccaaccaaaaagagtccaggaccagatggattcacagccgaattctaccagagctgggcagagacacaaccaaaaaaagagaattttagaccaatatccttgatgaacattgatgcaaaaatcctcaataaaatactggcaaaacgaatccagcagcacatcaaaaagcttatccaccatgatcaagtgggcttcatccctgggatgcaaggctggttcaatatacgcaaatcaataaatgtaacacagcatataaacagagccaaagacaaaaaccacatgattatctcaatagatgcagaaaaagcctttgacaaaattcaacaacccttcatgctaaaaactctcaataaattaggtattgatgggacgtatttcaaaataataagagctatctatgacaaccccacagccaatatcatactgaatgggcaaaaactggaagcattccctttgaaaactggcacaagacagggatgccctctctcaccactcctattcaacatagtgttggaagttctggccagggcaattaggcaggagaaggaaataaagggtattcaattaggaaaagaggaagtcaaattgtccctgtttgcagacaacatgattgtatatctagaaaaccccattgtctcagcccaaaatctccttaagctgataagcaacttcagcaaagtctcaggatacaaaatcaatgtacaaaaatcacaagcattcttatacaccaacaacagacaaacagagagccaaatcatgagtcaactcccattcacaattgcttcaaagagaataaaatacctaggaatccaacttacaagggatgtgaaggacctcttcaaggagaactacaaaccactgctcaaggaaataaaagaggatacaaacaaatggaaaaacattccatgctcagggggaaggaagaatcaatatcgtgaaaatggccataactgcccaagaattggaaaaaaactactttaaagttcatatggaaccaaaaaagagcctgcatcgccaagtcaatcctaagccaaaagaacaaagctggaggcatcacactacctgacttcaaactatactacaaggctacagtaaccaaaacagcatggtactggtaccaaaacagagatatagatcaatggaacagaacagagccctcagaaataatgccacttatactacaactatctgatctttgacaaacctgagaaaaacaagcaaaggggaaaggattccctatttaataaatggtgctgggaaaactggctagccatatgtagaaagctgaaactggatcccttccttacaccttatacaaaaattaattcacgatggcttaaagacttaaatgttagaactaaaaccataaaaaccctagaagaaaaactaggcataaccattcaggacataggcctgggcaaggacttcatgtctaaaataccaaaagcaatggcaacaaaagcccaaaattgacaaatgggatctaattcaactaaagagcttctgcacagcaaaagaaactaccatcagagtgaacaggcaacctacaaaatgagagaaaatattcgcaacctactcatctgacaaagggctaatatccagaatctacaatgaactcaaacaaatttacaagaaaaaaaacaaacaaccccatcaaaaaatgggcaaaggacatgaacagacactcctcaaaagaagacatttatgcagccaagaaacacatgaaaaagtgctcatcatcactggccatcagagaaatgcaaatcaaaaccacaatgagataccatctcacaccagttagaatggtgatcattaaaatgtcaggaaacaacaggtgctggagaggatgtggagaaacaggaacgcttttacactgttggtgggactgtaaactagctcaaccattgtggaagtcagtgtggcgattcctcagggatctagaactagaaataccatttgacccagccatcccattactgggtatatacccaaatgactataaatcatgctgctataaagacacatgcacacgtatgtttattgcggcattattcacaatagcaaagacttggaaccaacccaaatgtccaacaattatagactggattaagaaaatgtggcacatatacaccatggaatactatgcagccataaaaaatgatgagttcgtgtcctttgtagggacatggatgaaattggaaatcatcattctcagtaaactatcacaagaacaaaaaaccacacaccgcatattctcactcataggtgggaattga

SEQ ID NO: 128917 - DNA, 4462 bp, Homo sapiens
atgggagactttaacaccccactgtcaacattagacagatcaatgagacagaaagtcaaaaaggatacccaggaattgaactcagctctgcaccaagcagacctaatagacatctacagaactctccaccccaaatcaacagaatatacatttttttcagcaccacaccacacctattccaaaattgaccacatacttggaagtaaagctctcctcagcaaatgtaaaagaacagaaattataacaaactatctctcagacggcagtgcaatcaaactagaactcaggattaagaatctcactcaaaaccgctcaactacatggaaactgaacaacctgctcctgaatgactactgggtacctaacgaaatgaaggcagaaataaagatgttctttgaaaccaacgagaacaaagacacaacataccagaatctctgggacgcattcaaagcagtgtgtagagggaaatttatagcactaaatgcccacaagagaaagcaggaaagatccaaaattgacaccctaacatcacaattaaaagaactagaaaagcaagagcaaacacattcaaaagctagcagaaggcaagaaataactaaaatcagagcagaactgaaggaaatagagacacaaaaaacccttcaaaaaattaatgaatccaggagctggttttttgaaaggatcaacaaaatagatagaccgctagcaagactaataaagaaaaaaagagagaagaatcaaatagatacaataaaaaatgataaaggggatatcaccaccaatcccacagaaatacaaactaccatcagagaatactacaaacacctctacgccaataaactagaaaatctagaagaaatggataaattccttgacacatacactctcccaagactaaaccaggaagaagttgaatctctgaatagaccaataacaggatctgaaattgtggcaataatcaatagcttaccaaccaaaaagagtccaggaccagatggattcacagccaaattctaccagaggtacaaggaggaactgcatataaacagagccaaagacaaaaaccacatgattatctcaatagatgcagaaaaggcctttgacaaaattcaacaacgcttcatgctaaaaactctcaataaattagtgttggaagttctggccagggcaattaggcaggagaaggaaataaagggtattcaattaggaaaagaggaagtcaaattttccctgtttgcagacgacatgattgtatatctagaaaaccccattgtctcagcccaaaatctccttaagctgataagcaacttcagcaaagtctcaggatacaaaatcaatgtacaaaaatcacaagcattcttatacaccaacaacagacaaacagagagccaaatcatgagtgaactcccattcataattgcttcaaagagaataaaatacctaggaatccaacttacaagggatgtgaaggacctcttcaaggagaactacaaaccactgctcaaggaaataaaagaggatacaaacaaatgcaagaacattccatgctcatgggtaggaagaatcaatatcgtgaaaatggccatactgcccaaggtaatttacagattcaatgccatccccatcaagctaccaatgcctttcttcacagaattggaaaaaactactttaaagttcatatggaaccaaaaaagagcccgcatcgccaagtcaatcctaagccaaaagaacaaagctggaggcatcatgctacctgacttcaaaccatactacaaggctacagtaaccaaaacagcatggtactggtaccaaaagagagatatagatcagtggaacagaacagagccctcagaaataacgccgcatatctacaactatctgatctttgacaaacctgagaaaaacaagcaatggggaaaggattccctatttaataaatggtgctgggaaaactggctggccatatgtagaaagctgaaactggatcccttccttacaccttatacaaaaatcaattcaagatggattaaagacttaaacgttagacctaaaaccataaaaaccctagaagaaaacctaggcaataccattcaggacataggcatgggcaaggacttcatgtctaaaacaccaaaagcaatggcaacaaaagacaaaattgacaaatgggatctaattaaacttaagagcttctgtacagcaaaagaaactaccatcagagtgaacaggcaacctacaaaatgggagaaaattttcacaacatactcatctgacaaagggctaatatccagaatctacaatgaactcaaacaaatttacaagaaaaaaacaaacaaccccatcaaaaagtgggcaaaggatatgaacagacacttctcaaaagaagacatttatacagccaaaagacacatgaaaaaatgctcatcatcactagccatcagagaaattcaaatcaaacccacaatgagatactatctcacaccagttagaatggcgatcattaaaaagtcaggaaacaacaggtcacagcttcaaaatattgttcagagaacttgcagtgaaagcaacataaaaaggagagcagggatagaaaaaggaatccagtgggcaaaagatgccaactgttcccaagagagtccagtgcgaccatcgcaacaggtgggtgcccctctgggacgaagcttccagaggaaggatcaggcagcaatatttgctgttctgcagcctctgctggtgatacccaggcaaacaaggtctggagtggacctccagcacattccagcaggcctgcagcagaggggcctgactgttagaagaaaaactaacaaacagaaaggaatagcatcaacatcaacaaaagccacatccacacagaaaccccatccaaaagtcaccaacatcaaagaccaaagtattggaagttctggccagggcaatcaggcaagagaaacaaagcgtattcaaataggaagccaggaagtcaaattgtctttgcttgaagatgacatgattgtacatttagaaaaccccatcatctcagccaaaaatctccttcagctgataagcaacttcaccaaagtctcaggatacaaaatcaatgtgcaaaaatcacaagcattcccatacaccaataaaacacaaatagagaaccaaatcatgagtgaactcccattcacaattgctacaaagagaataaaatacctaggaatcaaacttacaagggatgtgaaggacctcttcaagaataactacaaaccgctgttcaaggaaataagagaggacacaaataaatggaaaaacattccatgctcatgggtaggaagaatcaatatcgtgaaaatggccatactgcccaaggtaatttacagattcaatgccatccccatcaagctaccaatgactttcttcacagaattggaagaaactactttaaagttcatatggaaccaaaaaagagcccgcatcgccaagtcaatcctaagccaaaagaacaaagctggaggcatcacgctacctgacttcaaactatactacaaggctacagtaaccaaaacagcatggtactggtaccaaaacagagatagagaccaatggaacagaacagagccctcagaaataatgccacatatctacaactatctgatctttgacaagcctgagaaaaacaagcaatggggaaaggattcccatatttaataaatggtgctaggaaaactggctaaccatatgtaaaaggctgaaactggatcccttccttacaccttataccaaaatcaattcaagatggattaaagacttaaacgttagacctaaaaccataaaaaccctagaagaaaacctaggcattaccattcaggacataggcattggcaaggacttcatgtgtaaaacaccgaaagcaatggcaacaaaagccaaaattgacaaatgggatctaattaaactaaagagcttctgcacagcaaaagaaactaccattagagtgaacaggcaacctacaaaatgggagaaaattttcgcaacctactcatctgacaaagggctaatatccagaatctacaatgaactcaaacaaatttacaagaaaaagacaaacaaccccatcaaaaagtgggcgaaggatatgaacagacacttctcaaaagaagacatttatgcagccaaaaaacacatgaaaaaatgctcatcatcactggccatcagagaaatgcaaatcaaaaccacaatgagataccatctcacaccagttagaatggcgatcattaaaaagtcaggaaacaacaggtgctggagaagatgtggagaaataggaacacttttacactgttggtgggactgtaaaccagttcaaccattgtggaagtcagtgtggcgattcctcagggatctagaactagaaataccatttgacccagccatcccattactgggtatatacccaaagggttataaatcatgctga

SEQ ID NO: 128918 - DNA, 8335 bp, Homo sapiens
atggggaaaaaacagaacagaaaaactggaaactctaaaatgcagagcgcctctcctcctccaaaggaacgcagttcctcaccagcaacggatcaaagctggatggagaatgactttgacgagctgagagaagaaggtttcagacgatcaaattactctgagctacgggaggacattcaaaccaaaggcaaagaagttgaaaactttgaaaaaaatttagaagaatgtataactagaataaccaatacagagaagtgcttaaaggagctgatggagctgaaaaccaaggctcgagaactacgtgaagaatgcagaagcctcaggagccgatgcgatcaactggaagaaagggtatcagcaatggaagatgaaatgaatgaaatgaagcaagaagggaagatcaaaagagacaaagaaggccattacataatggtaaagggatcaattcaacaagaagagctaactatcctaaatatatatgcacccaatacaggagcacccagattcataaagcaagttctgagtgacctacaaagagacttagactcccacacattaataatgggagactttaacacctcactgttaacattagacagatcaatgagacagaaagtcaacaaggatacccaggaattgaactcatctctgcaccaagcggacctaatagacatctacagaactctccaccccaaatcaatagaatatacatttttttcagcaccacaccacacctattccaaaattgaccacatagttggaagtaaagctctcctcagcaaatgtaaaagaacagaaattataacaaactatctctcagaccacagtgcaatcaaactagaactcaggattaagaatctcactcaaagccgctcaactacatggaaactgaacaacctgctcctgaatgactactgggtacataacgaaatgaaggcagaaataaagatgttctttgaaaccaacgagaacaaagacacaacataccagaatctctgggacgcattcaaagcagtgtgtagagggaaatttatagcactaaatgcccacaagagaaagcaggaaagatccaaaattgacaccctaacatcacaattaaaagaactagaaaagcaagagcaaacacattcaaaagctagcagaaggcaagaaataactaaaatcagagcagaactgaaggaaatagagacacaaaaaacccttcaaaaaatcaatgaatccaggagctggttttttgaaaggatcaacaaaattgatagaccgctagcaagactaataaagaaaaaaagagaggagaatcaaatagacacaataaaaaatgataaaggggatatcaccaccgatcccacagaaatacaaactaccatcagagaatactataaacacctctacgcaaataaaccagaaaatctagaagaaatggataaattcctcgacacatacactctcccaagactaaagcaggaagaagttgaatctctgaatagaccaataacaggagctgaaattgtggcaataatcaatagtttaccaaccaaaaagagtccaggaccagatggattcacagccgaattctaccagaggtacaaggaggaactggtaccattccttctgaaactattccaatcaatagaaaaagagggaatcctccctaactcattttatgaggccagcatcattctgataccaaagccgggcagagacacaaccaaaaaagagaattttagaccaatatccttgatgaacattgatgcaaaaatcctcaataaaatactggcaaaccgaatccagcagcacatcaaaaagcttatccaccatgatcaagtgggcttcatccctgggatgcaaggctgccaatatcatactgaatgggcaaaaactggaagcattcctttgaaaactggcacaagacagggatgccctctctcaccactcctattcaacacagtgttggaagttctggccagggcaatcaggcaggagaaggaaataaagggtattcaattaggaaaagaggaagtcaaattgtccctttttgcagacgacatgattgtttatctagaaaaccccatcgtctcagcccaaaatctccttaagctgataagcaacttcagcaaagtctcaggatacaaaatcaatgtacaaaaatcacaagcattcttatacaccaacaacagacaaacagagagccaaatcatgagtgaactcccattcacaattgcttcaaagagaataaaatacctaggaatccaatttacaagggatgtgaaggacctcttcaaggagaactacaaaccactgctcaaggaaataaaagaggatacaaacaaatggaagaacattccatgctcatgggtaggaagaatcaatatcgtgaaaatggccatactgcccaaggtaatttacagattcaatgccatccccatcaagctaccaatgactttcttcacagaattggaaaaaactactttaaatttcatatggaaccaaaaaagagcccgcatcgccaagtcaatcctaagccaaaagaacaaagctggaggcatcacactacctgacttcaaactatactacaaggctacagtaactaaaacagcatggtactggtaccaaaacagagatatagatcaatggaacagaacagagccctcagaaataacgccgcatacctacaattatctgatctttgacaaacctgagaaaaacaagcaacggggaaaggattccctatttaataaatggtgctgggaaaactggctagccatatgtagaaagctgaaactggatcccttccttacaccttatacaaaaatcaattcaagatggattaaagatttaaacgttagacctaaaaccataaaaatcctagaagaaaacctaggcattaccattcaggacataggcgtgggcaaggacttcatgtccaaaacaccaaaagcaatggcaacaaaagccaaaattgacaaatgggatctaattaaactaaagagcttctgcacagcaaaagaaactaccatcagagtgaacaggcaacctacaacatgggagaaaattttcgcaacctactcatctgacaaagggctaatatccagaatctacaatgaactcaaacaaatttacaagaaaaaaacaaacaaccccatcaaaaagtgggcgaaggacatgaacagacacttctcaaaagaagacatttatgcagccaaaaaatacatgaaaaaatgctcatcatcactggccatcagagaaatgcaaatcaaaaccacaatgagataccatctcacaccagttagaatggcaatcattaaaaagtcaggaaacaacagagacgttggcaatgtggttgaagccatgtatggggaccttcctcctccaattatgctgattggacatagcatgggtggtgctattgcagtccacacagcatcatccaacctggtaccaagcctcttgggtctgtgcatgattgatgttgtagaaggtacagctatggatgcacttaatagcatgcagaatttcttacggggtcgtcctaaaaccttcaagtctctggagaatgctattgaatggagaaatatcaaagatctatcttgggcagatagcatcaagaatgtagctgctgccagcttggcttgtatctcaggtgccctgcctgcttccgcagtaacaacaagcccagataataagaggatggccaggaatgtcttgaaatatgaaaggctcttggcagagagccccaaccacgtggtagctgaggctgtcatccagaggcccaatataccccacctgcagaccagagacacctacgaggggctatgtcagaccctgggttcccagcccactctctaccagatccctagcctctactgttcctatgagaccaattccaacgcctacctgctgctccagcccatccggaaggaggtcatccacctggagccctacattgctctctaccatgacttcgtcagtgactcagaggctcagaaaattagagaacttgcagaaccatgggaacagagctcctcaccagcaacggaacaaagctggatggagaatgactttgatgagttgagagaagaaggcttcagacgatcaaactactccgagctacaggaggaaattcgaaccaatggcaaagaagttaaaagctttgaaaaaaaattagacgaatggataactagaataaccaatgcagagaagtccttaaaggacctgatggagctgaaaaccaaggcacgagagctacgtgacgaatgcagaagcctcagtagccgatgcaatcaactggaagaaagggtatcagtgatggaagacgaaatgaatgaaacgaagcgaggagagaagtttagagaaaaaagaataaaaagaaacgaacaaagcctccaagaaatatgggactatatgaaaagaccaaatctacgtctgattggtgtacctgaaagtgacggggagaatggaaccaagttggaaaacactctgcaggatattatccaggagaacttccccaatctagcaaggcaggccaacattcaaattcaggaaatacagagaacgccacaaagatactccttgagaagagcaaccccaagacacataattgtcagattcaccaaagttgaaatgaaggaaaaaatgttaagggtagccagagagaagggtcgggttacccacaaagggaagcctgtcagactaacagctgatctcttggcagaaactctacaagccagaagacaagacacacataggctcaaaataaagggatggaggaagatttaccaagcaaatggaaaacagaaaaaggcaggggttgcaatcctagtctcagataaaacagaatttaaaccaacaaagatcaaaagagacaaagaaggccattacataatggtaaagggatcaattcaacaagaagagctaactatcctaaatatatatgcacccaatacaggagcacccagattcacaaagcaagtccttagagacctacaaagagacttagactccaacacaataataacgggagactttaacaccccactgtcaacattagacagatcaatgagacagaaagttaacaaggatatccaggaattgaactcagctctgcaccaagcagacctaatagacatctacagaactctccaccccaaatcaacagaaaatacattcttttcggcaccacaccacacctattccaaaattgaccacatagtgggaagtaaagcactcctcagcaaatgtaaaagaaaagaaattataacaaactgtctctcagaccacagtgcaatcaaactagaactcaggattaagaaactccctcaaaactgctcaactatatggaaactgaacaacctgctcctgaatgactactgggtacataacgaaatgaaggcagaaataaagatgttgtttgaaaccaatgagaacaaagacacaacataccagaatctctgggacacattgaaagcagtgtgtagagggaaatttatagcactaaatgcccacgggagaaaacaggaaagatctaaaattgacaccctaacatcacaattaaaagaactagcaaagcaagagcaaacacattcaaaagctagcagaaggcaagaaataactaagatcagagcagaactgaaggaaatagagacacaaaaaacccttcaaaaaattaatgaatccaggagctggtttttaccactagcaagactaataaagaagaaaacagagaagaatcaaatagacgcaataaaaaatgacaaaggggatatcaccaccaatcccacagacatacaaactgccatcagagaatactataaacacctctatgcaaataaactagaaaatctagaagaaatggataaactcctcaacacatataccatcccaagactaaaccaggaagaagttgaacctcggaatagaccaataacaggctctgaaattgaggcaataatcaatagattaccaaccaaaaaatgtccaggaccagatggattcacagccgaattctaccagaggtacaagcaggtaccattccttctgaaactattccaatcaacagaaaaagggggaatcctccctaagtcattttatgaggccagcatcatcctgataccaaagcctggcaaagacacaacaaaaaaagagaattttagaccaatatccctgatgaacattgatgtaaaaatcctcaataaaatactggcaaagcaaatccagcagcacatcaaaaagcttatccaccatgatcaagtgggcttcatccctgggatgcaacgctggttcaacatacgcaaatcaataaatgtaatccagcatataaacagaaccaaagacaaaaaccgcatgattatctcaatagatgcagaaaaggcctttgacaaaattcaacaacgcttcatgctaaaaactctcaataaattaggtattgatgggacgtatctcaaaacaataagagctatctatgacaaacccacagccaatatcatactgaatgggcaaaaactggaagcattccctttgaaaactggcacaagacagggatgccctctctcaccactcctattcaacatggtgttggaagttctggccagggcaattagtcaggagaaggaaataaaggatattcaattaggaaaagaggaagtcaaattgtccctgtttgcagatgacatgattgtatatctagaaaaccccattgtctcagcccaaaatcgccttaagctgataagcaacttcagaaaagtctcaggatacaaaatcaatgtacagaaatcacaagcattcttatacaccaataacagccaaacagagagccaaatcatgagtgaactcccgttcacaactgcttcaaagagaataaaatacctaggaatccaacttacaagggatgtgaaggacctcttcaaggagaactacaaaccactgctcagtgaaataaaagaggatacaaacaaatgcaagaacgttccatgctcatgggtaggaagaatcaatatcatgaaaatggccatactgcccaaggtaatttatagattcaatgccatccccatcaagctaccaatgactttcttcacagaattggaaaaaactactttaaagttcatatggaaccaaaaaagagcctgcatagccaagtcaatcctaagccaaaagaacaaagctggaggcatcacgctacctgacttcaaactatactacaaggccacagtaaccaaaacaacatggtactggtaccaacacagagctgtagaccaatggaacagaacagggccctcagaaataatgccgcatatctacaactatctgatctttgacaaacctgacaaaaacaagcaatggggaaaggattccctatttaataaatggtgctgggaaaactggctagccatatgtagaaagctgaaactgaatcccttccttacaccttatacaaaaattaattcaagatggattaaagacttacatgttagacctaaaaccataaaaaccttagaagaaaacctaggcaataccattcaggtcataggcatgggcaaggacttcatgtctaaaacaccaaaagcaatggcaacaaaagccaaaattgacaaatgggatctaattaaactaaagagcttcttctgcacagcaaaagaaactaccatcagagtgaacaggcaacctacagaatgggagaaaatttttgcaacctactcatctgacaaagggctaatatctagaatctacaatgaactcaaacaaatttacaagaaaaaaacaaacaaccccatcaaaaagtggacaaacgatatgaacagacacttctcaaaagaagacatttatgcagccaaaaaacacatgaaaaaatgctcatcattaccggccatcagagaaatgcaaatcaaaaccacaatgagataccatctcacaccagttagaatcgcgatcattaaaaagtcaggaaacaacagcaaagtggatgatatccatgctatctgtagccttcttaaagactttcttcgaaacttcaaagaacctcttctgacctttcgcctaaacaaagcctttatggaagcagcagaaatcacagatgaagacaacagcatatctgccatgtaccaggctgttggtgaactgccccaggccaacagggacacattggttttcctcatgattcacttgcagagagtggctcagagtccatatactaaaatgaatgttgccaatctggctgaagtctttggctctacaatagtggcccatgctgtgcccaatccagaaccagtgacgatgttacaggacatcaagtgtcaacccaaggtggtcgagcgcctgccttccttgcccctggagtactgga

SEQ ID NO: 128919 - DNA, 3166 bp, Homo sapiens
atggtaaagggatcaattcaacaagaggagctaactatcctaaatatttatgcacccaatacaggagcacccagattcataaagcaagtcctgagtgacctacaaagagacttagactcccacacattaataatgggagactttaacaccccactgtcaacattagacagatcaatgagacagaaagtcaacaaggatacccaggaattgaactcagctctgcaccaagcagacctaatagacatctccagaactctccaccccaaatcaacagaatatacatttttttcagcaccacaccacacctattccaaaattgaccacatagttggaagtaaagctctcctcagcaaatgtaaaagaacagaaattataacaaactatctctcagaccacagtgcaatcaaactagaactcaggattaagaatctcactcaaagccgctcaactacatggaaactgaacaacctgctcctgaatgactactgggtacataacgaaatgaaggcagaaataaagatgttctttgaaaccaacgagaacaaagacaccacataccagaatctctgggacgcattcaaagcagtgtgtagagagaagtttatagcactaaatgcctacaagagaaagcaggaaagatccaaaattgacaccctaacatcacaattaaaagaactagaaaagcaagagcaaacacattcaaaagctagcagaaggcaagaaataactaaaatcagagcagaactgaaggaaatagagacacaaaaaacccttcaaaaaatcaatgaatccaggagctggttttttgaaaggatcaacaaaattgatagaccgctagcaagactaataaagaaaaaaagagagaagaatcaaatagacacaataaaaaatgataaaggggatatcaccaccgatcccacagaaatacaaactaccatcagacaatactacaaacacctctatgcaaataaactagaaaatctagaagaaatggatacattcctcgacacatacactctcccaagactaaaccaggaagaagttgaatctctgaatagaccaataacaggctctgaaattgtggcaataatcaatagtttaccaaccaaaaagagtccaggaccagatggattcacagccgaattctaccagaggtacaaggaggaactgccgggcagagacacaaccaaaaaagagaattttagaccaatatccttgatgaacattgatgcaaaaatcctcaataaaatactggcaaaccgaatccagcagcacatcaaaaagcttatccaccatgatcaagtgggcttcatccctgggatgcaaggctggttcaatatacacaaatcaataaatgtaatccagcatataaacagagccaaagacaaaaaccacatgattatctcaatagatgcagaaaaagcctttgacaaaattcaacaacccttcatgctaaaaactctcaataaattaggtattgatgggacatatttcaaaataataagagctatctatgacaaacccacagccaatatcattctgaatgggcaaaaactggaaacattccctttgaaaactggcacaagacagggatgccctctctcacaactcctattcaacatagtgttggaagttctggccagggcaatcaggcaggagaaggaaataaagggtattcaattaggaaaagaggaagtcaaattgtccctgtttgcagacgacatgattgtttatctagaaaaccccatcgtctcagcccaaaatctccttaagctgataagcaacttcagcaaagtctcaggatacaaaatcaatgtacaaaaatcacaagcattcttatacaccaacaacagacaaacagagagccaaatcatgagtgaactcccattcacaattgcttcaaagagaataaaatacctaggaatccaacttacaagggatgtgaaggacctcttcaaggagaactacaaaccactgctcaaggaaataaaagaggacacaaacaaatggaagaacattccatgctcatgggtaggaagaatcaatatcgtgaaaatggccatactgcccaaggtaatttacagattcaatgccatccccatcaagctaccaatgactttcttcacagaattggaaaaaactactttaaagttcatatggaaccaaaaaagagcccacattgccaagtcaatcctaagccaaaagaacaaagctggaggcatcacactacctgacttcaaactatactacaagggctacagtaaccaaaacagcatggtactggtaccaaaacagagatatagatcaatggaacagaacagggccctcagaaataatgccacatatctacaactatctgatctttgacaaacctgagaaaaacaagcaatggggaaaagattccctatttaataaatggtgctgagaaaactggctagccatatgtacaaagctgaaacttgatcccttccttacaccttatacaaaaattaattcaagatggattaaagacttaaacgttagacctaaaaccataaaaaccctagaagaaaacctaggcattaccattcaggacataggcgtgggcaaggacttcatgtccaaaacaccaaaagcaatggcaacaaaagccaaaattgacaaatgggatctaattaaactaaagagcttctgcacagcaaaagaaactaccatcagagtgaacaggcaacctacaacatgggagaaaattttcgcaacctactcatctgacaaagggctaatatccagaatctacaatgaactcaaacaaatttacaagaaaaaaacaaacaaccccatcaaaaagtgggcaaaggacatgaacagacacttctcaaaagaagacatttatgcagccaaaaaacacatgaagaaatgctcatcatcactggccatcagagaaatgcaaatcaaaaccactatgagatatcatctcacaccagttagaatggcaattattaaaaagtcaggaaacaacaggtgttggagaggatgtggagaaataggaacacttttacactgttggtgtgataaactggatgaagaaaacatggcacatatacacaatggaatactatgcatccataaaaaagaatgagttcatgtcctttgcaggggcatagatgaagctggaaaccatcattct

SEQ ID NO: 128920 - DNA, 3915 bp, Homo sapiens
atgggaaaaaaacagaacagaaaaactggaaactctaaaaagcagagggcctctcctcctccaaaggaacacagctcctcaccagcaacggaacaaagctggatggagaatgactttgatgagctgagagaagaaggcttcagacgatcaaattactctgagctacgggaggacattcaaaccaaaggcaaagaagttgaaaactttgaaaaaaatttagaagaatgtataactagaataactgatatagagaagtgcttaaaggagctgatggagctgaaaaccaaggctcgagaactacatgaagaatgcagaagcctcaggagccgatgtgatcaactggaagaaagggtatcagcaatggaagatgaaatgaatgaaatgaaaaacacacataggctcaaaataaaaggagcaccaagattcataaagcaagtcctgagtgacctacaaagagacttagactcccacacattaataatgggagactttaacaccccactgtcaacattagacagatcaacaagacaaaaaatcaacaaggatacccaggaattgaactcagctctgcaccaagcagacctaatagacatctacagaactctccactccaaatcaacagaatatacatttttttcagcaccacaccacacctattccaaaattgaccacatacttggaagtaaagctctcctcagcaaatgtaaaagaacagaaattataacaaactatctctcagaccacagtgcaatcaaactagaactcaggattaagaatctcactcaaaaccgctcaactacatggaaactgaacaacctgctcctgaatgactactgggtacataacgaaatgaaggcagaaataaagatgttctttgaaaccaacgagaacaaagacacaacataccagaatatctgggacgcattcaaagcagtgtgtagagggaaatttatagcactaaatgcccacaagagaaaacaggaaagatccaaaattgacaccctaacatcacaattaaaagaactagaaaagcaagagcaaacacattcaaaagctagcagaaggcaagaaataactaaaatcagagcagaactgaaggaaatagagacacaaaaaacccttcaaaaaattaatgaatccaggagctggttttttgaagggatcaacaaaattgatagaccgctagcaagaataataaagaaaaaaagagagaagaatcaaatagacgcaataaaaaatgataaaggggatatcaccaccgatcccacagaaatacaaactaccatcagggaatactacaaacacctctacgcaaataaactagaaaatctagaagaaatggataaattcctcgacacatacaccctcccaagactaaaccaggaagaagttgaatctctgaatacaccaataacaggctctgaaattgtggcaataatcaatagcttaccaaccaaaagagtccaggaccagatggattcacagccgaattctaccagagaaaaagagggaatcctctctaactcattttatgaggccagcatcattctgataccaaagccaggcagagacacaacaaaaaaagagaattttagaccaatatccttgatgaacattgatgcaaaaatcctcagtaaaatactggcaaaacgaatccagcagcacatcaaaaagcttatccaccatgatcaagtgggcttcatccctgggatgcaaggctgggtcaatatacacaaatcaataaatgtaatccagcatataaacagagccaaagacaaaaaccacatgattatctcaacagatgcagaaaaagcctttgacataattcaacaacccttcatgctaaaaactctcaataagttaggtattgatgggatgtatttcaaaataataagagctatctatgacaaacccacagctaatatcatactgaatgggcaaaaactggaagcattccctttgaaaactggcacaagacagggatgccctctctcaccactcctattcaacatagtgttggaagttctggccagggcaattaggcaggagaaggaaataaagggtattcaattaggaaaagaggaagtcaaattgtccctgtttgcagatgacatgactgtatatctagaaaaccccattgtctcagcccaaaatctccttaagctgataagcaacttcagcaaagtctcaggatacaaaatcaatgtgcaaaaatcacaaggattcttatacaccaacaacagacaaacagagagccaaatcatgagtgaactcccattcacaattgcttcaaagagaataaaatacctaggaatccaacttacaagggatgtgaaggacctcttcaaggagaactacaaaccactgctcaaggaaataaaagaggatacaaagaaatggaagaacattccatgctcatgggtaggaagaatcaatatcgtgaaaatggccatactgcccaaggtaatttacagtttcaatgccatccccatcaagctaccaatgcctttcttcacagaattggaaaaaactactttaaagttcatatggaaccaaaaaagagcccgcatcaccaagtcaatcctaagccaaaagaacaaagctggaggcatcacactacctgacttcaaactatactacaaggctacagtaaccaaaacagcatggtactggtaccaaaacagagatatagatcaatggaacagaacagagccctcagaaataacgccgcatatctacaactatctgatctttgacaaacctgagaaaaacaagcaatggggaaaggattccctatttaataaatggtgctgggaaaactggctagctatatgtagaaagctgaaactggatcccttccttacaccttatacaaaaatcaattcaagatggattaaagacttaaacgttagacctaaaaccataaaaaccctagaagaaaacctaggcaataccattcaggacataggcatgggcaaggacttcatgtctaaaacaccaaaagcaatggcaacaaaagccaaaattgacaaatgggatctaattaaactaaagagcttctgcacagcaaaagaaactaccatcagagtgaacaggcaacctacaaaatgggagaaaatttttgcaacctactcatctgacaaagggctaatatccagaatctacaatgaactcaaacaaatttacaagaaaaaaacaaacaaccccatcaaaaagtgggtgaaggacatgaacagacacttctcaaaagaagacatttatgcagccaaaaaacacatgaaaaaatgctcatcatcactggccatcagagaaatgcaaatcaaaaccacaatgagataccatctcacaccagttagagtggcaatcattaaaaagtcaggaaacaacaggtgctggagaggatgtggagaaataggaacacttttacactgttggtgggactgtaaactagttcaaccattgtggaagtcagtgtggcgattcctcagggatctagaactagaaataccatttgacccagccatcccattactgggtatatacccgaatgactataaatcatgctgctataaagacacatgcacacctgggcaccctagaaagcagcccaccctgggttctataccccagaagtcacaggatcattgcgctgaagtgctaaaggacatcctgtttctagcagggactggaggagcccaggctcttctggccagtttctccttatctcaggatgttgaattcccagcaccttctgcagttattcttgagaactacaagcaaaagactgaaatgagcaccacctactggcagagcctaacagggccagccggcaaacaagaaaactgttcacagtcccagccccaagatcccaagtatacagtatggatgtgggggtttagatccaagaaacaatag

SEQ ID NO: 128921 - DNA, 2832 bp, Homo sapiens
atgggagactttaacaccccactgtcaacattagacagatcaacgagacagaaagtcaacaaggatacccaggaattgaactcagctctgcaccaagcggacctaatacacatctacagaactctccaccccaaatcaacagaatatacatttttttcagcaccacaccacacctattccaaaattgaccacatagttggaagtaaagctctcctcagcaaatgtaaaagaacagaaattataacaaactatctctcagaccacagtgcaatcaaactagaactcaggattaagaatctcactcaaagccgctcaactacatggaaactgaacaacctgctcctgaatgactactgggtacataacgaaatgaaggcagaaataaagatgttctttgaaaccaatgagaacaaagacacaacataccagaatctctgggacgcattcaaagcagtgtgtagagggaaatttatagcactaaatgcccacaagagaaagcaggaaagatccaaaattgacaccctaacatcacaattaaaagaactagaaaagcaagagcaaacacattcaaaagctagcagaaggcaagaaataatgaaaatcagagcagaactgaaggaaatagagacacagaaaacccttcaaaaaatcaatgaatccaggagctggttttttgaaaggatcatcaaaattgatagaccgctagcaagactaataaagaaaaaaagagaggagaatcaaatagacacaataaaaaatgataaaggggatatcaccaccgatcccacagaaatacaaactaccatcagagaatactacaaacacctctacgcaaataaactagaaaatctagaagaaatggataaattcctcgacacgtacactctcccaagactaaaccaggaagaagttgaatctctgaatagaccaataacaggagctgaaattgtggcaataatcaatagtttaccaaccaaaaagagtccaggaccagatggattcacagccgaattctaccagagatacaaggaggaactgcatataaacagagccaaagacaaaaaccacatgattatctcaatagatgcagaaaaagcctttgacaaaattcaacaacccttcatgctaaaaactctcaataaattaggtattgatgggacgtatttcaaaataataagagctatctatgacaaacccacagccaatatcatactgaatgggcaaaaactggaagcattccctttgaaaactggcacaagacagggatgccctctctcaccgctcctattcaacatagtgttggaagttctggccagggcgatcaggcaggagaaggaaataaagggtattcaattaggaaaagaggaagtcaaattgtccctgtttgcagacgacatgattgtttatctagaaaaccccattgtctcagcccaaaatctccttaagctgataagcaacttcagcaaagtctcaggatacaaaatcaatttacaaaaatcacaagcattcttatacgccaacaacagacaaacagagagccaaatcatgagtgaactcccattcacaattgcttcaaagagaataaaatacctaggaatccaacttacaagggatgtgaaggacctcttcaaggagaactacaaaccactgctcaaggaaataaaagaggatacaaacaaatggaagaacattccatgctcgtgggtaggaagaatcaatatcgtgaaaatggccatactgcccaaggtaatttacagattcaatgccatccccatcaagctaccaatgcctttcttcacagaattggaaaaaactactttaaagttcatatggaaccaaaaaagagcccgcatcgccaagtcaatcctaagccaaaaggacaaagctggaagcatcacactacctgacttcaaactatactacaaggctacagtaacccaaacagcatggtactggtaccaaaacagagatatagatcaatggaacagaacagagccctcagaaataacgctgcatacctacaactatctgatctttgacaaacctgagaaaaacaagcaatggggaaaggattccctatttaataaatggtgctgggaaaactggctagccatatgtagaaagctgaaactggatcccttccttacaccttatacaaaaatcaattcaagatggattaaagatttaaacgttagacctaaaaccataaaaaccctagaagaaaacctaggcattaccattcaggacataggcgtgggcaaggacttcatgtccaaaacaccaaaagcaatggcaacagaagccaaaattgacaaatgggatctaattaaactaaagagcttctgcacagcaaaagaaactaccatcagagtgaacaggcaacctacaacatgggagaaaattttcgcaacctactcatctgacaaagggctaatatccagaatctacaatgaactcaaacaaatttacaagaaaaaaacaaacaaccccatcaaaaagtgggcgaaggacatgaacagacacttctcaaaagaagacatttatgcagccaaaaaatacatgaaaaaatgctcatcatcactggccatcagagaaatgcaaatcaaaaccactatgagataccatctcacaccagttagaatggcaatcattaaaaagtcaggaaacagcagagtatactccttccacttaaatataaaagttaactgtaagacagcctcaggaggtgttccaaaaggcattgttaatataggagatgacagttccatgcatgttattgcccctgaagaccttctagtgggacaggctgtggagatggaagacagatactag

SEQ ID NO: 128922 - DNA, 3531 bp, Homo sapiens
tcactgtggttttgatttgcatttctctgatggccagtgatgatgagcatttttcatgtgatttttggctgcataaatgtcttcttttgagaagtgtctgttcatgtccttcacccactttttgttggggttgtttgtttttttcttgtaaatttgtttgagttcattgtagattctggatattagccctttgtcagatgagtaggttgtgaaaattttctcccattttgtaggttgcctgttcactctgatggtagtttcttttgctgtgcagaagctctttagtttaattagatcccatttgtcaattttggcttttgttgccattgcttttggtgttttagacatgaagtccttgcccatgcctatgtcctgaatggtaatgcctaggttttcttctagggtttttatggttttaggtctaacgtttaagtctttaatccatcttgaatttgattttttgtataaggtgtaaggaagggatccagtttcagctttctacatatggctatccagttttcccagcaccatttattaaatagggaatcctttccccattgcttgtttttctcaggtttgtcaaagatcagatagttgtagatatgcggcgttatttctgagggctctgttctgttccattgatctatatccctgttttggtaccagtaccatgctgttttggttactgtagccttgtagtatagtttgaagtcaggtagtgtgatgcctccagctttgttcttttggcttagaattgacttggcaatgcaggctcttttttggttccatatgaactttaaagtagttttttccaattctgagaggtgacaggttctaactgcattttccaccagcttccggaacactaggaggaccttggcaggcacaatgtctccgtcgatgttcacatctgtctcatgccactgccacaggctcttcataaactgttccacctccagccactgctgcagaccctcagggtcccgcaacgggcagggcagcctggtgccctgcagtgtgtagtaccgccagtgctgctccctggcctccctgtacccggccaggccttttattgggactgtgacgaggaactgactgggagccaaaacctcctgaacatggtggcagctggcaccagggaactccatagtcagaacactttttgtctgtattcctgcaagctctaggtctgacacagatgtcataagacaagtaagaccatcacattcccactgagcattgttcgaagtgccggagatataatacaacagtgaataagacaagccctctcccggcatagagtttatatttattctaataggagaaccagcaaaccataatgtgccaggctgtgtcctcagctctaaagatacaaccctgaaaatgcagataaagccccttctcgtggagccttcaccttgggggtcaggttgacccttgttttgttggaactgcttgtgaagcatcaggtggtggcatttcataggaaccgcctgcagtgcacaggaaggccggactggagctctacatgtgagcatatttggaatgtggatagtactggaaaccacaggagtggctaaaattgctaggctgagtgagtagagtcgcggggcagggctcaggacctgcagcccgccatgcccgagcctctccgcctcccccctgtgggctcctgggcagccgggagcctccccagtgggagctgtcccctgctctgtggtgcccagtcccatcgaccgcccaggggctgagcagtgcaggcctgcccgcaaagccagcaaggctcctgagtcgggaggagacttggagaacttttatgtctggctggaggattgtatatgcaccaatcagcactctgtgtctagctctgggttcatgtatgcaccaatcagcactctgtgtctagctaatctggtggggacttggagaacttttgtgtctaactcagggattgtaaacgcattaatcagcaccccgtcaaaacggaccaatcagctttctgtaaaatggaccaatcagcaggatgtggtgttggaagttctggccagggcaattaggcaggagaaggaaataaagggtattcaattaggaaaagaggaagtcaaattgtccctgtttgcagacgacatgattgtatatctagaaaaccccattgtctcagcccaaaatctccttaagctgataagcaacttcagcaaagtctcaggatacaaaatcaatgcacaaaaatcacaagcattcttatacaccaacaacagacaaacagagagccaaatcatgagtgaactcccattcacaattgcttcaaagagaataaaatacctaggaatccaacttacaagggatgtgaaggacctcttcaaggagaactacaaaccactgctcaaggaaataacagaggatacaaacaaatggaagaacattccatgctcatgggtaggaagaatcaatatcgtgaaaatggccatactgcccaaggtaatttacagattcaatgctatccccatcaagctaccaatgactttcttcacagaattggaaaaaactactttaaagttcatatggaaccaaaaaagagcccgcatggccaagtcaatcctaagccaaaagaacaaagctggaggcatcacactacctgacttcaaactatactacaaggctacagtaaccaaaacagcatggtactggtaccaaaacagagatgtagatcaatggaacagaacagagccctcagaaataacgccgcatatctacaactatctgatctttgacaaacctgacaaaaacaagcaatggggaaaggattccctatttaataaatggggctgggaaaactggctagccatatgtagaaagctgaaactggatcccttccttacaccttatacaagaattaattcaagatggattaaagatttaaacgttagacctaaaaccataaaaaccctagaagaaaacctagacattaccattcaggacataggcatgggcaaggacttcatgtctaaaacaccaaaagcaatggcaacaaaagccaaaattgacaaatgggatctaattaaactaaagagcttctgcatagcaaaagaaactaccatcagagtgaacaggcaacctacaaaatgggagaaaatttttgcaacctactcacctgacaaagggctaatatccagaatctacaatgaactcaaacaaatttacaagaaaaaaacaaacaaccccatcaaaaagtgggcgaaagacatgaacagacacttctcaaaagaagacatttatgcagccaaaaaacacatgaaaagatgctcatcatcactggccatcagagaaatacaaatcaaaaccacaatgagataccatctcacaccagttagaatggcaatcattaaaaagtcaggaaacaacagttttctgatggcagaagcctggcccatctggttaagctctccgttcctggaaggaggacatagcagggacttcatacgtggggatgaatcaatgtcaaatgaggaaaaatacaaagaccttaattag

SEQ ID NO: 128923 - DNA, 4167 bp, Homo sapiens
atgacaggatcaaattcacacataacaatattaactttaaatataaatggactaaattctgcaattaaaagacacagacgggcaagttggataaagagtcaagacccatcagtgtgctgtattcaggaaacccatctcacgtgcagagacacacataggctcaaaataaaaggatggaggaagatctaccaagcaaatggaaaacaaaaaaaggcaggggttgcaatcctagtctctgataaaacagactttaaaccaacaaagatcaaaagagacaaagaaggccattacataatggtaaagggatcaattcaacaagaggagctaactatcctaaatatttatgcacccaatacaggagcacccagattcataaagcaagtcctgagtgacctacaaagagacttagactcccacacattaataatgggagactttaacaccccactgtcaacattagacagatcaacgagacagaaagtcaacaaggatacccaggaattgaactcagctctgcaccaagcggacctaatagacatctacagaactctccaccccaaatcaacagaatatacattttttttagcaccacaccacacctattccaaaattgaccacatagttggaagtaaagctctcctcagcaaatgtaaaagaacagaaattataacaaactatctctcagaccacagtgcaatcaaactagaactcaggattaagaatctcactcaaagccgctcaactacatggaaactgaacaacctgctcctgaatgactactgggtacataatgaaatgaaggcagaaataaagatgttctttgaaaccaacgagaacaaagacaccacataccagaatctctgggacgcattcaaagcagtgtgtagagggaaatttatagcactaaatgcctacaagagaaagcaggaaaagatccaaaattgacactctaacatcacaattaaaagaactagaaaagcaagagcaaacacattcaaaagctagcagaaggcaagaaataactaaaatcagagcagaactgaaggaaatagagacacaaaaaacccttcaaaatatcaatgaatccaggagctggttttttgaaaggatcaacaaaattgatagaccgctagcaagactaataaagaaaaaaagagagaagaatcaaatagacacaataaaaaatgataaaggggatatccaccaccgatctcacagaaatacaaactaccatcagggaatactacaaacacctctacgcaaataaactagaaaatctagaagaaatggataaattcctcgacacatacactctcccaagactaaaccaggaagaagttgaatctctgaatagaccgataacaggagctgaaattgtggcaataatcaatagcttaccaaccaaaaggagtgcaggaccagatggattcacagctgaattctaccagaggtacaaggaggaactggtaccattccttctgaaactattccaatcaatagaaaaagagggaatcctccctaactcattttgtgaggccagcatcattctgataccaaagccaggcagagacacaacaaaaaaagagaattttagaccaatatccttgatgaacattgatgcaaaaatcctcaataaaatactggcaaaacgaatccagcagcacatcaaaaagcttatccaccatgatcaagtgggcttcatccctgggatgcaaggctggttcaatatacgcaaatcaataaatgtaatccagcatatcaacagagccaaagacaaaaaccacatgattatctcaatagatgcagaaaaggcctttgacaaaattcaacaacacttcatgctaaaaactctcaatagattaggtattgatgggacgtatttcaaaataataagagctatctatgacaaacccacagccaatatcatactgaatgggcaaaaactggaagcattccctttgaaaactggcacaagacaaggatgccctctctcaccactcctattcaacatatgcaaatcaaaaaaactgttggaagccagggcaattaggcaggagaaggaaataaagggtattcaattaggaaaagaggaagtcaaattgtccctgtttgcagatgacatgattgtatatctagaaaaccccatcgtctcagcccaaaatgtccttaagctgataagcaacttcagcaaagtctcaggatacaaaatcaatgtacaaaaatcacaagcattcttatacaccaataacacagacaaacaagagagccaaatcatgagtgaactcccattcacaactgcttcaaagagaataaaatacctaggaatccaacttacaagggatgtgaaggacctcttcaaggagaactacaaaccactgctcaatgaaataaaagaggatacaaacaaatggaagaacattttcattccatgcttatgggtaggaagaatcagttatcatgaaaatggccatattgcccaaggtaatttacagattcaatgccatccccatcaagctaccaatgactttcttcacagaactggaaaaaactactttaaagttcatatggaaccaaaaaagagcccgcatcaccaaggcaatcctaagccaaaagcacaaagctggaggcatcacactacctgactgcaaactatactacaaggctacagtaaccaaaacagcatggtactgggtacccaaaacagaggatatagatcaattggaacaggatcaaagccctcaagaaataaggcccacatatatctacaactatctaatctttgacaaaccctgggaaaaaccaagcaatgggggaaaggattcccttatttaataaatggtgctgggaaaaactggcttagccatatgtagaaagctgaaacttggatccccttcccttacaccttatacaaaagttaattcaagatggattaaagacttaaaatgttagacctaaaaaccataaaaaaccctagaaggaaaacctaggcaatacccatttcaggacataggcatgggcaaggacttcatggctaaaacacccgaaagcaatggccaacaaaagacaaaattgacaaatgggatcttaactaaaactcaagagcttcctgcacagcaaaagagaaactaccatcagagtgaacaggccaacctacaaaaatgggagaaaaaatttttgcaatctacatcatctgacaaaagggctaatatccagaatctacaaagaactcaaacaaaaatttaccagaaaaaaacaaacaaccccatcgaaaagtgggcaaaggatatgaacagacacttctcaaaagaagacatttatgcagccaaaagacaaaatgaaaaaaatgctcaaccatcactggccatcagagtaatgcaaatcaaaaccacaatgagataccatctcacaccagttagaatggcaatcatgaaaaaagtcaggaaacaacaggtgctggagaggatgtggagaaataggaacacttttacactgttggtgggagtgtaaactagttcaaccattgtggaagtcagtgtggcgattcctcagggatctagaactagaaataccatttgacccagccatcccattactgggtatatacccaaatgactataaatcatgctgctataaagacacatgcacacgtatgtttattgcggcattattcacaatagcaaagacttggaaccaacccaaatgtccaacaatgatagactggattaagaaaatgtggcacatatacaccatggaatactatgcaagccataaaaaaatgatgagtttatgtcctctgtcgggacgtggatgaagctggaaaccatcattctcagcaaactatcgcaaggacaaaaaaccaaacagtgcatgttctcactcataggtgggaattgaacaatgagaacacatggacacaggaaggggaatgtcacacaccagggcctgttgtggggtggagggaggcggggagggatagcattaggagagatacctaatattaaatgatgagttcatgggtgtagcacaccagcatggcacatgtatacatatgtaacaaacctgcacgttgtgcacatgtaccctaaaacttaaaagtataatataaaaaataaattcttacttgaattgtgcaatttgtagaactttaataaaaaaatgatacatctt

SEQ ID NO: 128924 - DNA, 1161 bp, Homo sapiens
ctaaatgttattaggaggggacaaatcccgcaggtagctgccaccttgcccacaatggcagttgttcagaaagccaggctcctgctgcgaggggccacgccaccctgggagggaaatgaccaaggtcaatgttggggatgcagcatctgcagtgaagcatttgcccattctcctcctgtggtcattgttacattccactgaccagctgcctgcaggctccaggcacagccgccattcatcagagattaatgcctgaaatgagccacacctctgaacaattgcttccatttgctgattctcctcccctccatgaacaacttctagcttccttttgatggcagcagtgggctgtccagagcaaccactgcactgactgcagtggggaggtgtgagaggtggtgacaggagcagctgtgggaacagcaatggtggcggtgggccccctgtgccccatgtccctgaggcagctgactgtgcagcccccaccctggcacagcagccaggtgggacctgcccccagggccttagccttcgtaactccagacctggctccgagttgctgctctcatctgccaccacctcaggggtgtctgctcctgctgcctggcctctcccagctcccagcacctgctctgatcttggagcggggttggagtccagcatgggcactgtcacagcccagccaggtacgcgcacacttggggcagtactggcacaccagacacaccagccccctgctgcctcagcctcctctagacattgggcaggcaatatagttatttgcaccagtgcaataagaatccattttcttttgcaacaatattcaattggagaaactggttgttctgccaaggctttgactggaatgatgtactttcctgctggagggggagaggatgtcctcaggagagacagaggacagacttcgcagaggggctggtgaagggcagctgtgtcagcctctggtggctccggtagaaccctcgtagtttttgatgcaccagcacggttatcatgtccatctgcaccaagctgcagaacaaggagcatgtgattgaggccctgcgcagggccaagttcaagttccctggccaccccaaagatccacatctcaaagaagtgagacttcaccaagttcaatgcagatgaatttgaagacat

SEQ ID NO: 128925 - DNA, 1461 bp, Homo sapiens
atgacttgtggatcttactgtggtggccgcgccttcagctgcatctcggcctgcgggccgcgccccggccgctgctgcatcaccgccgccccctaccgtggcatctcctgctaccgcggcctcaccgggggcttcggcagccacagcgtgtgcggaggctttcgggccggctcctgcggacgcagcttcggctaccgctccgggggcgtgtgcgggcccagtcccccatgcatcaccaccgtgtcggtcaacgagagcctcctcacgcccctcaacctggagatcgaccccaacgcgcagtgcgtgaagcaggaggagaaggagcagatcaagtccctcaacagcaggttcgcggccttcatcgacaaggtgcgcttcctggagcagcagaacaaactgctggagacaaagctgcagttctaccagaaccgcgagtgttgccagagcaacctggagcccctgtttgagggctacatcgagactctgcggcgggaggccgagtgcgtggaggccgacagcgggaggctggcctcagagcttaaccacgtgcaggaggtgctggagggctacaagaagaagtatgaggaggaggtttctctgagagcaacagctgagaacgagtttgtggctctgaagaaggatgtggactgcgcctacctccgcaaatcagacctggaggccaatgtggaggccctgatccaggagatcgacttcctgaggcggctgtatgaggaggagatccgcgttctccagtcccacatctcagacacctccgtggttgtcaagctggacaacagccgggacctgaacatggactgcatcattgccgagatcaaggcacagtacgatgacattgtcacccgtagccgggctgaggccgagtcctggtaccgcagcaagtgtgaggagatgaaggccacggtgatcaggcacggggagaccctgcgccgcaccaaggaggagatcaacgagctgaaccgcatgatccagaggctgacggctgaggtggagaatgccaagtgccagaattccaagctggaggctgcggtggctcagtctgagcagcagggtgaggcggccctcagcgatgcccgctgcaagttggccgagctggagggtgccctgcagaaggccaagcaggacatggcctgcctgatcagggagtaccaggaggtgatgaactccaagctgggcctggacatcgagatcgccacctacaggcgcctgctggagggcgaggagcagaggctgtgcgaaggcgtcggctcggtgaatgtctgtgtcagcagctcccgcggtggcgttgtctgtggcgatctctgcgcctccactactgcccctgttgtctccaccagagtcagtagcgtccccagcaacagcaacgtggtggtgggcactactaacgcctgcgccccctccgcccgggttggcgtctgcggcggcagctgtaagaggtgctaa

SEQ ID NO: 128926 - DNA, 1953 bp, Homo sapiens
gttccatcctctgccatctactccactgttcagacacctcctaacctccgtcatgacctgtggcttcaactccataggctgtgggttccgccctggaaacttcagctgtgtctctgcctgcgggccccggccaagccgctgctgcatcaccgccgccccctaccgcggcatctcctgctaccgcggcctcaccgggggctttggcagccacagcgtgtgcgggggcttccgcgccggctcctgcggacgcgacttcggctaccgctccgggggcgtgtgcggacccagccccccatgcatcaccaccgtgtcggtcaacgagagcctcctcacgcccctcaacctggagatagaccccaacgcgcagtgcgtgaagcaggaggagaaggagcagatcaagtccctcaacagcagattcgcggccttcatcgacaaggtgcgcttcctggagcagcagaacaagctgctggagacaaagctgcagttctaccaaaactgcgagtgctgccagagtaacctggagcccctgtttgctggctacatcgagactctgcggcgggaggccgagtgcgtggaggctgacagtgggaggctggcctcagagctcaaccacgtgcaggaggtgctggagggctacaagaagaagtatgaagaagaagtagcacttcgagccacagcagagaacgagtttgtggctctaaagaaggatgtggactgtgcctacctccgcaagtcagacctggaggccaacgtggaggccctgatccaggagattgacttcctgaggcggctgtacgaggaggagatccgcattctccaatcccacatctcagacacctccgtggttgtcaagctggacaacagccgggacctgaacatggactgcatggttgctgagatcaaggcacagtatgatgacattgccacccgtagccgggctgaggccgagtcctggtatcgcagcaagtgtgaggagatgaaggccacagtgatcaggcacggggagaccctgcgccgcaccaaggaggagatcaatgagctgaaccgcatgatccagaggctgacggccgacggtggagaatgccaagtgccagaactccaagctggaggccgcggtggctcagtctgagcaagcagggtgaggcagccctcagtgattgcccgcttgcaaacttggcccgagcttggaggggcgcccttgcagaagggcaaagccaggacattggccttgccttgattcagggagtaccaggaggtgatgaactccaagctaggcctggatatcgagatcgccacctacaggcgcctgctggagggcgaggagcagaggctgtgtgaaggtgttgaagctgtgaatgtctgtgtcagcagctcccggggtggggttgtgtgcggggatctctgcgtgtcgggctcccggccggtgacgggcagcgtctgcagtgccccctgcaacgggaacctggtggtgagcactggtttgtgcaagccctgtggccagctgaacagccacctgtggagggggctcctgcggcgtgggctcctgtggtatcagctcccctggggtgtggggggtccttgcggcagcagctgccggaaatgttaggcaccccaaactcaagtcccaggccccaaggcaatctttcctgccctgccttgcttggcccatccagtccaggcgccttggagcaagtgctcagctacttctcctgcactttgaaagacccctcccactcctggcctcacatttctctgtgtgatcccccactacctggctctgccaccccaccgtgggaaaggccaccctagaaagaagtccgctggcacccataggaaggggcctcaggagcaggaaggaccaggaccagaacattacacaaggcaactgccttcctgcctctccccttcctcctcttgctctttgatctgtgtttcaataaattaatgtagcca

SEQ ID NO: 128927 - DNA, 2787 bp, Homo sapiens
ctaataagccttgacagtagcgagatcaatgcctccacaaatcttaggtttttcttgttctgtataaagctcattctgaagccatctcggtggctgcacgttagtacatggattccagaggagagagaacacagcaggtttcctggaggctgaaaggagtatatggcttaccgcttccatcaggcccttcactgtgggagacttcaacatcaatgcatcgaacacatcgtcagtctccttcctcacgtacaagagcactcgctttgtcccttcttctttcatctgctttgaaggcactggaccaaactcctcttccatgggccggaacatccgtttaacaaggacactgccaccttctcgttcatcatccgtgttgtaatacacctgtccggtcctctgcaggtttgcaaagtgaacatcaggtatgaagagaactggctgtgagtggagatcaggcatggttttgaagtaggtgatgtcactcttcttctgtaaaggtatggcagccaacttcccatcagaggagctgttgcattgagtttgggaggcctggcctttccctttcttcctgttctgcttccgctcttcatctcggatttttctttctgctcccttgatgttaatagctgctgactgatcagggtgagggttgctgaaggttggggtggctgtaacaattttttgcccagaaccatcagtggaatccctatctacaccagcaacagccttacaaaacatatttcttaaataaaaagactggaaaatcagaattattcctcgatccatgggtttgtcacagaagaccttgatctggcaataagctctatgaatgggtttattgctacgattgttataactgtatgtgtcaatctgaatcatcaaaggaagtcctttcacccctttttgggaggagaaatctgtgctcaagcaattcacggtgatgaaaatccagccttccccctgctcgcagacaataaagcatcgaccaagagcagtgtacattgaccttttcattagtttgaagacaaactcttctaacaccctcctagatggtccagaaccaaagcaaaaaacaagcttaggtttcatctggcaccttcccatgagtgcaaaataagaatcaaggatcagaagcttcgcctcttcattcacgtcccaggtaaaggaaacagcattatatgcaatctcttcaatgtttccaatcgtattaaagctctccttgtaatcggcctttgtgttcagtctccacaggtggtacaatagctctgctcccacttcacgactctcaaagtcttccaagggactaaacagctgatgcacaccaatgtggcttcttccacatgcatagttgtccgacaaataaaatggtaacagatgtgcctctggtttctgaaagctgggtgaatgtctgtcactgtcacctaaacgcacaaaaccacacatggcagtgtgctcatcgattatgcaacatcggttgagcatctgttctctgccaggttctgtaccagcaatgtcaaggaccctctgcttcgccgtatgctgccgagagtgccagtatttccagtatttgagctgttcatctctgtttttgtcttcactgaagaccaccatcaccacactcctgactttgctgatggggtgtcggaagcatttgttgtctccggtctcgctgagtgttatggcatagaactgtcctttgttgaggtaggtcatggggccctccccctgcttctgacggagagatttggtggcttccagggtgtactgaaatgtgccacttgatgtctgatcatacatgtactcctcagccccaactgaagcactccgaaatttcctggccacggcatgacgtttgtccacaataattgcaaggtgttcagattttgcaaatctaaatgtcataaaaactttaaaaagaagcacaatcctccaaagctctgtggctgcgtccttgaagctctcgctgtatgtgctgtccggagtgctgcgctggtcgtctttgagataggcgctgtgggtggccagcgagggcacgtcatactgagtctgttcaaagataaccactcgttgctcttccccatctccccggggatagtgcacaggtggggccatgaaaactggtgtgaaatcttcagctttcaccaccgtgattcccgacaccgggatgatggcagagctctcggggaagctgatgctgtactgttcccgcttggaattctccaggtgatcttgatttagggaaaggttcactggaacagtctttaggacttgcactcggttttctcctccactcaaattactctgggcttcactggtgccaaggcagtttcttttctcctggtcttcttggctgtcacttgctttgcttacagacagcagcctcttgtctcgaggaacccaaatctcatcttgaattgtactcccataattcccatgtgttgtgggagggacactgtggcagataatttgaattgtgggagcagtttcccccatactgttctcgtgatagcgaataagtctcacaagatctgatggttttatcaggggtttccacttttgcatcttcttcattttctgtttccacttgtagtagtcatagagcaggccgagggcagcagcactgtcctcatcaccattaatgctcatcatggccttggtggctgctgtcaggggattctccaagtatgacttccaggcttcatcctcactggtgtaggctcttcgggtattgaatggagggtcactgggcatgggcactaaggccactagtcttttattaccttccat

SEQ ID NO: 128928 - DNA, 1615 bp, Homo sapiens
ttgtggataagagtgttaaaaattcaattacgcaacagaccaaactttgtgcttctttcccccctctcagcacaaagtaactttaatcccgtcctcttctgccactgtcaaacagccctgttactgtgggcattaaaatccttgtggcgtactgcgcatttgattctggttgacttgggatacctgagctcggctctcattagctcttccgctcgacccacaatccctagtgtttgcaggtgttgcattcccccaacccctttcttctcttcaaccagtagcctccaccttcccatccctgctttggagaaggaggaaaacgcagcttgagatctactcgaagaactgaccctcagctctcacaggctgccgccgagctgcaagcatgccgccgctccactcaggtaaacttcggagtgagttacctgcacttggagaagggccttacctgagcgcgcctctgccaatggcagctcacctgagggagctccccagccaatcatcgcgcagctcgtccctcgggcttgtaccctttagtgaaagaattcagctccttgcgagaaagttacctgtggccgcccaagtccgccactttctgctctgtgtctgcccattgccacgatccaggaggactccgcgccgcccggccgcctccgagctcgggccccatgtgaggggcccccccttatcccacctttccggctaggtgagggcgcgagcgggcgagcgagcgagagtggtgagggagaacggaaaagcagaattacctgtagctcttgttctgccatctcgggcgctctcacacaccttcacctgcacagacttgaaagtccagtttcaccagaggctgaggctccaggaaaaggggagcaagttcattggatcaaacatgtcacaagagtcggacaataataaaagactagtggccttagtgcccatgcccagtgaccctccattcaatacccgaagagcctacaccagtgaggatgaagcctggaagtcatacttggagaatcccctgacagcagccaccaaggccatgatgagcattaatggtgatgaggacagtgctgctgccctcggcctgctctatgactactacaagagaatcaatcagagcctattcccagggagggtgtggggtggggttgaggggaggaaaggagagagaatgacagaagaggaacaggaaggagaaggaggaggaggaggaaggggaggaggagaaggagaagaagaagaggaagaagaagaagacgtagaagaagaagaggaggaagaagaagaagaagaaaaagaagaggaggagaagggaggagaaaaagaggaagagaatgaggaaaaggagaagcagagagaggggagaagaggaaaggagacaagcaatggccagatggtgagaccaagactgctgccaccacatcaggaacattccagaaactacttggtgttcatcatggactccaatatgatagaaatttgctttagagaagcctcaatttcacctaaagctcaggcttatgtccttatccctgactttaaaaactgtatttacggatgggaagaagatagcatcgaaatcctgtggggcctgcctgggtcacatgtgctatga

SEQ ID NO: 128929 - DNA, 365 bp, Homo sapiens
tccagcgttcgaaatcctgcaaggtcccaggactgggaaagcccctcacgttacctcccaagccagagaaatcctcagggtcagaaggatcgtcgcccaactggcttcaagccctgaaactgaagaagaagaaggtctgagaagtcactgaggttcttcccacctggcagtctcaggcagtgcccattcctgtggggttttcttttgataccaatttatagcattttttataaaagcctttgatttttataatgggtgggactgtatccctgcctcaccccaggtctccgtctgccccgccaggtaccccacagagaccaatgacattttgccacttgaaacaataaataaagttttttgggaaa

SEQ ID NO: 128930 - DNA, 4339 bp, Homo sapiens
ggactgaaactgctgggctgtgggtctcctgtgatcccaaattcactctgcagatctttctgggaccagccaaggagtccctcagagcaggtacttggggactgtgtgtccttcagctcagctccagctccccgccttgcaccgccaccactgggtggtggtgaagccaggaggtcgtccagccagcgggagctgctttcagggcctggaggctcgggggatgccctacacaagtcttgagcctctgtcctggcttgggtggtctcagcccgggctagggtcacggcctcctcctcaacaggcagtgcctgtccaggctcaggggcatcagcaaagagaacacagggctggtcaggggctgctggctgctcctgccccaggactggctccaggatgggcaaggctgcctccctggtagccagggggagaggggactcctgtccagccaagggctcctgcgactcgtatctctcctctgcctgctgcaaaggtaatccaggtgtgccctcagttgtaggcaggggctcaaggggaacagctgggaattgaggttgactctccccatcgcccttctgggtgagggacatgcttggatcatccccctgcacccaggaacttcctgacccacttggagctgacccagccccttgcccctgctgagacactccttcttccctgctggaaacggccaagttgccagcctcagcagcctcggcggcctcactggcttcagtgatgggggagggaggcggggagtccagccgccacacgcccagacccgagggcctcgtggggaaggtccattcgaaggactgtgataagctccagttggactctgccccaaagggacgatccagggccaactggctcccctggccttggggcagggcagccagcgagccccccagcttctcctggtcctgactgggtgactggagcacaccttcagagaatcggcgatcagcaggtagctccgagctggctgccttagccaggtccccgttgaaggccaggtcggaaggaaggctccctacaaagtaggagatgatcagaagctgaactactcggttgatgatcccgatggtccagctcttcacaaccaccgacttggtggtctcataggtgaagaagtcggatatgcagttcatgcagccagttgactggacctcagaagggttttgagcagttaagtgaagccatccagtgggaaccatggaaataaactcttgcaggagaatggcgatggcttggaagcagatgatgcctctgtgagagatgatgagtgtccagcccctgaggttgcctccaatccagacctgggcttggttgactgtgctagtgcagcactgaatgcgatagttgaagttgaagtcatggatagagacaaggttgcctccgtagcatctgctgcagacattctgagcttctgcaaaagttttaggagtccgcaccaataggtagcggcagatcttgcaccttggacttccctgcacttcaacaatgtcttcttccctggggcactggaagtccttgtctaaggcagctgggtccgactccatggcttcctcatcctcaaagttgtcttgacaggcagaagccttgacctcctctccctctgcctgaatcacctcctccgtcagagccaagtctctctcctgctcctttgaactatccagatcctggcctaggtctgcctgtgtctctaggctctccagatggggggcatcattctctctgtgaagcgagtgctgaacctctcttagccctgacttgctgaaatgctgggactctgtacagaggctgacattaagcagggatctgtcgtggggtgctgcaatgttcctccagatgcttgctccgaagctgagggcttctcctgtctccattccagggtctgcagggtgtggctccaaggaagacgaggagtaatcttcaccctgggtctctggcccacttgtctcaccaacccccagctccctggcctccaaggggtctctggcctccaggccaggagacaagctgccattgtgcctcaggccgggctctgggcactggctcaccccgcccaccccatgctccctggcttcacttggagccccaaagagctccacattctggggcgccaagtcctgggtccagtccatctgccccactccacatccccgtagcccctgagaacctccagagtctgggtcacaggtcacctccaaatccctcaggcccagattgttaccccagtccatctggcccaccccaagctctttggactctccaggactgcagactgcccctggggccatgtttctcagcccaaggtcaggtgtccagtctgcctgtccaactccacgctcccttgatttaaggaactctccggcctccacacctgaccagtcagtctgccccacgccactctctctggcctggctgtggcctcctccctccccgacctcagccaaatctttgctcttcacattaacatcagaagtccagtccttctccccaactccgattccccccggctcttcagaccctccactttccaaacagccggtcaggttcatgtctctcaagctcaggccacctgaccagcccatctgtcccacggcactctccctggcctcgctcgagcccccagaacccacacagctggacacttccaagttcctgagacccagctggtcagtccagtccaccgagccagctgtggtcttcccaggaggcacaaagtgaccaccttccatcttgctagaagggctaaagccagcaccactcactctgtcgttgccaatgatgccaaactgatagctcctctcactggcctcgatgcagaagtcccggctccagtcctgctgccctgggctaaatgctgcctctcgctgggggccaacactgaggctaaactcaccgacccagcctcgctttcccatctccccatcttccaggtcagcactgccagggccctgagcccctgcctgctgtctctcctgatgccctcccacctcctggctagcatcactgttttgccagctgctctggtctctctgcccgagtgccccatccggcacgtgggcagtgctaggactgaacaagcccccggatcctctctctcctggccggccagcatccctgctgccctctccaaggctgtcttccacacttggaatcttcttctcaaattcctcatcctgttgctgggcttcctcggggctgaacccagagctcaggggtctcgttccaaagcttctgtcctgggcgtcaagggtcctggagctgccaccactgctgtagtcccttatccaagcgctcttcccaaactcctgttcctgtggctccgcagcccggctgccataggtgccgagtgacacatctctcttctgaaactcccagtcctgctcatcggcatcctggctgctgtacctaccatggtggtccctcttccccaaatcttggccctgctcgttggcatcttggctggcataagcacccagagaatctctcttcccaaattcccagtccccaaggcttacatctcgactactgtaggtacccagtgaatctctctttccgaattcctggtcctggagttctgcatcccggctggagtaagtgccctgggaatccctctttctgaactcccagtcctgaacatctgcctcctggctccgctgagtgccaagctgggctggctttccaactacccggtcctgggctgtgagcacccctggggcagacactttactctggtcttggctgctgctggcctccatctcctcctggccgatgccacacctgctggcccactccctggtgctcccttcccctgctccttgcccatacttgctggtccagtccctctctccgagacctgggtctcctctagggcttgcacccccaaggccatagtcctgagaagcaccttgacaccagctggaaggactgaaactgctgggctgtgggtctcctgtgatcccaaattcactctgcagatctttccacagtgggcagtcttccgtggtggttaactgaccaatgggttgacagtactgggtttctctactgtcttcataccctctcccatctttgaaacacaggcggtcggggctggcaaggacctccttccgaggctgctccatcttggccaggatctcttccaccgtggtggccgcgaagcgctctgaggctggctcagagccagtaggcaccagctcctcctccatctcccggggcagtggggaagccatggctgagctttccctgagagtagacactttcatcacatgcggcagaccctccttgagagcggggaggcagagaggtatgagctggggtggctgcagac

SEQ ID NO: 128931 - DNA, 1528 bp, Homo sapiens
gcggccgcctactactactactactactactaattcgcggccgctcgacttttttttttttttttttttttcccaaaaaactttagtttatatgtattcaagtgggcaaaatagtcattgggtctctgttggggtacctggcggggcagacggagacctggggtgaggcagggatacagtccccacccattataaaaatcaaaaggctttttataaaaaatgctaataaattgttatcaaaagaaaaacccaaaggaaggctggaagaaggaagcagagagggagagggaaggaggagaggaagggacaaaaccttcaaccactaggtgatgaaatccaggggaagggaaggtttggggggatttccggagggtgatacaaagtgcataaatgtgcctccccagacgctcctcagaggtggaggggaacaagaagctgcaaccctgggggcatggttggggctccagccgtctcctcaccccagggaccccacaggaatgggcactgccttgaaaactgccaagttgggaaaaaacctcagtgaacttctcaaaaccttcttcttcttcaagtttcaagggcttgaaagccagttgggcgaacgaatcctttctgaaccctgaaggaatttctctggctttgggaaggtaaacttgaaggggctttcccaagtccctgggaccttgcaggatttcgaaacgctggaccgcggactccttctggctcgacttgctctcagccagctctccctcctcagctgagcgattcccgggggcgcagcttggcctttcagggctgaaggggctcaaggcccaggaaagaggttgactttcaagccccttggtgcccaacgacaatctgtgtccggcggctctgaggttcctccactacctcttcatctgaagatggcacccgagatgcccgtggctctgtagagtcctggaacaggtgtgcatccgagtctgctgcctccgacaggcccaaggtacccccaggccgaattgaccggggcccggtgcccacgcttgcgccccaagttggcacggctccgatacaatggcactgtcgaggatctcggtgtccatcaggctgcggcctccaggagggtggagagtccctgccaggctccagcacctcctcttgggcagcacctgccccggctccttcctcctccaacaggcccccaaggcccgaggccgctgactccctccgagccaccgccttggagctgctggctgccagcatctcctccagcaggccctgggagccggagggtggggggcgggccgggcacctgccagggcttgctccgaagctgagggcttctcctgtctccattccagggtctgcagggtgtggctccaaggaagacgaggagtaatcttcaccctgggtctctggcccacttgtctcaccaacccccagctccctggcctccaaggggtctctggcctccaggccaggagacaagctgccattgtgcctcaggccgggctgtgggcactggctctcgccgcccacgcgcttt

SEQ ID NO: 128932 - DNA, 963 bp, Homo sapiens
atggctcgcaaagactgctgttccccaccgggcgattcgagcccaggccgtttgcctctggttctgcccgctcaatgccttgtactgctgaggctgcagataacggccttcagttccatccacgttgctgcaaatgacatgatgtcattcttccttatggccaagcaggattccattgcgtataagtaccgcattttctttatccattcatctgtggatggacacgcccggcctctgagtccatccctggtggtggaaaacggctgtggcaaacaggttttcctgctttgttctgacaatgcctcacctgaagtgtcaactgtggccctggcttcctgcccagggaccttcccccgacattgtggtgctgccgaaagcactcatatctgtgcaactggcctaggggagctcactccccagggccatggtcacatcccaaataaactgtgtgcatgctgtgcaactggcctagaggagctcgtgccccgggaccatggtaaattagggatttcttggtttggattcattgctggggcttaccttaatcttgctagggtggtaggagagtgtcagggaagttatggctacctctccctccaccactactgctactgccactattaccattactgccactaccactaccattgctgctacatactaaaatcactactaccattactaccaccccataacaactcttaccaccaccattcctactatcattactcctaccatttctatcactactactacaactgttaccaccaccactaccactgtcgccactattaccatcctcatgactactaccactaccatgctgccactactccctctactactgccattacctttgccactactactaccgttgttaccatgatcactcctcacaccagcacaaccaccacgagtgtttgccgtgagtcagacactctgctgaacatttacagtatctga

SEQ ID NO: 128933 - DNA, 1450 bp, Homo sapiens
atgtgcctgtggcgggcctctgaggtcactgtcctggtgaagacgaaggctaccgtccccgctttctggcagtgtctgcgagggcctgcgcagcgcgcatctgatgtcatcagcccccagcaagcccgttttccagaagagaacccggaggctccgagaagcccccggaacgcggctgcccggcttgggagcctgcggcacagggccctgtgcagccccttggggaagacggccccaggctctgccagcccccgccaccctctccagaccatgctctgggggccctatggccaccagcgctctggacgccccactctgccaggcccccgcaaacaccgccaaaaagcggggacggtagccttcgtcttcaacaggacagtgatctcacaggcccaccacgggcacacctgggggccaggccgggggttctggatgagtcacagcaggagggcagtgaccaccgcaaaacctttaagcaaagatctcatgccccgaaatgccagggccgtcaccagggatgcagcagggagtgaaacacccatctcttttctcacaccaaaccgtagccaagggattcaccacgagatggaactgtcgccaagtgtgtccccatcgtggggagaggaagtggatcagcagcgtcaggccttgcggaggtgcactcgcaccctcctgcgctacggtctcagaggcaggaggacgctttcagggagccagccgctgtggcacctgcagcagtttcagcagttgggcagctccagccgccctgccacaccctcactcctcatccactccaaaattcaacgcagcatgccgagccccagagagggtctgtctactcgttgtaagagggaacaagtccacattgcagctgtaccctttgccccccatattgaaaagcgtcctttttcaacctttccagctggagatgcgtgaccttcggaagcccacgctcgggacccgcgtgctgccacagccccgggggcctggagggtcccgtgagccgagcgggacccgggacaagcgcgggacgccgcggggaacggacgggaacgcgcgtggccgccccacagcgggccttcgacacctcctgacacgtcctgcgggtgcccggtcctcagttggctcgagccggatcccggcgcgccaacggctcgaccttgccccccacgaggcagggcttcctgcccggcaggaaggactcggccggcgcctgcgggcaaccgatgagctgaaggcgccgcggctgggccgtcccgctctcccgccgccgagcgcgctgtcctcccgctgcccagagcgtcgccggaagtgccgagggggcgggccaggggtggagactggcgtttccggcgcgcgacggggcggggaccgtagcgggtgcagtccagctgctctggacgctgaggccccggcttctcttgctggggtgtcgattcgggagggctga

SEQ ID NO: 128934 - DNA, 2424 bp, Homo sapiens
ccttgttcacgaacttgtggaaaaggaatgcagagcagacaagtggcctgtacccaacaactgagcaatggaacactgattagagcccgagagagggactgcattgggcccaagcccgcctctgcccagcgctgtgagggccaggactgcatgaccgtgtgggaggcgggagtgtggtctgagtgttcagtcaagtgtggcaaaggcatacgtcatcggaccgttagatgtaccaacccaagaaagaagtgtgtcctctctaccagacccagggaggctgaagactgtgaggattattcaaaatgctatgtgtggcgaatgggtgactggtctaagtgctcaattacctgtggcaaaggaatgcagtcccgtgtaatccaatgcatgcataagatcacaggaagacatggaaatgaatgtttttcctcagaaaaacctgcagcatacaggccatgccatcttcaaccctgcaatgagaaaattaatgtaaataccataacatcacccagactgggttcacagccaacatctggtagtgaatctgacttttctgttggtcaacaggaccaacagttgggaagaaaaaacgggtctggagttcaagagagcaaagtgaagggagacatggatctctctgttttgccaaataacaaccatcctgacaaattcctgcagcttgacgtaaagtctttaacgaggagctcagccctccttcaggccagcctggtgaggtttccgggtggaaattatcctgctgcacaacactggcaaaaccttgtctactcacagggcttaatcagcacaattaatcacttgtattcctttggaagttcttcactcatttgtcaagatacccgtatattgacacaactgaaataccgccctcaaaataggcaagctgtggtttggcatcctggtacacacctgccctctggtgtgaaacaaaacttctttttattgtataaagtaataaccattcttaatatcaaacttctactcaaggttgaagaagaaataaagaagcacggaagtaataacatgggattatcagaaaacctgactgattgtgctgctgctggcaatggtgatgatggactaattccacaaagagcagaaaacctgaaaatcagcaatttcctaggacggagaatgaagagtatcataggtgatgaacatcaaaaaccaaaggtagataaaaccacaaagaggtggagaaaccagtgcagaaaggctgaaaattcccaaaaccagaatgcctcttctccaaaagatcacaactccttgccatcaagggaacaaaactggtcagagaatgagtttgatggcttgattgaagtaggcttcagaaggtgggtaataacaaactcctgtgagctaaaggagtgtgttttaacccaacctcaggtggacatcacggtcctaccgatatgtgatgtcacccccagaggcctagctgtaaaattcctctctttgtactctttctctttatttctcaaccggccgacacttatggaaaatagaacctacgttgaaatattgggggtgggttcccccagtacttatccaccacgatcaagtcagcttcatccgtgggatgcaaggctggttcaacatatgcatatcaataaagcgttggaagttctggccagggcaatcaggaaagagaaagaaataaagggtattcaaataggaagagaggaagtcaacttgtctctgtttgcagatgacatgattgtatatttagaatacctcatcgtctcagcccaaattctccttgaggtgataagcaacttcagcaatgtctcaggatacaaaatcaacatgcaaaaatcacaagcattcctatacaccaataacacacaaatagagacccaaatcatgaatgaattcccattcacaattgctactaagagaataaaatacctagtaatacagcttacaaaggatgtgaaggacctcttcaaggagaactataaaccacttctcaaggaaataagagaggacacaaacaaatgggaaaacattccatgcttttggataggaagaatcaatatcgtgaaaatggccatactgccaaaagtaatttatagactcaatgtgatccccatcaagctaccactgactttcttcacagaattggagaaaactactttaaacttcatatggaaccaaaaaagagcccacatagccaagacaatattaagcaaaaagaacaaagctggaggcatcatgctacctgacttcaaactatattacaaggctacagtaaccaaaacagcatggtactggtaccaaaacagatatgcagaccaatggaacagaacagagccctcagaaataacatcacacatctacaaccatctgatctttgacaaacctgacacaaacaagcaatggggaaaagattccctatttaataaatga

SEQ ID NO: 128935 - DNA, 2571 bp, Homo sapiens
tttgtctaacgcaggctagcttaataaaatatgcttttcaatataatagagaaagtatatgcatttcatatttactaaatcagtgccaggaaagaggaatatttatttactgattgaattattttgttttgctaacacagtgttttattttattttatttattttattttattattattatacttgataagttttagggtacatgtgcacaacgtgcaggttttgttacatatgtatacatgtgccatgttggtgtgctgcacccattaaactcgtcatttagcattaggtatatctcctaatgctatccctccccccctccccccaccccacaacagtcccccagagtgtgatatccccccttcctgtgtcccatgtgatctcattgttccaattcccacctatgaagtgagaatatgcgggtgtttggttttcttgttcttgcggatagtttactgagaatggatgggtttccaatttccatcccatgtccctacaaaggacatgaactcatcatttttttatggcttgcatagtattccatgggtgtatatgtggccacattttcttaatccagtctatcattgttggacatttgggttggctccaagtctttgctattgtgtgaataatggccgcaataaacataccgtgtgcatgtgtcttaatagcagcatgatttatagtccttttgggtatatacccagtaaatgggattggctgggtcaaatggtatttctagttctagatccctgaggaatcgccacactgacttccacaatggttgaactagtttacatgtcccaccaaacagtgtaaaagtgttcctatttcttccacatcctctccaagcacctgttgttttcccgacttttttaatgaccgccattcctaactggtgtgagatggtatctcatttgtggttttgattttgcatttctctgatggacagtgatgatgagcattttttcatgtgttttttggctgcataaatgtcttctttttgagaagcatctgttcatatccttcgcccacttcttgatgggggttgtttgtttttttcttgtaaatttgtttgagttcattgtagattctggatattagccctttgtcagatgagtagattgcaaaaatcaccactcctattcaacatagtgttggaagttctggccaaggcaatcaagcaggagaaggaaataaagggtattcaattaggaaaagaggaagtcaaattgtccctgtttgcagatgacatgattgtatatctagaaaaccccatcgtctagcccaaaatctccttaacctgataagcaacttcagcagagtctcaggatacaaaatcaatgtgcaaaaatcacaagcattcttatacactaataacagacaaacagagagccaaatcatgagtgaactcccattcacaattgcttcaaagagaataaaatacctaggaatccaacttacaagggatgtgaaggacctcttcaaggagaattacaaaccactgctcaacgaaataaaagaggatacaaagaaatggaagaacattccatgctcatgggtaggaggaagaatcaatatcatgaaaatggccatactgcccaaagtaatttatagattcaatgctattcccatcaagctaccactgactttcttcacagatttagaaagaactactttaaatttcatatgcaaccaaaaaagagcccccacattgccccaagtccaatccctaagcccaaaagaacaaagctgggaggcatcacggctacctgacttcaaactatacctacaaggcctacagtaacccaaaacagcatggtactggtacccaaaacagagatatagatcaatggaacagaacagagccctcagagataatgccgcatatctacaactatctgatctttgacaaaccctgggaaaaaccaagcaatggggaaaagattccctatttaataaatggtgctgggaaaaactggctagccatatgtagaaagctgaaactggatccctttcttacaccttatacaaaaattaattcaagatggattaatgacttaaatgttaggacctaaaaccattaaaaaccctagaagaaaacctaggcattaccatgccaggaccataggcatgggcaaggacttcatgtctaataaaacaccaaaagccaatggccaacaaaagccaaaattgacaaatgggatctaatttaaactcaagagcttcctgcacagcaaaagaaactaccatcagagtaaacaggccaacctacaaaatggaagaaaattttcacaacctactcatctgacaaagggctaatatccagaatctacaatgaactcaaacaaatttacaagaaaaaaacaaacaaccccatcaaaaagtgggcaaaggacatgaacagacacttctcaaaagaagacatttatgcagccaaaaaacacatgaaaaaatgctcaaccatcactggccatcagagaaatgcaaatcaaaaccacaatgagataccatctcacaccagttagaatggcaatcattaaaaagtcagaaaacagcaggtgctggaga

SEQ ID NO: 128936 - DNA, 420 bp, Homo sapiens; identical to SEQ ID NO: 118008
  misc_feature (1)...(420): n = a,t,c or g

SEQ ID NO: 128937 - DNA, 1197 bp, Homo sapiens
atgggcctcagcgtgctccctctgcaccccaacgcaagctccggccgcttcttgtccccctcctcctgccgcatcacagcccacctcagcctctttgtaggttccatgcgacgctgtaccatggctgggagtcttccaggcgccgtgctggcgccttctgtgcatggactccaagtcgccataatcgtacgggttacccccattatcagtcccctcttatacatcaggctagtgagacagtatcttatcacagtcctacagctggcaggagtagattcaaaccctagcagcaccaatagtgaagccagtcgctacatctcccccacactaaagggaggtggtcgcaccgtggggtccactggaagttgcctaccagaccaggtcatcccaaacacaccctctagccatttggtgtggcatcggaaagaaactaaggccagcctcgggggccggggccttctgtttgagtccatcgaagtctttccggaaacatccgccagttcctccgccacggccagcacagagaatcctgttgtggtcgatggccttgatgagctgaaagtcccacctggggcgctgatccggacatctgcggggactgggagaagaagaagccggtgcccgtcctcctgggagtttgctgaagaggaagatgttacccagggcagccttgctggtcacacgcggcccagggcactgagggacctccagctcctggcgcagcagccgactacgatcttcgctctcttcgcctctggacagatttctgtctctcttcagctcaaacagcaacctcaagtttctggaagtgaaacaaacttcctgagtgactcttctgtgcggattctttgtgaccacgtaacccgtgcacctgtcatctgcagaaagtggagttgggaggtcactgtgccaccccggagcagtgggctgaatcttctatgtcctcaaagccaaccagtccctgaagcacctgcgtctctcgccaatgtgctcctggatgagggtgccatgttgctgtacaagaccatgaacgcccaaaacacttcctgcagatgttgtcgttggaaaactgtcgtcttaagaagccagttgcaaggaccttgctgctgtcttggttgtcagcaagaagtgacacacctgtgcttggccaagaaccccattggggatacaggggtgaatttctgtgtgagggcttga

SEQ ID NO: 128938 - DNA, 627 bp, Homo sapiens
atggcgcgggaacagacggaggtcggactcctgcaccccgagcctttccagatcctctcggtgaagcacggacgtctgcgcccacaggccctgcgcggccaggaggctcagcgtccgcagcgcgccccgcagctgtgcgccctgcggaaccggctgcagaggaaacgcaggaacagccccgtgcgggaaagagagccatccatgaatacagatacgtttatgtgcagcagcgacgaaaaacagacccgcagcccgctgtcgctgtattcggaataccagcggatggagattgagtttcgcgcaccgcatatcatgcccaccagccactggcatggtcaggtcgaagtgaatgtgcctttcgatggcgatgtggaatacctgatcaacaatgaaaaagtgaatatcaatcagggtcatatcacgctgttctgggcctgtacaccgcaccaactaacagataccggaacctgtcagagcatggcgatttttaatctgccgatgcatctgtttctctcctggccgctggataaagacctgattaaccacgtcactcacggcatggtgatcaaatcactggccacacagcaacttagcccgtttgaagtgcgccgctggagcaggaattaa

SEQ ID NO: 128939 - DNA, 2767 bp, Homo sapiens
atgagaacatttcacaactccaacctgctcagtgatgtccacatgctagggtactcagcttcgcccttcctgttcatcccctgccctctgtcctgtgggagtcatcatggcacaaaagagcaggaaggcgagaaggccaagatgcagcggtccacctggaccatcacaggacacagccccagaactaaaccagagctgcccatgggaagaggagcttacgacaacatctgcaggaagtgttttgggcgtgtcatggtcttatcccccagcaacacggtgcagtggactccaggtgcggggagagccgtgaccgtgagacccacctcagtgagagtttctgcaagtcttgacaatgcttcaggctgaaggaacaatgcatcacttcagaagtatttgtcaggtgaatagaaatttccttgaacggggccaccaccaccttcgccagctcctcctcctgagactcatacaggcagcccaagacctccttcaggtcggtcacggataagggcttatttgcatgaagatgtgctttgcattgcagcaattcctgtttgatgtccggtgacatccggcagccaaaagtggcctccaactccttggctctctctcggcgtagacagggcagtgagaaactgctggaagctgaggtggatgaaggagtagcacctttggagactctgtcctggcggaggatgtctccgtccaggaacagacgaggtcggactcctgcaccccgagcctttccaggtcctctcggtggaaccggacatctgcgcccacaggccctgcgcggccaggaggctcagcgtccgagcgcgccccgcagctgtgcgccctgcgggaaccggctgcagaggaaaccaggaacagccccgtgcgggagctggaggtccctcagtgccctgggccgcgtggtgaccagcaaggtgccctgggtaacatcttcctcttcagcaaactccccaggaggacgggcccggcttcttcttctcccagtccccgcagatgtcctggatcagcgccccgggatttggctgaattgggcttcagtgggctttggagaattacggcttgctgaatctccccggataggcaactggcgcggcagtgaagagctgggcttccggaagctgacagctgtttgtgatttcaagacctcagacaggttttctaaatatgccttgccttcattttctcaggaaagtgaaaaatggctcccacgtgggacaagatggtgtcttcggcgcagatgggcttcaacctgcaggctctcctggagcagctcagccaggatgagttgagcaagttcaagtatctgatcacgaccttctccctggcacacgagctccagaagatcccccacaaggaggtagacaaggctgatgggaagcaactggtagaaatcctcaccacccattgtgacagctactgggtggagatggcgagcctccaggtctttgaaaagatgcaccgaatggatctgtctgagagagcaaaggatgaagtcagagaagcagctttgaaatcctttaataaaaggaaacctctatcattagggataacacggaaagaacgaccacctctagacgtggacgaaatgctggagcgcttcaaaacagaagcacaagcgtttacagaaacgaaaggaaatgtcatctgcctgggtaaagaagtctttaaaggaaaaaagccagacaaagacaataggtgcaggtatatattgaagacgaagttccgggagatgtggaagagctggcctggagatagcaaagaggtccaggttatggctgagagatacaagatgctgatcccattcagcaaccccagggtgcttcccgggcccttctcatacacggtggtgctgtatggtcctgcaggccttgggaaaaccacgctggcccagaaactaatgctagactgggcagaggacaacctcatccacaaattcaaatatgcgttctacctcagctgcagggagctcagccgcctgggcccgtgcagttttgcagagctggtcttcagggactggcctgaattgcaggatgacattccacacatcctagcccaagcacggaaaatcttgttcgtgattgacggctttgatgagctgggagccgcacctggggcgctgatcgaggacatctgcggggactgggagaagaagaagccggtgcccgtcctcctggggagtttgctgaacagggtccctctgtgcatcgagaacaagctgggggttggtggtgaggattggggggaccagctaagagtctactggtggaatccaagcaagagagagggtggctctggctggagccatgggagtgaagatgccaaccagtccctgaagcacctgcgtctctcagccaatgtgctcctggatgagggtgccatgttgctgtacaagaccatgacacgcccaaaacacttcctgcagatgttgtcgccttgggaaaccacgctggcccagataataatgctagactgggcagaggaaacctcatcggacaaattgaaatatgcgttctactgcagctgcagagagctcagccgcctgtgcccgtgcaattttgaagagctggtcttcagggactggcctgaattgcaggatgacattccacacatcctagcccaagcacggaaaatcttgttcgtgattgacggctttgatccgctgggaggccgcaccttgtggacgctgactcgaggacatctgcgggaacttgggaacagaagaaagcggtgcccatcctcctggggagtttgctga

SEQ ID NO: 128940 - DNA, 760 bp, Homo sapiens
ttatttagtcctcaggacaattctgctgtagtgaccccggtctccactttccgggtaaggaaatcgagtcatggagaggccaggggacttgtctggattcccagctcttcccagctggaagtgatggcctatggttaactgagcaactacagtctgctcaatgaacctggcaaccaaccaagtacttcctggtgaacctgagcttgtggtaagagcctgggatcgatacttcatgcctgtgcgctgggcggtgcagccgtccagggaaaggccgtgcatgcggaggaagctctccatgttcctggcctgggcagccgcccgcacctcccgcagccgctgcagttccagcgtgtccgtctggcggacggggtgcagggcccattcagagtggcacctgctgctcacgctccgcagactctcgctgtacgtcatggacagcatggtgccgcctggcttgggagctgccactgtccagacggtgatgagttagacagtgtgccaatgccccacgtgccccaggctggatggctggccctggggcagggggcagctgcagcgaaacatcctttaactagtgccaccaccaggtcttggtgtctaggagtgggacccggcccctggatgtaaacacctcttggcatgagattctcagtccgcaaagcagtgcttgccaggaactctggctaagctgcccttttctgtcccctgcatctgtgagacaagcacaggcaaagctgcattccaggcaggacagctgcac

SEQ ID NO: 128941 - DNA, 378 bp, Homo sapiens
atgtgtaatgcacaagtcctggaatacatggggaaatcatcatcactactgaccagcgacttgcagcttgttcgagatgctctccgcagcctgcgcaacagcttcagtggccacgatcctcagcaccacactattgacagcttggagcagggcatttctagcctcatggagcgcctgcatgttatggagacgcagaagaaacaagaaagaaagcctccactggtgatacccaggcaaacagggtctggagtggacctccagcaaactccaacagacctgcagctgagggacctgactgttagaaggaaaactaacgaacagaaaggaatagcatcagcatccacaaaaaggacatccacaccaaaacctcatctctag

SEQ ID NO: 128942 - DNA, 753 bp, Homo sapiens; identical to SEQ ID NO: 116664

SEQ ID NO: 128943 - DNA, 489 bp, Homo sapiens; identical to SEQ ID NO: 121078

SEQ ID NO: 128944 - DNA, 1071 bp, Homo sapiens
atggtggtgtatgcctgtagtcccagctatctggaggctgaggtgggaggatcattgagcctggaagttgaggccacaaaccctaaaaactcatccaaaaagttcctagatctgatcagcgaattctgtaaagtctcaggatacaaaatcagtgtacacaaatcagtagcactgctgtacaccaaaaatgaccaagctgcgacccaaatcaagaacttaatcccttttacaacagctgcaaaacaattcaaatactttggaatatacttaaccaaggaggaggagcgactcaagccttcgcgaaagaaaataaccaaaaagcatacaaagaaacgtacggcgtctctcatattacacgccatgatatgctcgcagatccctaaacagcagcaaaacgaaaaataccaagtgcctcaattcgatcaatcaacgattaaaaatattgagtctgcaaaaggacttgatgtgtgggacagctggccgctgcaaaacgctgacggaacacctccgctggtgatacccaggcaaacagggtctggagtggacctccagcaaactccaacagacctgcagctgagggacctgactgtcagaaggaaaactaacaaacagaaaggaacagcatcaacatcaagaaaaaggacatccacaccaaaaccccattgtgtatctgaaagtgacggggagaatggaaccaagttggaaaacactctgcaggatattatccaggagaactcccccaacctagtaaggcaggccaacattgaaattcaggaaataaagagaacaccacaaagatactcctcaagaagagcaaccccaagacacataattgtcagattcaccaaggttcaaatgaaggaaaaaatgttaagggcagccagagagaaagtattggaagttctggccagggcaatcaggcaagagaaagaaataaagggcattcaaacaggaagagaggaagtcaaattgtctctgtttgcagatgacatgattgtatatttagaaaatcacatcatctcagcccaaaatcgacttaagctgataagcaacttcagcaaagcctcatga

SEQ ID NO: 128945 - DNA, 1161 bp, Homo sapiens
ttaaaatctcaatttcctcatctgtaatatggagacaataggatgctgactctgtagggttgtcatgaatattaaatgaaagtttatgttattaagtgcaaaaaccttaacacacttctgagcacaaagtagaaactcagtaaatgcaaaagcatcctggtcatcatcatcatcatcatcatcatcaaagcaaaggttgctgcacgtttgctggaggtccacttcagaccctgtttgcctgggtatcaccagtggaggctgcagaacagcaaagattgctgcctgttccttcttctggaagatttgtcccagaggggcacccgccagatgccagccagagctctcctgtatgaggtgtctgctgacccctgcgggaaggtgtctcccttctctcctggagaccctctgtttgttcttccgtccctctccacccttctgcatcctactgtgtcctagatggactgcatcaaccagttctctctcattgatcggcaggcttccagttgtcaatcctggggcaggtgcttgcaggccagaggctatacgcagctctctctggtggggtgggctgactttaggccaactgtcaggcaggggggtgggtgcctgtgggcctgatatctgctcatggacttcccactgctgcacagttggcttgtgtccctgggtgataaggtgcctcatgaattttggcgtgggtgtcccagttgttcctttgggcctaggttctgggtagctggggtactggtattgtaggcaccaaaactgtgactgagacaagtgcgtagtgcaggaaagaggtgtggacagaagtggtaaataaaataatggataggctgtgtgtggactaaaataagtgtcagattctgacttaaagcctgccaccagttgcagcttaattgtcacttgccactcactgttagggttttgatatgagtctgcaagcaattgatgtattatggtctctgtgcagacctctctgctaatgttaatctgtatttgcacctgctccccagtgcgtgcatcactgccccagctccacctcagatcatcaggcattagattctcataaggagcatgcagcctagatcccttgtatgtacagttcacaataggggtcacactcctatgagaatcgaatgccaccgctagacataccat

SEQ ID NO: 128946 - DNA, 753 bp, Homo sapiens
atggagtccatgcttaataaattgaagagtactgttacaaaagtaacagctgatgtcactagtgctgtaatgggaaatcctgtcactagagaatttgatgttggtcgacacattgccagtggtggcaatgggctagcttggaagatttttaatggcacaaaaaagtcaacaaagcaggaagtggcagtttttgtctttgataaaaaactgattgacaagtatcaaaaatttgaaaaggatcaaatcattgattctctaaaacgaggagtccaacagttaactcggcttcgacaccctcgacttcttactgtccagcatcctttagaagaatccagggattgcttggcattttgtacagaaccagtttttgccagtttagccaatgttcttggtaactgggaaaatctaccttcccctatatctccagacattaaggattataaactttatgatgtagaaaccaaatatggtttgcttcagtcaggcccctctgctgcatgtctgttggagtttgctggaggtccactccagaccctgtttgcctgggtatcaccagcggacgctgcagaacagcaaagattgctgcctaatccttcctctggaagctttgtcctagagaggcacctgccagatgccagccagagctctccttgcacaggtgactgtcaggacaagagtggaagcagggagaccagtgcagaacctattgtaataactcaggcaaaagacaatctgattgtagcagtggaggtg

SEQ ID NO: 128947 - DNA, 1054 bp, Homo sapiens
atgaaacttactgatggtggttcagaagtcaatgggaatgcatatagctatgttcaatcaagaaaccagagaagtctctcctctgctggtgatacccaggaaacagggtctggagtggacctccagcaaaatccaacagacctgcagctgagggacctgattgttagaaggaaaactaacaaacagaaaggaatagcatcaacatcaacaaaaaggacatccacaccaaaaccccatctgaaggtcaccaacatcaaagaccaaagactaaaccaggaagaatttgaatgtctgaatagaccaataacaggttctgaaattgaggcaataattaatgtcctaccaaccaaaaaaagtccaggagcagatggatttacagctgaattctaccaaagaaccaaagacaaaaaccacatgattatctcgatagatgcagaaaaggccttcaacaaaattcaacagcccttcatgctaaaaactctcggggaactaggtattgatggaatgcatctcaaaataataagagctatttatgacaaaccctcagcgaatatcattctaaatgggcaaaaactggaagcattccctttgaaaactgacacacgacagggatgtcctctctcaccactcctattcaacatagttttggaagttctggccggggatttccgtcaagagaaagaaataaagggtattcaattaggaaaagaggaagtcaaattgtctctgtttgcagatgacatgattgtgtatttagaaaaccccatcgtctcagcccaaaatctccttaggctggtaagcaacttcagcaaagtctcaggatacaaagtcaatgtgcaaaaatcacaagctttcctacacaccaataacagacaagcagaaagtcaaatcatgagtgaactctcactcacaattgctacaaggagaataaaatacctaggaatccaacttacaagggatgtgaaggacggacctcttcatggagaactacaaaccacggctcaaggaaataagagaggacacaaatagaaaaacatcccatgctcatggatag

SEQ ID NO: 128948 - DNA, 1247 bp, Homo sapiens
ttaaatgtggtctctcaggcgttgctttgtttttttatctgtcttctctttgtaagagaggaaatttctttttccttgctcatactctgtgtgtaaagccagccctatcttttcagctcgaaccatttttgaccttaggctttctcctgcctctttaaatgtgattccttttattcctaagcttgtggaaatggcattaacatacagaaaatctcctaagccagaaatctgggacaatttcttcttcattatcaccacatcatataccatgaggctctcaggccatagagccttgggtttttccaaaattattgctgctatcattccggttgttagagtttcccattccaagacgttgactttcaccaccacctcgccatgcatactaagtcttctcttcaccatcattctgggagctctcttcacatcttccatattgcataaattcctacatattccttctttataaattaatgccttggagtgtgacaccagaagcttcctccttttaattctggcaaacctgctttctccaaataactcctctctgtttccttctctttcagtagagtcaaactcttgatgacggtatttagcagttggtaaatgcctagtgtgctgagtctgtgcagatctgatactcttcacagtccctgaccaaagccccggatcctgaatcttacaaaatgcaatggaatctttgtctatgatgctggtgaccttcggatggggtttttgtgtggatgtcctttttgttgatgttgacgctattcctttctgtttgttagttttccttataacagtcaggcccctctgctgcaggtctgctggattttgctggaggtccactccagaccctgtttgcccgggtatcaccagcggaggcagcagaacagcaaagattgctgccttttccttcctctgggaagcttcgtcccagaggggcacccgccagatgccagccagagctctcctgtatgaggtgtctgttgatccctactgggaggtgtctcccagtcaggatacatgggggtcagggacccatttgaggaggcagcttgtcccttatcagagctcgaatgcagtgctgggagatctgctgctctcttaagaatggtcaggcagggacacttaggtctgctgaagctgcgcccatagccatcccttcccccaggtgctctgtcccagggagatgggggttttatctgtaagtccctgacgggggctggtgcctttttttcagacat

SEQ ID NO: 128949 - DNA, 2433 bp, Homo sapiens
atgcctgtctgggtcactgtggtcaagagctggaatacacagattggccggccaggccatgtgtctgctcttgggtttgagctaacaaagaacccctggcccctgacttatgagagtggggacgggcgttccttagggaaacctggggctgtgtccagaagaggtgggagacatggtccccatccccaacaagccgagtgtgacttgccagctggccgcattgctggaccctgtgagcggggcttggagcgccaggagaaattaccaccagctccccagggtggggcctggcatctcaggctttcccgggagaggttcaagtcagaagatgccccaaagatccacgtggccctgggtggcagcctgttcctcctgaatctggccttcttggtcaatgtggggagtggctcaaaggggtctgatgctgcctgctgggcccggggggctgtcttccactacttcctgctctgtgccttcacctggatgggccttgaagccttccacctctacctgctcgctgtcagggtcttcaacacctacttcgggcactacttcctgaagctgagcctggtgggctggggcctgcccgccctgatggtcatcggcactgggagtgccaacagctacggcctctacaccatccgtgatagggagaaccgcacctctctggagctatgctggttccgtgaagggacaaccatgtacgccctctatatcaccgtccacggctacttcctcatcaccttcctctttggcatggtggtcctggccctggtggtctggaagatcttcaccctgtcccgtgctacagcggtcaaggagcgggggaagaaccggaagaaggtgctcaccctgctgggcctctcgagcctggtgggtgtgacatgggggttggccatcttcaccccgttgggcctctccaccgtctacatctttgcacttttcaactccttgcaagcccacaagcagttgaaagacaggaaggtgggccctcactttatgcaaggcgctgtgttcctggaagggaaattctggggcgtggacattgcatcatttgagccacaggagcagttctggtggacaaacttgggcaaggaggatgaggataagagcttcgacatgccccactcgtgggtggagcagattgagatctccccggaagaggaggccatgggcagtgcccagatggtgcggggggtctcaggaccggagaggggcagcaagaagagaccacagctgactgtgtccacagcatttgagacccgctgcccgaacgggaagaaggtgattcagtacaagagggcaaagctggagaagtgggccccgtacctcaatagcaatggccttgtgagccgcctcaccacctatgaggacttgcagtgtaccaatattttggagataaaggagtggtaccagaaccgggaagacatgctggagctgaaacacataaacaagaccacagacctgaagacagactacttcaagcctggccacccccaggctctgcgcgtgcactcgtacaagtccatgcaacctgagatggaccgtgtcattgagttttatgaaacggcccgtgtggatggcctgatgaagcgggaggagacacccaggacaatgacagagtactatcaaggacgcccagacttcctctcctaccgccatgccagcttcggaccccgagtcaagaagctcactctgagcagtgcagagtcaaacccccggcccattgtgcgaagcccgcggaggatgacgtggcaaaagcgcgtgtttctggtcgcggaggagcgcatccagctgcgctaccactgccgtgaggaccacatcacggcctccaagcgcgagttcctgcggcgcaccgaggtggacagcaaaggcaacaagatcatcatgacgcccgacatgtgcatcagcttcgaggtggagcccatggagcacaccaagaagctgctctaccagtacgaggccatgatgcacctgaagagggaggagaagctgtccagacatcaggtctgggagtcagagctggaggtgctggagattctgaagcttcgagaggaagaggaggcggcgcacacactgaccatctccatctatgacaccaagcggaatgagaagagcaaggaatatcgggaggccatggagcgcatgatgcacgaagagcacctgcggcaggtggagacccagctggactacctggccccattcctgggcccagctcccgccaggagagaaactaacatgctggcaggcggtgcgccctcaaggatgagtgcctcagcgacttcaagcagcggctcatcaacaaggccaacctcatccaggcccgctttgagaaggtgccaccagggcctttgttggggagggggggatctcagcatctgcatccaggaaatgggcccacggctgtccgcccactacctcacaggcttgtga

SEQ ID NO: 128950 - DNA, 1755 bp, Homo sapiens
atgaggcaaaccaagacagaatacatccaagagtttaaccaggaggccacagttgcaagggctttggaaggtcaggaaaagcccaccgaagggccaagaaacacctgcctggggagcaacaacatgtacgacatcttcaacttgaatgacaaggctttgtgcttcaccaagtgcaggcagtcgggcagcgactcctgcaatgtggaaaacttgcagagatactggctaaactacgaggcccatctgatgaaggaaggtttgacgcagaaggtgaacacgcctttcctgaaggctttggtccagaacctcagcaccaacactgcagaagacttctatttctctctggagccctctcaggttccgaggcaggtgatgaaggacgaggacaagccccctgacagagtgcgacttcccaagagcctttttcgatccctgccaggcaacaggtctgtggtccgcttggccgtcaccattctggacattggtccagggactctcttcaagggcccccggctcggcctgggagatggcagcggcgtgttgaacaatcgcctggtgggtttgagtgtgggacaaatgcatgtcaccaagctggctgagcctctggagatcgtcttctctcaccagcgaccgccccctaacatgaccctcacctgtgtattctgggatgtgactaaagcgcttgtgggtggttatgacatccttgccatctatgaggtggagcatttccaacaagagcagtgtgtggccgtgatctccgtgtgctcccgcgggggaaagggcagtgctgagtgtgggcactggggcaagggcctgaccaccgagcactcctcacctgtgcctgcagtcacccacctttccttggcaaggatagcggaaaaaggcaaagccggatgccctgcacgggcctgccgggtgcactcctgggtccttgtgctatcggggaagcgcgaggtgcctgagaacttcttcatcgacccattcacaggacatagctacagcacccaggatgagcacttcctgggcatcgaaagcctgtggaaccacaagaactactggatcaacatgcaggattgctggaactgctgcaaggtgcctagggagggggagctgggtgaccctgaggaacggctcgctcatttgtttggtggcttggactgtctgtccatctgcatggcggacgtagccagtctgctgctcctgaactcccgtctcaccatcctgtcccagctgccctcatggtgtatgagcctcttcctgcaacaacaggacttgatctttgacctgggtgaccctgtgagatgggagtacatgctcctggggactgataagtctcagctgtccttgactgaagaagacgacagtgggataaacgatgaggatgatgtggaaaatctgggcaaggaggatgaggataagagcttcgacatgccccactcgtgggtggagcagattgagatctccccggaaggtaccaatattttggagataaaggagtggtaccagaaccgggaagacatgctggagctgaaacacataaacaagaccacagacctgaagacagactacttcaagcctggccacccccaggctctgcgcgtgcactcgtacaagtccatgcaacctgagatggaccgtgtcattgagttttatgaaacggcccgtgtggatggcctgatgaagcgggaggagacacccaggacaatgacagagtactatcaaggacgcccagacttcctctcctaccgccatgcc

SEQ ID NO: 128951 - DNA, 522 bp, Homo sapiens
catgtgcaacaaacggagatttcacggactgtatcaactgggagtccaatcatcttgagttgcagcgtacccgttaccttaccaaatggacctgtcttgtggttcaaagggaaccgggcccaaaccggaaattaatctacaatttcaaacaaggtaactttcccagagtaaaagagattggagacaccaccaagcctggcaacacagacttttccacccgcatccgtgaaatctctcttgctgatgctggcacctattactgcgtgaagttcataaaaggaagagctatcaaggagtaccaatcaggtcggggcactcaggtgtttgttactgtctcttacagttctagaagccagaagtctgaaatctgcatctctggactgaaatcaaggcatcagcagaactgctccttctggaggttctaggagagagcatattccctttctcttatggcttctggtttgctgccagcatccctggcctgtcagcagcatagaataaatcttcaaggccagtgtcaaa

SEQ ID NO: 128952 - DNA, 542 bp, Homo sapiens
cgacaaggtaacttccccagagcaaaacagatcggagacaccaccaagcctggcaacacagacttttccacccgcatccgtgaaatctctcttgctgatgttggcacctattactgcgtgaagttcataaaaggaagagctatcaaggagtaccaattcaggtcggggcactcaggtgtttgttactgagcagaatccaagacctcccaagaacagacctgcaggcagagcaggctccagggcccaccatgatgcccatacctgcctttcggccctgcctgagagaaacagcacaaactatttcgtccaaccctgctgctgcctccggctgctgggactcacaggctttgctgtcaaaataatccaaacagggaaggaacgtacaagtaaataacaaaagcccccatactcttctgactccctggagacagctactttttaggagtttcatttgccttcttcaagagagctttcttccactgacataaaatgccagcttgatcgtacaataaatctgtctatttacctgggaaaaaaaaaaa

SEQ ID NO: 128953 - DNA, 1777 bp, Homo sapiens
atggggtcttcactgagtccggtgctgtatgtagctctgcctgtacggcagcctctgctgcgctctgtggtggaggaaaggagcaccaaaatgcgagttgggagcccagggttccaggctaaatttcgattctactcccaaggcctgagctggtcagcgagaggggaagaagggttggtgcccgcgttctggctccagccctatcccagacctctaaacttcaaagcagagatgacagaacagaaagaaaatcagacttatgtcgatgggggttttagaccttatatccacagaagaaagaatttgactgaggggcataaggcagaaaaagagatggagccttgggatggcttctctgatgagtcctgccgcacccattgtcaagttcatgactacgccaaaggtcatggtgaggtccagagggagcgggtggatgagcagaaagaacacttggggggtcgtaggcaggactgccagcagcagcatctgaaccgaaggctgcattgcctgtctcaggggaggcgccgagtgaagcctcgggcagtgttaggggtcatggccgtgcccatggactggctggatctgagagacatggccatgaccatgctgccccagagcaccagctccttcagagtgtggacgctgaccacgtggtcccagttgcctggtaccagttctgggatgatgaaggcagaggaatattgtctcctggggatcacaagccagatagaagaggtgcggctctatattgattggtttgcgtatctaaggcacatcctggctgatccctttgctctctaccattactcatccgtcctcacaaaaaaccctttctcttctgaggttatcctcattcggccaataaaaccaataggctttaaagagaaggtgtcaatttgtctgagctcaaaggatgggaagttcttccagctgaaaaagatgaggggagaggctaaagaaggaatcaggaacagtcagaatctcagtgggaagctatgcagcttccaagtgcagcttgatgagtcagctgtgaagacagggtatgtccagatctctgtggagaggaacagcaacaggtctgaaaagaagagactgtatgtctgtccatcttcagatacctccaccaccaatgaccaactttccttcctgggaaaatggggagccagagagagaacagaaagtgaaatctcttcctctggcagccagccaagccacatcttggagaggctacctggctgtatctggtgggaacaggaaagcaggctacctgtggccctgaagaaagccttcatagggaaagatgtaggaaccctacctggtgctgattcttctgagcaattttcagaggcctcctttgcctgctttcacccaagggaaatttctggccctcagaccacgcgtacttggctctctgacagtgtacctgcacccaccaccctcatggatcacaactcctcgccagcaagggaacaaaactggatggagaatgagtttgatgaattgacagaagtaggcttcagaaggtgggtaataacaaactcctccaagctaaagaagcatgttgtaacccaatgcaaggaagctaagaactttgataaaaggttacaggaactgctaactagaataactagtttagagaagaacataaattaccctattggagcttaaacacgcagcatgagaacttcgtgaagcatacacaaagtatcaatagccaaatccatcaagtggaagaaaggtattatatatggaggtcacccaatgaataaatgtgaag

SEQ ID NO: 128954 - DNA, 1026 bp, Homo sapiens
actgagtcgagggcatctccaggacaggcattcaggcagagcaagctccaggtttcaccacaatgcccatcccagtgtcagtcaatcccggagatgtcctaaccctggcctgcaatatgtctgctctgtccccagaagggcctgtcttgtggttcaagagcattgggccaggacaacaattaatctttagttgcaatggaagccacttccccagagtaactccagtggaaaacacaatggttgatcaaactgactattcaatcatcttgagttgcagcgtacccaataccttaccaaatggacctgtcttgtggttcaagggaacagggccaaaccggaaattaatctacaatttcaaacaaggtaactttcccagagtaaaagagattggagacaccaccaagcctggcaacacagacttttccacccgcatccgtgaaatctctcttgctgatgctggcacctattactgcgtgaagttcataaaaggaagagctatcaaggagtaccaatcaggtcggggcactcaggtgtttgttactggtgagtatgtctcctataccccataccccctggtgtataatagtgcccctctgggatgaagcttccagaggaaggagcaggcagcaatctttgctgttctgcagtctccactggtgatacccacgaaaacaggatctggagtggacctccagcaaactccagcagacctgcagaagagtggcctgactgtcaaaaggaaaactaacaaacagaaagcaacaggatcaacagctgaaaactccaaaaaccagaatgtctcttctcctccaaagaatgacatctcctcgccagcaaggcaacaaaactggatggagaatgagtttgacgaattgacagaagtaggcttcagatggcgggtaataacaaactcctccatgctaaaagagcatgttctaacccaatgcaagaaagctaagaaacttgataaaaggttgcaggaactgctaactagaataaccagtttagagaagaacataaatgacc

SEQ ID NO: 128955 - DNA, 1524 bp, Homo sapiens
ctagatcagagccacactggccagtacttcaatcaagatgctgaccgtggctctacctgaaaggccaggagaacttccttgtactgaagtatcagggactgtgattttcttggttgcgaagtttttgccattagtgactgggttatggacataacacagatagtccccactattctctgtagtgacttgggggataaagagctcttgtcctgtttgctggttattcccattcagcagccaagaatactctgctgatgggttagagcccatgaggcaggagaggttgaggtttgaccctgcatagtaataggtgtctgaagaataagttgtgggttcatctgggccatgtatttcttgctttaccagctgattgttagctaagagctcccttatttggaatggtgtttctgctatttcttcactttctgtatctccttccttcccttttggtgtattataggagatatgttgctcatctccaaaattctctgctgcttgcagagctgcctgtttttcagggtgtacacggaaatatccagttgcttcttcaatggtaaaatctgtctttatgatttgtagggtatagaatcctgtgtcatcctgggtgactttccgggtcagcagggatgcattggcaaatattacctcctgactactgtatgcaggtcctgagctagatctttgaatgcctgttgcatatcttcttcctttgtgccaattgtagcccatcactttcaggggcagattgtgggcaagtagaaaaaactcctcctcctcctcctctgtggcattgaatggcatggcttcagtagtgactctggcagtggtgggtgggttccagaaggttaaaagtgaggctgtgaacatgagcttctgccagaggatgtgccatcttgctttgggtgggctgagtgctggctggtgagaaggaccctccctctctttcattatgttgaactttgctacagcttccatggttagacattcgatgacccggttgtccaagagggtattttccttcgtggaggtgtgcaggatcaatctcttatgcctctctgcagccaggatgggcttagcccttcttgctatacatcccttggggttcctcttgagggattgaggcagatcaagctcctcgctaagggtgaaggagaaggggttgagtggtacttgccccttccccatgggtgatgccaggaggaagtggggagctgcacaaaaacccttggcagagcaggcaccatgaaggagcaggcacatggcagggaccagaagggtcatttggggcaagggctggaaaccaggctccacctctacctccttagcaaagccaggttcctgtccaggggaatccatttcctgagtgttatctgtgtgtgatgtcgccccctgctgactaaccagtgtacttctgggaattgcaaatgcatgaaatggcacccattctagactagtcacggcagtgttggtgatggtcacagaccgggaacgaccctgacgtttatccatagagaactgggtcat

SEQ ID NO: 128956 - DNA, 1165 bp, Homo sapiens
tcaggaaatagcatcacttctctgagcttcagtgtcctcatttgaaaatggtaaaaattcctgcctggtccacgtccacttccatcctcccctttctctaacattgcttgtactgagatcagaaacatcctgctttattgctaaacctgccaggaactcacaggttagttttgcatcctttgacactgagggccacttcttttcctggaataatctcttgggacgggtgtctgcaccgggacaacccgccagaaactctcctggtggaacacggtgcatgttctctggctgccctgcagtttttaaatgccaccagtacacatggggaatgttctgccttcccaaggaggaagccagaaatttcattgtcccagcactccttgcaggagggacaccaacacaggtccaggctttccccatcaggtgctcccatgaaagactcaggatccagaacagcaccaggaaacagagtgtgcatggcaccgatttgctttttgtttttaatttttttgagggggatgggggaccaaaggttctggtgcagaagcttctggactccagggctagcctcagcagtgcagggtgtagggtgtggtttctgcctcctgcagtagccagaagatcttggccggagctgtcctgtgcctgtggtttggtccttgccctgggccctgtggcctacaagcctgtggcctccacccaagtttgcatcaccacccattcctccttgagtgaatactgttgtctccctgggtctccctgtctccacagtggccacaagcatctgagccagcttcttctctgtggcagagatgatctttttcaggcctcctccggccatggccctttcctgctcctctttccagagctcccaagtccccgggatgcactccagctgctaagagaggcctcgaagttccctacggataaacgtcaaggtcgttcctggtctgtggccatcaccaacactgccgcgactagtctagaatgggtgccatttcatgcatttgcaattcccagaagtacactggttagtcagcagtctcccactgctaattctccatatgacccatccccaccaccaccatcctcaacagccaccagtgagaattcttactacctgaacttcactgtgacaaaaatcagccttggacctgtgggctaa

SEQ ID NO: 128957 - DNA, 2136 bp, Homo sapiens
atggctaccacacctgggcgggccctgggctccctcctgcccacccttctgctgggactcacagctggacagcccttcatctctctgactggtccatctcacaggacaagccctggagactcagtgcctttcaactgtactgctgtccccttcaactcccaggacttctcccgggacttcaatgttacgtggttgaaggacagtgatgaacatccagcctcagctcagcgcctggtgcctgacaatggaggcaatgacttcatcaccagcaaggcatgggtgacactgacccgacaggatgtctcatctgagatcacctgcgaagtcacccacagggccctggcagagcccctgaaaacaaccatgaatctctcccaagccaccagaaatccagatgggacatactctctggagcacacgtggcaggcagaggccacgctggaggagcgtgagtttgcttgctgggtggtccacgatgagcagcccccactcaaggccaacgtcaccctgcaagcccaggtgcgcaggcaggggaaagcacggctggggagggtcagagactcagggcggcattggatgatggtgaaggaaggaaggatacccgcagctggtgatacaactctcacacattcgcccccagactccacttctcacgccttcctccacaccctccccaagaagaaaggggatgtggataaagctggaagccatcatcctcagcaaactaatgcaggaagagaaactcaaacactacgtgttctcactcataagtgggagctgaacaatgagaacacatggacacacggaggagaacaacacacaccgaggcctgttgcagcaggccagagtgtccagccttacaagttgcaaggcccccttcagcgatctgagcctggcacaaggatccgattgacctatgcatcctctgggttctcgacacaccaggttactgtgacctggcttaaaaacaaacacgagctcccaaacccccagaccagcgtccagtacagtggacacacctacaatgtgaccagcagtgtgcttgtcccgctgatggatgatgatgtgttctcccacgtcgtttgccatgtggagcacaagttgacgtggtttttccagaaaaccactggcctggaccagtacctccagggaagaagatttgaagagcttgggaaactaaattctagggccaatggtgtctttagacgggttggaccaatgcttggtagatctgtgaattccatgagaacccatgacagttgtgtggagggcaccttaccctgccctcttctccacgggcaccaccccagttaccagggcttcaacacccggagtcttccattctcaggttttgctcttttcttgagattctatccacaaaacgtgcaccttgcctggctagaggactgccatacactcaaaggcactgagcaacccacattaaagaagaataatgataggtcctacaccctggaaaagctgctgctggtgaatgcatcagtgcaggggcctgagcgggtgctcacctgcatgatggaacatgagggacagcctcccaaacgggctaacctcgtactgtccacagcagcccacaccgcttataagcccattgggagcacaggtaagttcacttcttcttctgtgagcacctggggtcacttctgtatcctgagtggatttcagaagagaggactaaatgtggagagaagacatgggtttggaatcagaatcaggtgcaacctgcaagctctagaacttcttgactacatgacctcagagagggcttttaaactcacagagcctccacgtgacggctccttctatcctttggcattgaggcccagagatgcctgcccttgtctttgtggttttcctcctgggcctcagggtgctgctggtgatgagtttcacagtgacctacatctgcaggaggtggaacctgtgacaggtgaacataggataggctttagtcttcggtactgggtgacaggctggcaagaggcctacagggcaagcccaacaaagtcactggggccctcaagagtgatccagcctcaagggaagagctttggagctgagtcagggacgagttttcttcatgaggactccagggatgtcttgaccctgatgtactga

SEQ ID NO: 128958 - DNA, 1314 bp, Homo sapiens
atggctaccacacctgggcgggccctgggctccctcctgcccacccttctgctgggactcacagctggacagcccttcatctctctgactggtccatctcacaggacaagccctggagactcagtgcctttcaactgtactgctgtccccttcaactcccaggacttctcccgggacttcaatgttacgtggttgaaggacagtgatgaacatccagcctcagctcagcgcctggtgcctgacaatggaggcaatgacttcatcaccagcaaggcatgggtgacactgacccgacaggatgtctcatctgagatcacctgcgaagtcacccacagggccctggcagagcccctgaaaacaaccatgaatctctcccaagccaccagaaatccagatgggacatactctctggagcacacgtggcaggcagaggccacgctggaggagcgtgagtttgcttgctgggtggtccacgatgagcagcccccactcaaggccaacgtcaccctgcaagcccaggtgcgcaggcaggggaaaggccagagtgtccagccttacaagttgcaaggcccccttcagcgatctgagcctggcacaaggatccgattgacctatgcatcctctgggttctcgacacaccaggttactgtgacctggcttaaaaacaaacacgagctcccaaacccccagaccagcgtccagtacagtggacacacctacaatgtgaccagcagtgtgcttgtcccgctgatggatgatgatgtgttctcccacgtcgtttgccatgtggagcacaagttgacgtggtttttccagaaaaccactggcctggaccagtacctccaggaacccatgacagttgtgtggagggcaccttaccctgccctcttctccacgggcaccaccccagttaccagggcttcaacacccggagtcttccattctcaggttttgctcttttcttgcttggtggctgttacttgcctcgtgcagagattctatccacaaaacgtgcaccttgcctggctagaggactgccatacactcaaaggcactgagcaacccacattaaagaagaataatgataggtcctacaccctggaaaagctgctgctggtgaatgcatcagtgcaggggcctgagcgggtgctcacctgcatgatggaacatgagggacagcctcccaaacgggctaacctcgtactgtccacagcagcccacaccgcttataagcccattgggagcacagagtccataatggtgaccatgatcatcaccatttcacaaatgggaaaactgaggactcgagggtag

SEQ ID NO: 128959 - DNA, 387 bp, Homo sapiens
tcaggcgcgcgaccaggccaggcaattgaggcggcagacacaacgcaggccgctcatcagcgaggctcgaaacagggaggccagccatggctcctcaggggcgccctcggcctctggggtgcaggactccccagcatcctgggcactggccttcagcgcccggactcttgcccccagctcccgggcccgttgcaggcatgacgcaagctcagagatggtgtcccgagcccgacgcacatttccttcagtatacgctttacttcgtccggcatatcccacaactgccgaaacaaactcctcaccactatatcgccactcgtctgccgtgtgcgacccagtagtctcgcctgtgtagagagctgggcatcgccgttgctgagtgggcat

SEQ ID NO: 128960 - DNA, 840 bp, Homo sapiens
cagactaaatgtcctgtctgacagctccgaagagagcagtgttctcccagcacagtgttgagctctgagaatgacagactgcctcctcaagtggtccctgacccccatgtagcctaactggagacacctcccagtagggggcaacacacacctcatataggcagggtgcccctctgggatgaagtttctagaggaaggatcaggcagcaatatttgctgttctgcagcctccactggtgatacccaggcaaacagagtctggagtgaacctctagcaaactccaacagacctgcagctgagggacctgactcttagaaggagaattaacaaacagaaaagaatagcatcaacatcaacagaaatggacatcaacaccaaaaccccatctgtaggtcaccatcatcaaagaccaaaggtagataaaaccacaaagatcggggagaaaccagagcagaaaagctgaaaattctaaaaatcagagcacctcatctcctccaaaggatcgcagctccttgccagcaacggaacaaagctggacagagaatgactttgacgagttgacagaagtaggcttcagaaggtcggcaataacaaacttctccgagctaaaggagcatgttctaacccgtcgcaaagaagctaaaaaccttgaaaaaaggttagatgaatggcttactagaataaacagtgtagagaagaccttaaatgacctgatggagctgaaaaccatggcacaagaacttcgtgatgcacgcacaagcttcaatagctgattcaatcaagtggaaaaaaggatatcagtaattgaagatcaaattgatgaaataaagtgagaagac

SEQ ID NO: 128961 - DNA, 2586 bp, Homo sapiens
atgtgcccgaccctccctgcaggctgcgtcctgaggcttcccgaggcgggtctggcctccccagaagaaaggaatagcatcaacatcaacaaaaaggacatctacgccaaaaccccatctttaggccaccagcatcaaagaccaaaggcagataaaaccacaaagatggggagaaaccagagcagaaaagctgaaaattctaaaaaccagagcacctcttctcctccaaaggatcgcagctcctcgccagcaagggaacaaagctggacagagaatgactctgacgagctgacagaaaaagtccttacaagtacacctaccggccaggacacagctcctctggggttctttaggcgtcagctgccaaacgaccccacaagccacacagtggaggccacagaacaggtgcccagtgacaatgaggaccccgcaatgtgtctgcgggccagtgacaatgaggaccccgcaatgtgtctgcgggccagtgacagtgaggaccccgcaatgtgtctgcgggccagtgacagtgaggaccctgcaatgtgtctgcgggccagtgacaatgaggaccctgcaatgggcggcctcctgtgccaggcaatcctgctcaccttccaggagccaggcctctccccagggcctgcgtcctgtcagggtcagggacggcccctctgccatgctccggagtccctggtcccctcactccgttacgtcctgggtgtcacgggcttcctgggacccccactcagacctgcagctgggccagcgatgcccacccgtttctcctccacgtggtatacagaggtgcccaggctgctgctggggactctggagcccaggaggcatgtgacggcagggagtctctccagtgccgcccaccggattcctatagttagagctcctcgcccaagcccccagggcacctcactggcctcccaggtttccagccccagcacccccgaggccccagacatcccagcctgcccttctccgggccagaagataaagaaatccaccccggcagcaggtcagccgccccacctgacatccgcgcaggaccaggacaccatctctgagcttgcgtcatgcctgcaacgggcccgggagctgggggcaagagtccgggcgctgaaggccagtgcccaggatgctggggagtcctgcaccccagaggccgagggccgccctgaggagccatgtggcgagaaggcgcccgcctaccagcgcttccatgccctggcccagcccggcctgccgggactcgtgctgccctacaagtaccaggtgctggcggagatgttccgcagcatggacaccatcgtgggcatgctccacaaccgctccgagacgcccacctttgccaaggtccagcggggcgtccaggacatgatgcgtaggcgttttgaggagcgcaatgttggccagatcaaaaccgtgtacccggcctcctaccgcttccgccaggagcgcagtgtccccaccttcaaggatggcgccaggaggtcagattaccagctcaccatcgagccactgctggagcaggaggctgacggagcagccccccagctcacggcctcgcgcctcctgcagcgacggcagatcttcagccagaagctggtggagcacgtcaaggagcaccacaaggccttcctggcctccctgagccccgccatggtggtgccggaggaccagctgacccgctggcacccgcgcttcaacgtggatgaagtacccgacatcgagccggccgcgctgccccagccacccgccacggagaagctcaccactgctcaggaggtgctggcccgggcccgcaacctgatttcacccaggatggagaaggccttgagtcaattggccctgcgctctgctgcgcccagcagccccgggtctcccaggccagcactgccggctaccccaccagccaccccgcctgcagcctctcccagtgctctgaagggggtgtcccaggatctgctggagcggatccgagccaaggaggcacagaagcagctggcacagatgacgcggtgcccggagcaggagcagcggctgcagcgcttcagaacggctgcctgagctggcccgcgtgctgcggagcgtctttgtgtccgaacgcaagcctgcgctcagcatggaggtggcctgtgccaggatggtgggcagctgttgtactatcatgagccctggggaaatggagaagcacctgctgctcctctccgagctgctgccggactggctcagcctccaccgcatccgcaccgacacttacgtcaagctggacaaggccgcggacctcgcccacatcactgcacgcctggcccaccagacacgtgctgaggaggggctgtgagcctgggggccactgtggacagacgggggctttcaaaagctcgctggcctgggccccccagcatttttttttatgaacatgaaacactttggccttcctttccccagcgcccctaagggccaaaggcaaatgtgggctgcaggctgcccagcccaagggtctctggctgcgggcggtgggccccttcatggggctcccctggtgagatacacattaaaccggtttatgtgggc

SEQ ID NO: 128962 - DNA, 826 bp, Homo sapiens
gctttttttacctctaaagtgggattaatgaccatgtacacaactggcaagatcaaaggaaatgaactaggtgaatgtaaattcatgcaaacatactattttggcagtaatgatggcagacaccaaaatgattatattcttaccatccctttgcctttctacaatgctaagatgataagatcagcctgtggtgctgtcctgggaggttctcacacagaaaatgagataaaagacatcgtgcgaccaagatgcagagtcagaccagctggcctcaaccccaatgctgccattgactggctgtatgaagggggggcctccacagaggtagtctgcgagggcaggtttgggtgcctgtttttcgaggtctctgcctgtctggactttgagcacgtgcagcatgtcttccacgaggcagtgcgagaggcacggcgggagctggagaagagccccctgacccggcccctcttcatctccgaggagagggccctgccccaccaggccccgctcaccgcgcggcatgggctggccagctgcaccttcaacacgctctccaccatcaacctgaaggagatgcccactgccgcccaggccaagatggtcaccgtgaagtcatcccgggcccagagcaagcgcaaggcgcctaccctgactctcctgaagggcttcaagatcttctgaggccccctccccaggaagcctaggctcggtggctggacaggactgcagcaggacagggactggcttctcaccaccagcctttccgtctgatggacagcagaccccgcctccagcaccaagcagtgtccctacactcaattcactgggt

SEQ ID NO: 128963 - DNA, 2226 bp, Homo sapiens; identical to SEQ ID NO: 117488

SEQ ID NO: 128964 - DNA, 1665 bp, Homo sapiens
atggctgcgctgacactgaggggtgtccgggagctgctgaagcgtgtggacctcgcgacggtcccgcggagacatcgatataagaagaaatgggaaaggattcagccccttcctcaacctcgagctgcctctggcgaccgggcaaggttacagcgaccaccctgtccatactgccggcccaaaccctggcaaaaggctgccacagagcccaaattccctgctgttcgactggctttgcagaattttgacatgacttacagtgtgcagtttggagatctttggccatcaatccgtgtcagtctcctctcagagcagaagtatggtgcactggtcaataactttgctgcctgggatcatgtgctggtggatgtgccctgtaccacagaccgccactcccttcatgaggaggagaacaacatctttaagcggtcaaggaagaaggagcgacagatattgcctgtgctgcaagtgcagcttcttgcggctggactccttgccaccaaaccaggaggccatgttgtctattctacctgctcactctcacacttacagaacgagtatgtggtgcaaggtgccattgagctcctggccaatcaatacagcatccagaacccagacctggactcagaggcgctgctagccctgcccctgcctcagctggtgcagaagttacacagtagagagctggcccctgaggccgtgctcttcacctatgtgggaaaggcctgggaagtgaacaaagggaccaactgtgtgacctcctatctggctgactgtgagactcagctgtctcaggccacaaggcagggcctgctctatggcgtccctgtgagcctcaaggagtgcttcacctacaagcgccaggcctccatcgtcccctccatccctgccagcctgctctgcatcttgggtcattttgggcccttagaggaggtatcaggtccagaggccttccgaggggacactggtatacctgttttggcctgtgtgacagttgttggagtggacccttggctgcccacgggccctgactcactcccttctggtgcccatccctcctcccagggccaggactccacgctgggcttgagcctgaatgaaggggtgccggcggagtgcgacagcgtagtggtgcatgtgctgaagctgcagggtgccgtgcccttcgtgcacaccaatgttccacagtccatgttcagctatgactgcagtaaccccctctttggccagaccgtgaacccatggaagtcctccaaaagcccagggggctcctcagggggtgaaggggccctcatcgggtctggaggctcccccctgggcttaggcactgatatcggaggcagcatccgcttcccctcctccttctgcggcatctgcggcctcaagcccacagggaaccgcctcagcaagagtggcctgaagggctgtgtctatggacaggaggcagtgcgtctctccgtgggccccatggcccgggacgtggagagcctggcactgtgcctgcgagccctgctgtgcgaggacatgttccgcttggaccccactgtgcctcccttgcccttcagagaagaggctttcaaaggtgcccagcctcagctgctggcaccagggatgcaggaatcatttcccagcctgctgaccttcagcaaacagcagcctttctaa

SEQ ID NO: 128965 - DNA, 286 bp, Homo sapiens; identical to SEQ ID NO: 126109

SEQ ID NO: 128966 - DNA, 249 bp, Homo sapiens; identical to SEQ ID NO: 123610

SEQ ID NO: 128967 - DNA, 264 bp, Homo sapiens
gaacccgaaaatccagcagacaatgctagctattcctgtgaacctctagaggatctgcgcctgctcttcaggcgacaaccaatcgaagctgtaaaactacaaatggttcttcaaatggagccccagatgcagtccatgactaagatctaccgcggacccctggactggcctgctagcccatgctccaatgttgatgacattgaaggcacccctcccaaggaaatctcaactgcacgacccctactatgccccaattcagcatga

SEQ ID NO: 128968 - DNA, 287 bp, Homo sapiens
gctgccacagagcccaaattccctgctgttcgactggctttgcagaattttgacatgacttacagtgtgcagtttggagatctttggccatcaatccgtgtcagtctcctctcagagcagaagtatggtgcactggtcaataactttgctgcctgggatcatgtgctggtggatgtgccctgtaccacagaccgccactcccttcatgaggaggagaacaacatctttaagcggtcaaggaagaaggagcgacagatattgcctgtgctgcaagtgcagcttcttgc

SEQ ID NO: 128969 - DNA, 4317 bp, Homo sapiens
tcagatcagaaatttgtctccgacgtaaaggatagccataatgtgatagggaattcccagaagatgctgatgctgctggtccagaaaccacactttaaacaccattgtgtttggaggaaggtgagcaaggtggaggctaggttgaaaatgtttaacatctgccatgcctgaagcaccagtgacggtggggctcactactcctgtcatgcctgcatttccagatgttgagatgatgggaactgaagtttcagtaatgcctgtagtaaaaggttcggtgagaggacctagagttgttcctgtgcttgggccaccggtaaccagtgtaattgctgctccggtgcttaatatggtggtagctgttgtagtggaaacttctaaaagtgaagaaaatttctggccaacgagctgatctttgcatgtttttgcagtcactgtgccacaaggttcataatgccatctgcattccccaggcgcattgtagtaatcacagtagacaggacacagatttggttttctccatgagacacagactccaactgcactacacgcctctgcgtacatagccacggcagtgcagaatcccaggtacttcccctccatgtcacatgcacaggcttcttcaatgcacacatcatggtaagcactggggtcaaccttgttgtggcagtctctgaaggtgctgtctctgaggatctcacatttccgcacagcccaggctttacagtatgggtttgaatcacatgggaaagtctgagccactgtatctgaacattcttggcttgttttccaactattcccaaattccagtgctccagaagctactgaagagtatcttgttgtgaaatcatccttgagatcaccattgttatttccacaaagaccacacactttgccctcaagaaatgaatactggcagagaccgtcaaaactgtaactcttcccatcaaaagttctaacatgaccttccccatagatgtggcagatggtttgacattcattttgggtacaactccaagaccctttaatgcaggtacatttattgtcatcaatatggatgagtttgcctggttgcatgacctcgtcgtttatgtaacagtcacactgagatttcagtacacagtttccttcattattctggtacattgcatcagggcaggtgcatccatcaactggaacatcttctacatcacagctcctatctctttctgacaaggatcggcaagaactattacaggcttttacattgtacttgaacactaggccacttgggcaagaatgttcacataggccagttctccatcccactatgtatgtttccttctcagcacacgctttcacatagttgcctaaaattgtacataggcagtcctgactgttttcacaagtgcaagtatattttttgcattcctcatgatagggtttagggttcacaattgggtggcaggaagccaaaggcccacttgaatcaagaagaattccacagtgcctttcagcaaatttttctttttctatactaatacatgaagaggggtttcctttaggacaggacatcatttcccaagagttagcaaatgcctgagatgtcttctccaatatattctgacttgacatgaaatcatcctctgctttgttgttgtaggaaccacagagtcccacagtgtctgtgaattggttgggtggcatagaaacatacaattgcatcacaggaacaatttgtatttgtagtttcacatgaaagtatgtttctacttgaaggtatgaggaagatgcattgaatatctgtattttatctgaatagtaataaccttgatttctaatcttgtcatttgtgactgttccatcactgttgaatacgtatttgtcaactggaacagagtgaacggccaggaagtggcagtttccaggaaagttgtacttaacaccatcaaaggtggtaagggaacttccttccaccttacatcttccagggcataatgcttcggtgcaagaccactttgcatcttggcatgtgcactgagaaccacaaggaccttctcggacttctcctggctgatacactgttccactggattcacagggacattcagcttttaatacacattttcctttctctccaatgtcatccaacagataaccttctgggcaggtgcagccgctcacacattcactgtcttgaaaaggagccacattagaacaagttgcagggttggagggtccacattctttgtagatatgttgttctggacatctttgtgttccacaaaccacatcggagtcgcttcgccaggattcaaaggtgccaggaccatctgaggcacagaggcgggacagttctgaataagtgtcacatgtagatgttttgtctctagtttggcagtattcatcaatgcagatcattttgtagtcattggatagagcagcaacctttccacatttctcaaagtaggttccaataattttgttacagtgctgtattccatcttcacaaacttcatagcttttaccaacagcattgggacaatcaccaggaattttactattggcaatgtgctcattaatatcttgccctgaaccactaaggccagtttcaccaaattcatttagtccagaagcaccaacaccaagttcatctgcactcttacctcctccaccacttccagaatcagaagaccaagtgtttcctcctgagtcactgacatcagatccaggactcaagtttccagcctcatcagggtcactgcttctctttctattcccaccagttctactgagttcaacttcatgttgatcagatgaccccaatatgactcctgaatcttcagagatgccactagaattttcaaacccatttcttgcacttgaatcacctaaatcactagaactagattctctagtaacttttattccattttcactaagctcattaccaccaaatttccttgaaccagaatacttaaaatcaaatccagctccaactttttttcctccaagtccaaattcaagagactcaagcattcccactgagctacttgaatcagatccaaaacctttgaatccagcctcagcagatacactgccactcattccattccctccaatttcattgattccaaatccctcttgaccagaatcccataaattggatatcgaatttagagagccaccaccaacaaattgattctcacttctgaaactggtatcacctagatcaatggaaacagatcctccagaactactcgtttgatttccttcaactgttttgctactaatgccagtgtcaccaaatgaattcgaatcagaaacttcaaaaccaaatgcagcatcacctttccctgctccaagtttcaaaccagaagaaccagttccaactgcatcaggtccaaagactatggtttcacccccagcagatccactgcctctagtttctctcccatcagctttactgacttccaatcccttttcatcagatatcccccaaccaaatcccacatccagagaggcaccactgctactaaagccagcaccatatcttgtgttggtgctatctgctgggctgtcttctgaccttgaattcccagcatcccagcgttctctggacttgtcttcatcctctcctgtagcaccaaattcaaagctaaagagtggcttttttttgtctgagtcaccagaggatgaactaccataaaaaaagccacctggtggggtgtcttctgactttgaacctccagcatcctgactgtctccggacttgtcttcagcctttcctggagcaccaagtcctaagctaaagaatggctttgtcctgtctgagtcaccggaggatgaactactgttaaaaaagccacctgctggggtgtcttctgactttggactcccagcatcctgacgttgtctggacttgtcttcagtctctcctggagaaccaaattccaagctaaagagtggcttttttctgtccaagtcaccagaggatgaactaccataagagaagccacctgatctgcttgctgctattttaccatctttgaagaagcaccaaagtgccacaaccaagtaccataagatcaacttcatggttgtgatttgggaccctgaatggacccttaagacagctaggcaattatattttctagtccatttgctgtcatattcttctatttcatatcttctctcctctccaacatccaacacctctttcccatcatccctttctgttaataacattatttccagttttacttcgatgtcatcaacattggagcatgggctagcaggctggtccaggggtccacagtacatcttagtcatggactgcat

SEQ ID NO: 128970 - DNA, 333 bp, Homo sapiens
tcaaccaaccacctgatactgtcgctcactttttgcctgataagacagcacgaacaatcgagttcctttggccagtgccccgccctgccactcatcgcagtactgttgtaattcattaagcattctgccgacatggaagccatcacaaacggcatgatgaaccctgatcgccagcggcatcagcaccttgtcgccttgcgtatatatttgccccccctcattaacattggagcatgggctagcaggccggtccaggggtccacggtagatcttattcatggactgcatctggggctccatttgaagaacatttttagttttacagcttcgatt

SEQ ID NO: 128971 - DNA, 1842 bp, Homo sapiens
aaggtagatgctataaaagtaccatggttcaaccatattgctgttatcagtccagcatttctgctttataatgtgagtcaaaataatcctcttttctttataaattacccagtctcaggtattcctttatagcaacgcaaaagagaacacgaggcttgccaccatcttggaagtggcctgccaccattgtggaagtggcccacaacctcaggtgttacgctatctgcggaagggctttctaacaacccccaacccttctgggttggggacgttggtctgcttggagccagcttccactttcaattttcttggggaatccgagggctgactagaggcagaaagcgttgtgtccttaggcacctgggctgtaacccagggagtcttatccctggtgtccctcctgattcaggtatgcagctctcgacatgggcagttatgtgggacccgttccccactacccttgccagggccccaagtacaattccccacaggccagcaggcagttcccagtgtagaccctcattgggacacagaatcagaacatggaaattggtgccgcagacatttgctaacttgtgtgctaggactaaggaaaactaggaagaagcctatgaattatgcaatgatgtccactataacacagggaaaggaagaaaatcctactgcctttctggtgagactaagggaggcattgaggaagcatacctctctgtcacctgactctattgaaggccaactaatcaggcaagcggactttggagtctctggaaaagggaaaagctgggcaaatcgaatgcctaatatggcttgcttccagtgtggtctacaaggacactttaaaaaagattgtccaagtagaagtaagctgccccctcgtccatgccccttatgtcaagggaatcactggaaggcccattgccccaggggactagtaaaaccatgcaatagcccctgcaatactccagttttaggagtacagaaacctaatggacagtggaggttagtgcaagatctcaggattatcaatgaggctgttcttcctctataccctgctatacctaacccttgtactctgctttcccaaaaaccacagaaagcagagtggtttacagtcctggaccttaaggatgcctttttctgcatccctgtacaccctgactctcaattcttgtttgcctttgaagatcctttgaacccaatgtctcaactcacctggactgttttaccccaagggttcaagcatagcgcccatctatttggccaggcattagcccaagacttgagccaattctcatacctggacactcttgtccttcagtacggggatgatttaattttagccacccgatcagaaacctggtgccatcaagccacccaagcactcttaaatttccttgctacctgtggctacaaggtttccaaacaaaatgctcagctctgctcacagcaggttaaaaacttagggctaaaattatccaaaggcacaagggccctcagtgaggaacgtatccagcctatactggcttatcctcatcccaaaaccctaaagcaactaagagggttccttggcataacaagcttctgccgaatatggattcccaggtacagcgaaatagtcaggccattatacacactaaggaaactcagaaagccaatacccatttagtaaggattactattggctgtacagaaacctaaagaggtggcagtcttacactgccagagtcaccagaaaggaaagggaaacagaaaggaactgccaagcggatattgaagccaaaagagcggcaaggcaggaccctctattagaaatgcttatagaaggacccccagtccttctat

SEQ ID NO: 128972 - DNA, 759 bp, Homo sapiens; identical to SEQ ID NO: 126451

SEQ ID NO: 128973 - DNA, 1920 bp, Homo sapiens
atgactcatcagtcaaagatctcaccaagcttcctgctccagcagagaacccttccggagtggttcctcctggataagaataagaaaaaaacaggaataactctaggagtccttacacaggtccaaggaacgagcttgcaacccgtggcagacctgagtaaggaaattgatgtagtggcaaagggttggcctcattgtttatgggtaatggtggcagtagcaatcttagtatctgaagcagttaaaataatacaggaaagagatcttactgtgtggacatctcatgatgtgaacagcatactcactgctaaaggagacctgtggctgtcagacagccatttacttaaataccagggtctattacttgaagggccagtgctgcaactgtgcacttgggcaactcttaacccagccacatttcttccagacattgaaaaaaagatagaacgtaactgtcaacaggtgattgctcaaacctatgccgctcgaggaaaccttctagaggttcctttgactgatcctgacctcaacttgtatattgatggaagttcctttgtagaaaaaagacttcgaaaagcagggtatgcagtggtcagtgataatggaatacttgaaaataatcccctcactccaggaactagcgctcagctggcaaaactaatagccattactccggcactaaaattagaaaaagaaaaaagggtaaacatatatacagactctaagtatgcttacctagtcctccatgcccatgcagcaatatggagagaaagggaatacctaacttctgagggaacatctatcaaacatcaggaagccatcaggagattattatcggctgtacagaaacctaaagaggtggcagtcttacactgctggggtcatcagaaaggaaaggaaagggaaatagaagggaaccgccaagcgaatattgaagccaaaagagccacaaggcaggaccctccattaaaaatgcttatagaaggacccctagtatgggcaaggcaatttacctctatagaagggtgtgccctcacagatggagcaatggcctgggaagtgaacaaagggaccaactgtgtgacctcctatctggctgactgtgagactcagctgtctcaggccccaaggcagggcctgctctatggcgtccctgtgagcctcaaggagtgcttcacctacaagcgccaggcctccatcgtcccctccatccctgccagcctgctctgcatcttgggtcattttgggcccttagaggaggtatcaggtccagaggccttccgaggggacactggtatacctgttttggcctgtgtgacagttgttggagtggacccttggctgcccacgggccctgactcactcccttctggtgcccatccctcctcccagggccaggactccacgctgggcttgagcctgaatgaaggggtgccggcggagtgcgacagcgtagtggtgcatgtgctgaagctgcagggtgccgtgcccttcgtgcacaccaatgttccacagtccatgttcagctatgactgcagtaaccccctctttggccagaccgtgaacccatggaagtcctccaaaagcccagggggctcctcagggggtgaaggggccctcatcgggtctggaggctcccccctgggcttaggcactgatatcggaggcagcatccgcttcccctcctccttctgcggcatctgcggcctcaagcccacagggaaccgcctcagcatcttatgtttcttatccagcaagagtggcctgaagggctgtgtctatggacaggaggcagtgcgtctctccgtgggccccatggcccgggacgtggagagcctggcactgtgcctgcgagccctgctgtgtgaggacatgttccgcttggaccccactgtgcctcccttgcccttcagagaagag

SEQ ID NO: 128974 - DNA, 987 bp, Homo sapiens; identical to SEQ ID NO: 126125

SEQ ID NO: 128975 - DNA, 1281 bp, Homo sapiens; identical to SEQ ID NO: 122633

SEQ ID NO: 128976 - DNA, 938 bp, Homo sapiens
gcatgcagctctcgacatgggcagttatgtgggacccgttccccaccacccttgccagggccttagaactgataacccagtactttaacaactggaactgggtctacaacataatatatcaagatgaaaatgaattgagtaaattaaagggaggcacatattcctatagcggcaaatgggggcaacaagtgaacgaccctccactgtgtttccaaaatccacctacagagacagagaggagagagacagagagagacagagaggtgggggtggtggatgggaaatgttccccccaaggcaaaaaagctcctaagatatattctggagaatttggcccagtcagagtgcacgtaactctttccctctcagacttgaaacaaattaaaatagacctaggtaaattctcagataaccctgatggctacattgatgttttacaagggttagggcaatcctttgatctgacatggagagatataatgttactgctaaatcagacactaaccccaaatgagagaagtgccgccgtaactgcagcccgagagtttggtgatctctggtatctcagtcaggtcaatgataggatgacaacagagaaaagagaacgattccccacaggccagcaggcagtttccagtgtagaccctcgctgggacacagagtcagaacatggagatgggtgccacagacatttgctaacttgcatgttagaaggactaaggaaaactaagaagaagccgatgaattactcaatgatgtccactataacacagggaaaggaaaaaaatcctaatgcctttctggagagactaaggcaggcattgaggaagcatacctctctgtcacctgactctattgaaggccaactaatcttaaaggataagtgtatcactctgtcagctgcagacattagaaaaaacttcagaagtccaccttag

SEQ ID NO: 128977 - DNA, 612 bp, Homo sapiens
caagcttagaaattgttagtcggcctaggaaatccagctagtcctgtctctcagtaccccctctcaacaggaaaacccaagtgctgttggggaggttggccgtcgactgctccaactgcttcctgcttaattggggcatagtaggggttgtgcatttgagatttcctcgggaggagtgccttcgatgtcattaacatcggagcatgggctagcaggctggtccagggatccgcggtagatcttagtcatggactgcatctggggctccatttgaagaacgatgtgttgttttacagctttgattctggaagagacaaacttaacaaggaggttaaagatacagggattgaaatgtatggcctgcagtgcaggggattattcctttggcacactttacaagctttgactatctgcttgacagttttgaaaaggcctggtccagtaaataataatttggccatctgatgggtgctatcaatggttaagtcgaaggtttggtgaagggttttaagtaatttctattggttagctgcaggcaaaagtatttttccttcttcggtggcctgccattctgaggggatgaaactatggccctcgtggggtcccccattc

SEQ ID NO: 128978 - DNA, 753 bp, Homo sapiens
tttcgtagcacgccgatatggctgcgctgacactgaggggtgtccgggagctgctgaagcgtgtggacctcgcgacggtcccgcggagacatcgatataagaagaaatggcccggtcgccctcacccctcggaaaataccatagcgaccttgcctgcactcctgggtctccgccgccttgcaggaaaggattcagccccttcctcaacctcgagctgcctctggcgaccgggcaaggttacagcgaccaccctgtccatactgccggcccaaaccctgggcaaaaggctgccacagagcccaaattccctgctgttcgactggctttgcagaattttgacatggcttacagtgtgcagtttggagatctttggccatcaatccgtgtcagtctcctctcagagcagaagtatgggggcactggtcaataaactttgctgcctgggatcatgtaagtgctaagctggagcagctgagtgccaaggattttgtgaatgaagccatctcccactgggaactgcagtctgagggtggccaatctgcagccccatcccctgcctcctgggcctgcagtccgaaccttcgatgcttcacttttgacagaggggatatcagtcgcttccctcctgccagacctggcagcctgggtgtcatggagtactacctgatggatgctgcctccttgctgcctgttctggccctcggcctgcagcctggggacatcgtgcttgacctatgtgcagctcctggggga

SEQ ID NO: 128979 - DNA, 1587 bp, Homo sapiens
atggctgcgctgacactgaggggtgtccgggagctgctgaagcgtgtggacctcgcgacggtcccgcggagacatcgatataagaagaaatgggctgccacagagcccaaattccctgctgttcgactggctttgcagaattttgacatgacttacagtgtgcagtttggagatctttggccatcaatccgtgtcagtctcctctcagagcagaagtatggtgcactggtcaataactttgctgcctgggatcatcctggggacatcgtgcttgacctatgtgcagctcctgggggaaagacactagcgttgcttcagactggctgttgcctcacctggagccggaagcgctgcgccgccctgtccatgttctccaggcccgctcgctgcctctgtcgcgcccggaccaccgcgccccgcgccgtccggcgcccggaccagcgcagggccacggccgccgccacgaagcagcaggccagggcgaccccggaggcgccaggcagcgcggcccacagctcgtactgcaccatgatcccttcagcctgctgctgcctaccgcgacagttgaagccgccgcacgcgcagcccgcccgctccgccgcaaaacccggactggatcagccgggatcccacgcccgcctgcgcgggaggggcggggaagcgcgccagagcctagaggctatcagaggcggcccgtctggcatcgcccccagcgacatcccgctccccgccaagccgagcaggcgggtgattgctcaaacctatgccgctcgaggaaaccttctagaggttcctttgactgatcctgacctcaacttgtatattgatggaagttcctttgtagaaaaaagacttcgaaaagcaggaatcaaagctgtaaaactacaaattgttcttcaaatggagccccagatgcagcccatgactaagatctactgtggacccctggaccagcctgctagcccacgctccaatgttgatgacatcgaaggtactaatgcttcagactttcctttcctatcccaagtattagagcaagttgtatctccaaagggatctaaggaagctcaatgctgcgtcctcaggcctctaggctgtgaatccaacttgaagcaaattaaaatagacctaggtaaattctcagatacccctgatggctatattgatgttttacaagggttaggacaaccctattatctgacatggagagacataatgttactgctagatcagacactaaccccaaatgagagaagtgccgccataactgcagtccgagagtttggtgatctctggtatctcagtcaggtcaatgataggaagataacagaggaaagagaacaattccccacaggccagcaggcagttcccagtgtagaccctcattgggacacagaatcagaacatggagattggtgccacagatatttgctaactgacgtgctagaaggactaaggaaaactaggaagaagcctaataaattagtcaatgatatccactataacacagggaaaggaagaaaatcctactgcctttctggagagactaagagaggcattgaggaagcatacctcactgtcacctga

SEQ ID NO: 128980 - DNA, 1004 bp, Homo sapiens
atgttctccaggcccgctcgctgcctctgtcgcgcccggaccaccgcgccccgcgccgtccggcgcccggaccagcgcagggccacggccgccgccacgaagcagcaggccagggcgaccccggaggcgccaggcagcgcggcccacagctcgtactgcaccatgatcccttcagcctgctgctgcctaccgcgacagttgaagccgccgcacgcgcagcccgcccgctccgccgcaaaacccggactggatcagccgggatcccacgcccgcctgcgcgggaggggcggggaagcgcgccagagcctagaggctatcagaggcggcccgtctggcatcgcccccagcgacatcccgctccccgccaagccgagcaggcgggtgattgctcaaacctatgccgctcgaggaaaccttctagaggttcctttgactgatcctgacctcaacttgtatattgatggaagttcctttgtagaaaaaagacttcgaaaggcggcttacgcagtgttcagtgataatggaatacttgaaagtaatcccctcactccaggaactagcactcagctggcagaactaatagccgtcactcaggcactagaattagaaggaaaaagggaacccgaaaatccagcagacaatgctagctattcctgtgaacctctagaggatctgcgcctgctcttcaggcgacaaccaatcgaagctgtaaaactacaaatggttcttcaaatggagccccagatgcagtccatgactaagatctaccgcggacccctggactggcctgctagcccatgctccaatgttgatgacattgaaggcacccctcccaaggaaatctcaactgcacgacccctactatgccccaattcagcaggaagcagttggagcagtcgacggccaacctccccaacagcacttgggttttcctgttgagagggggtactgagagacaggactagctggatttcctaggccgactaacaatttctaagcttagg

SEQ ID NO: 128981 - DNA, 4317 bp, Homo sapiens; identical to SEQ ID NO: 117716

SEQ ID NO: 128982 - DNA, 395 bp, Homo sapiens
  misc_feature (1)...(395): n = a,t,c or g
ggagcttcctattgactgctcccctgccctagtgcgggtnatcaagaccacatctgctgtgaagaacctgcagcagctagcccaagatgcggacctggccttgctgcaggttttccagcttgcagctcatctggtgtactggggcaaggcatcatcatctacccgctgtgtgagaacaacgtctacatgctgtctcccaatgccagcgtatgtctgtactccccgctggccgagcagttctcccaccagttcccatctcatgacctgccgtccgttcttgccaagttctncttgccggtctccttgttagaatttaggaatcccctgggcccccgctgtgcaggagctgcacacctatgtctgtctgatggccttcacccagcgaggaggagccc

SEQ ID NO: 128983 - DNA, 561 bp, Homo sapiens
gaagttttcccagcttgcagccaattggtttactgggggaagcccatcacaatctacccgctgtgtgagaacaacgtctacatgctgtctcccaatgccagcgtatgtctgtactcccccgctggccgagcagttctcccaccagttcccatctcatgacctgccgtccgttcttgccaagttctccttgccggtctccttgtcagaatttaggaatcccctggcccccgctgtgcaggagacccagctcatccagatggtggtgtggatgctgcagcgccggcttctcatccagctgcacaccatatgtctgcctgatggcctcacccagcgaggaggagccccgtccgcgagaggacgacgtccccttcactgcccgggtcggcggtcgcagcctcagcacgcccaacgccctcagctttggctccccaaccagcagcgatgacatgaccctcaccagccccagcatggacaactccagcgcagagctacttcccagcggggactcgccactgaaccagaggatgacggagaacctgctggccagcctgtcggagcatg

SEQ ID NO: 128984 - DNA, 2771 bp, Homo sapiens
atgccaggggcaccctcacagcctgtgccccacaagccatcccgggcacctctcacaacctgtgccccacaagccatcccggggcaccctcacagcctgtgccccacaagccgtaccgggcacctcttgcagcctgtgccccacaagccatccggggcaccctcacagcttgtgccccacaagccgtcccgggcaccctcccagcctgtgccccacaagccatcccaggcaccctcacagcttgtgccccacaagccgtcccgggcacctctcacaacttgtgccccacaagccgtcccgggcaccctcacaacttgtgccccacaagccatcccgggcacctctcacaacctgtgccccacaagccgtcccaggcacctctcacaacctgtgtcccacaagccgtcccgggcacctctcaaacctgtgccccacaagccgtcccgggcacctctcaaacctgtgccccacaagccgtcccgggcacctctcacaacctgtgccccacaggccatcccgggcaccctcacagcctgtgccccacaagccgtcctgggcatctctcacagcctgtgccccacaagccgtccagggcacctctcacaacctgtgccccacaagccgtcctgggcacctcttgcagcctgtgccccacaagccgtcccaggcaccctcacagcctgtgcccaagccgttggaaataccaagagcttccttgcaccaacagcttttcacctttctttctgcttctggctagtcttgtgtcccgcctccaccccaagcctgtgctgttattttctaataatgtgggtgtggcagctcagcacccatcctgtctacaacatgacattagcctccatctgtgtcctggtgctcccattgatgggtccccgattccaggccacagccgcggcggctgggtgctgtgcaggtaccggctcgcgccgggagggggcgctgttccctaacctgctccgagtcagccccgagccctttaacgccgcccgcagagcacggcaagaaggctgctcctgggagaggctttactcaaacacggggaaggtcgcctggggatcccgcggccacccacccacagtttatcggtactcggaaaccaacgccgagataacgtggctcaagaacttgttcagcgacgcctgcagcgcgggggctgaagtctccggggtagtgccgggcgaagggggcccatcacggcaagccgatcaccctggaagcttgcccgggttcactcgcaactggcacccgtgcaggtggttcaacgccgtcaagcacgtggggctggccagcaggttctccgtcatcctctggttcagtggcgagtccccgctgggaagtagctctgcgctggagttgtccatgctggggctggtgagggtcatgtcatcgctgctggctgtgggggacatgggtcagggtgaccaagtggaattccaggacacccagggggaacagcgagggcagagccagcagccagcctccaatgacacccctaactcctacaagggttaggatctggcacttactcagatacttctggagacaaagacttgagaacacccagctcgtctgtctccaacaccgtatcctatctggccctgctcttgatctctgcccagaactcagtggaggggaggatggcaaaaccaccttcacacaaggctatgacacctgcagcccacagggaaagccactggccctgccacagatgcagccagggtgggctctatggggagggaacaactgctcaagtgttgggtcactggccaagcatctgcaggtggcccggcagcttacttttgggtcctgctgggcacgtaacacttgcacggcaagcccccaaaaccaaggagaagcaggtggcagtgctgagggctctcaaatcagaaccaacagccaggcaggtgcatacctgatgcacacccggtgcaggacctcgtgcaggacctggtgcatacctggtgcagggttccctgcacttcgtatgttccgtgtgtttgagtcccaggtgcatacctggtgcatacccggtgcatacctggtgcaggacctggtgcatacccggtgcatacctggtgcaggacctggtgcatacctggtgcagggttccctgcacttccccctaccatgccctgctgctgctcagtgatgagaagtccttgctgggtgagcttcctattgactgctcccctgccctagtgcgggtgatcaagaccacatctgctgtgaagaacttgcagcagctagcccaagatgcggacctggccttgctgcaggccatgggatcagctgtggctgctagtcatgtgggcgtggcccagagccacgggaccattgaaatactgcctgagggtgggagcaggtggtgcctgtgggtggcgccctcgtctggtggcggtcagcagggcgttgctgctggtgtggcggtgcggaagcccctggggcccagccctggcatggcaaaagtccccagaatacagcaccaaggtcttggaaaagcaatgaatgcctttgctctggaggcgtgcctactgcatgggcaaagtcacaactatgacaagagtgggaaggctgtatctgctaagtatgacgcatactcagaacaattgagggacaggacgatgttcagggacagccaagccctgagcagggcccagaatcttagtaatgccatcactgatcctgcttgtatgcagagagctgattggcaggctatggtgtacaagttccctttcatcctgctaacaagatga

SEQ ID NO: 128985 - DNA, 364 bp, Homo sapiens
catccctgacacattaacgtttatacttcaagtacagcacagcgccaagccctttctctagccccatctgtgtgcatcctactctgtctttccctgatgatggccactccagatgtcatgctccacttcaaacacacctctacacatcatctccaccactccctgggtggggtcaggacctcaccagctacaactccccaccttctttcccagggaccacagtacattgcttataccttcctctgttgagcagttactttatcctttcttgtgatagggagcttatatatctagctcaccaactaaatcataagctctttcaggaaaagctgaaaccaattttgctatcttcagctcatcacca

SEQ ID NO: 128986 - DNA, 1634 bp, Homo sapiens
atggagattcctgctgtgatcttaacagttgctcccatcctccacttaactagctgtggtttccctgtgactggagatggtctaaaacaagcagagggcaaatgtgctcctgaagaatggaatcccacaaagttcataaaactaacagacaatcaagcatgctttgcttgtggcttatggcctttatccgagattcaaaggagaacctcaaggactgttactataatatccaggatatcagccctaagagaaaagggaaatggaagaaagcctaccagcatttcaggatcagtaaatgaaatgagacaggttctggtgaaagaccaggtgtcaatgccaagagttctccctacaattatttttgttccagacgaggcaggcttcagtgcaggagccgtgtggccatgtgcagctcctctgtggggcagcagctggactccactaaaagtggaaaactgctcgttctacattagactctctttcgcaatttcggtaggtggtgatgagctgaagatagcaaaattggtttcagcttttcctgaaagagcttatgatttagttggtcaccaacatcaaagaccaaaggtagataaaaccacaaagatggggagaaaccagagcagaaaggctgaaaattccaaaaaccagaacatgtcttctcctccaaaggaacacaactcctctccagcaagggaacaaaactggatggagaatgagtttgatgagttgagagaagtaggcttcagaaggtcggtaataacaaacttctccgagctaaaggagcatgttctaacccatcacaaggaagctaaaaaccttgaaaaaaggttagatgaatggctaactagaataaacagtgtagagaagagcttaaatgatctgatggagctgaaaaccacattacgagaacttcgtgaagcatacataagcttcaatagccaattcgaccaagcggaagaaagggtatcagtgatcgaagatcaaattagtgaaataaagcaggaagtgaagtttagagaaaaaagagtaaaaagaaatgaacaaagcctccaagaaatatgggactatgtgaaaagaccaaaatctacgtctgattggtatacctgaaagtgacgaggagaatggaaccaagttggaaaacactctgcaggatattatccaggagaacttccccaacatagcaaggcaggccaacattcaaattcggggaaattacagagaacgcccacaaaggttgcctcctcgagaacagcaactccaagacacataattagtgtgggttcaccaaagttgaatatgaagggaaaaaatattaagggcagcccagagagaaaggtcggggttacccacaaaggggaagcccttcagactaacagcagcggatctctcggcagaaacttctacaagccagaagacagagtgggggccaatattcaacattcttaaagaaaagaatttttcaacccagaaatttcatatccagccaaacctaagcttcataagtgaaggagaaataaaatactttacagaccaagccaaatgcttgagagatttttgtcaccaccagggccttctcttgcctgccctaaaagagcaccaggcctgccctaaaagagctgctgaagggaagcact

SEQ ID NO: 128987 - DNA, 1429 bp, Homo sapiens
atggtgctggcagctggtgatcccgtggaaaaaggcatcacgtgggcaagagaaaatgcgggtatctacatcagctgtacaatgatgaaactatctatgattcctattggtgatcaaagttataggaaccttatacctctgaagtttgttgcctgcattttaatagaaggaaacgctaaatgttggcctttaccagagtttgatccaagccagattcgactgattgtatatcaagactgtgaaagacgagggagaaatgttttgtttgactccagtgttaagagaagaaatgaggacatatcagtatcgagaataaaatacctaggaatccaacttacaagggatgtgaaggacctcttcaaggagaactacaaaccactgctcaacgaaataaaagaggacacaaacaaatggaagaacattccatgctcatggatagaaagaatcaatatcgtgaaaatagccatactgcccaagaaactcggcagtgatgctcaagttaaagtctttgggaaatgctgccaactgaaacctggaggagacagttcttcctctttagatagttctgtgacttcatcttctgatataaaagaccagtgtcttaagtaccagagaacagtggatctctcagcacagctttcaagctctggtaagggacagactacctcctcaagtgggtccctgacccctatgactcctcactgggagatacctcccagcggtggtcaacagacatcacatacaggagagctccggctggcatctggcaggggctcctctggaatgaagcttccagaggaagggacagacaggaatctttgctgttctgcagcctccagtggtgatacccaggcaaacagggactggagtggaccaccagcaaacaccagcagacctgcagcggaggggcctgactgtgacagggagaatggaaccaagttggaaaacactcttaaggatattatccacgagaactttcccaacatagcaagacaggctaacattaaaattcaggaaatacagagaacacaacaaagatactgctcgagaagagcaaccccaagacacataatcgtcagattcaccaaggttgaaatgaaggaaaaaatgttaagggcagccggagagaaacattgggttatacacaaaggaaagtccatcagactaacagtggatctctctgcagaaactctacaagccagaagagagtgggggaccaatattcaacgttcttaaagaaaagaattttcaactcagaatttcatatccagccaaactaagcttcataagcgaaggagaaatgaaatcctttccagagaagcaaatgctgagagactttgtcaccatcaggcttgccttacaagagctcctgaaggaagcactaaatatggcaagggaaaacggtaacagccactgcaaaaacatatga

SEQ ID NO: 128988 - DNA, 3852 bp, Homo sapiens
atgacaggatcaaattcacacataacaatattaactttaaatataaatggactaaattctgcaattaaaagacacagacgggcaagttggataaagagtcaagacccatcagtgtgctgtattcaggaaacccatctcacgtgcagagacacacataggctcaaaataaaaggatggaggaagatctaccaagcaaatggaaaacaaaaaaaggcaggggttgcaatcctagtctctgataaaacagactttaaaccaacaaagatcaaaagagacaaagaaggccattacataatggtaaagggatcaattcaacaagaggagctaactatcctaaatatttatgcacccaatacaggagcacccagattcataaagcaagtcctgagtgacctacaaagagacttagactcccacacattaataatgggagactttaacaccccactgtcaacattagacagatcaacgagacagaaagtcaacaaggatacccaggaattgaactcagctctgcaccaagcggacctaatagacatctacagaactctccaccccaaatcaacagaatatacattttttttagcaccacaccacacctattccaaaattgaccacatagttggaagtaaagctctcctcagcaaatgtaaaagaacagaaattataacaaactatctctcagaccacagtgcaatcaaactagaactcaggattaagaatctcactcaaagccgctcaactacatggaaactgaacaacctgctcctgaatgactactgggtacataatgaaatgaaggcagaaataaagatgttctttgaaaccaacgagaacaaagacaccacataccagaatctctgggacgcattcaaagcagtgtgtagagggaaatttatagcactaaatgcctacaagagaaagcaggaaagatccaaaattgacaccctaacatcacaattaaaagaactagaaaagcaagagcaaacacattcaaaagctagcagaaggcaagaaataactaaaatcagagcagaactgaaggaaatagagacacaaaaaacccttcaaaaaatcaatgaatccaggagctggttttttgaaaggatcaacaaaattgatagaccactagcaagactaataaagaaaaaaagagagaagaatcaaatagacacaataaaaaatgataaaggggatatcaccaccgatcccacagaaatacaaactaccatcagagaatactacaaacacctctatgcaaataaactagaaaatctagaagaaatggatacattccttgacacatacactctcccaagactaaaccaggaagaagttgaatctctgaatagaccaataacaggctctgaaattgtggcaataatcaatagtttaccaaccaaaaagagtccaggaccagatggattcacagccgaattctaccagaggtacaaggaggaactggtaccattccttctgaaactattccaatcaatagaaaaagagggaatcctccctaactcattttatgaggccagcatcattctgataccaaagccgggcagagacacaaccaaaaaagagaattttagaccaatatccttgatgaacattgatgcaaaaatcctcaataaaatactggcaaaccgaatccagcagcacatcaaaaagcttatccaccatgatcaagtgggcttcatccctgggatgcaaggctggttcaatatacgcaaatcaataaatgtaatccagcatataaacagagccaaagacaaaaaccacatgattatctcaatagatgcagaaaaagcctttgacaaaattcaacaacccttcatgctaaaaactctcaataaattaggtattgatgggacgtatttcaaaataataagagctatctatgacaaaccaacagccaatatcagactgaatgggcaaaaactggaagcattccctttgaaaactggcacaagacagggatgccctctctcaccgctcctattcaacatagtgttggaagttctggccagggcaatcaggcaggagaaggaaataaagggtattcaattaggaaaagaggaagtcaaattgtcccctctttgcagatgacatgattgtatatgtagaaaacccccttccgtctcagccccaaaatcttctttaaggctggttaagcaacttcagcaaaagtcttcaggttacaaaatcaatgtgcaaaaatcaccaagcattcctatacaccaacaacagacaaacagagagccaaatcatgagtgaactcccattctgttattgcttcaaagagaataaaatacctaggaatctaaacttacaaggggtgtgaaggacctcttcagggagaactacaaaccactgctcaacgaaataaaaagaggacacaaacaaatggaagaacattccatgctcatgggtaggaagaatcaatatcgtgaaaaatggccatacttgcccaaggtaaatttatagattcaatgccatccccatcaagctaccaatgactgttttcacagaattggaaaaaaactactttaaagttcatatggaaccaaaaaagagcccgcattgccaagtcaatcctaagacaaaagaacaaagctggaggcatcacactacctgacttcaaactatactacaaggctacagtaaccaaaacagcatcggtactggtaccaaaacagagatatagaccaatggaacagaacagaggcctcagaaataatgccacatatctacactattctgatcctttggacaaacctgagaaaaacaagcatgggggaaaggcatccctaatttataaaatggctgctggggaaaactggctagcccatatgtaggaagctgaaactggatcccttccttacaccttatacaaaaatcaattcaagatggattaaagatttaaacgttaaacctaaaaccataaaaaccctagaagaaaacctaggcattaccattcaggacataggcgtgggcaaggacttcatgtccaaaacaccaaaagcaatggcaacaaaagacaaaattgacaaatgggatctaattaaactaaagagcttctgcacagcaaaagaaactaccatcagagtgaacaggcaacctacaacatgggagaaaattttcgcaacctactcatctgacaaagggctaatatccagaatctacaatgaactcaaacaaatttacaagaaaaaaacaaacaaccccatcaaaaagtgggcgaaggacatgaacagacacttctcaaaagaagacatttatgcagccaaaaaacacatgaagaaatgctcatcatcactggccatcagagaaatgcaaatcaaaaccactatgagatatcatctcacaccagttagaatggcaatcattaaaaagtcaggaaacaacaggtgctggagaggatgcggagaaataggaacacttttacactgttggtgggactgtaaactagttcaaccattgtggaagtcagtgtggcgattcctcagggatctagaactagaaataccatttgacccagccatcccattactgggtatatacccaaatgagtataaatcatgctgctataaagacacatgcacacgtatgtttattgcggcactattcacaatagcaaagacttggaaccaacccaaatgtccaacaatgatagactggattaagaaaatgtggcacatatacaccatggaatactatgcagccataaaaaatgatgagttcatatcctttgtagggacatggatgaaattggaaaccatcattctcagtaaactatcgcaagaacaaaaaaccaaacaccgcatattctcactcataggtgggaattga

SEQ ID NO: 128989 - DNA, 874 bp, Homo sapiens
catcctctacgaggaaaggaatgtgctgggctcggacgcgccgtcctggccgaacggcagcacctggggcgcgctctggaccgctggggtccgctgtctggcgctgcgccacgattacctcagcagcagagagcgccgcttcccaaaatcggctgtggttggggaccccacggccccgcaggcgtgcgggctgcggggacagcaactggccagcagtggagagggtggggaccgggaggtgggcaaaggcgaccccgccaagcgttccgccaagtgtgcaggggcgcctgcccttcctctacacccacacttgccaggagccggctacggaggagctgtccctcctgttcagctactgacggggtggtgcgtaacggcaaaagcaccgccggacatcagcgctatctctgctctcactgccgtaaaacatggcaactgcagttcacttacaccgcttctcaacccgccgggcagtgacgtcatcgtctgcgcggaaatggacgaacagtggggctatgtcggggctaaatcgcgccagcgctggctgttttacgcgtatgacagtctccggaagacggttgttgcgcacgtattcggtgaacgcactatggcgacgctggggcgtcttatgagcctgctgtcaccctttgacgtggtgatatggatgacggatggctggccgctgtatgaatcccgcctgaagggaaagctgcacgtaatcagcaagcgatatacgcagcgaattgagcggcataacctgaatctgaggcagcacctggcacggctgggacggaagtcgctgtcgttctcaaaatcggtggagctgcatgacaaagtcatcgggcattatctgaacataaaacactatcaataa

SEQ ID NO: 128990 - DNA, 891 bp, Homo sapiens
ttattgatagtgttttatgttcagataatgcccgatgactttgtcatgcagctccaccgattttgagaacgacagcgacttccgtcccagccgtgccaggtgctgcctcagattcaggttatgccgctcaattcgctgcgtatatcgcttgctgattacgtgcagctttcccttcaggcgggattcatacagcggccagccatccgtcatccatatcaccacgtcaaagggtgacagcaggctcataagacgccccagcgtcgccatagtgcgttcaccgaatacgtgcgcaacaaccgtcttccggagactgtcatacgcgtaaaacagccagcgctggcgcgatttagccccgacatagccccactgttcgtccatttccgcgcagacgatgacgtcactgcccggcgggttgagaagcggtgtaagtgaactgcagttgccatgttttacggcagtgagagcagagatagcgctgatgtccggcggtgcttttgccgttacgcaccaccccgtcagtagctgaacaggagggacagcctggagtctgtagacatagtaggcatcagaatccacctccctgtccccaatggtggttttgcagatgtagcttctgtcctcaaagataccagaaaagccacgttggtgatcataggggacaggcagtgcaacgtcccctttcttctcgtgcagtgtcaccaccagctgtgggtctgttactcggcatggaatggtgatctcagttatttccgtgagaaagatgaatagttcctcggcatcattagggaggaagcccacggtgggatctgccaggagtggagccgtgaataaatcaggggaactgggtttctggccatcccctgaattgctgtgtggcaagtcatttgccat

SEQ ID NO: 128991 - DNA, 669 bp, Homo sapiens
atggctgcgagggccggggcctatggagaatggacagagaaatggtcagacatccggtccagagcctgcacgcagggccaacctgtgctggggacacgggagaccactggtgaaaacagggacccggcagtacatgacctcagccagctactgacggggtggtgcgtaacggcaaaagcaccgccggacatcagcgctatctctgctctcactgccgtaaaacatggcaactgcagttcacttacaccgcttctcaacccgccgggcagtgacgtcatcgtctgcgcggaaatggacgaacagtggggctatgtcggggctaaatcgcgccagcgctggctgttttacgcgtatgacagtctccggaagacggttgttgcgcacgtattcggtgaacgcactatggcgacgctggggcgtcttatgagcctgctgtcaccctttgacgtggtgatatggatgacggatggctggccgctgtatgaatcccgcctgaagggaaagctgcacgtaatcagcaagcgatatacgcagcgaattgagcggcataacctgaatctgaggcagcacctggcacggctgggacggaagtcgctgtcgttctcaaaatcggtggagctgcatgacaaagtcatcgggcattatctgaacataaaacactatcaataa

SEQ ID NO: 128992 - DNA, 810 bp, Homo sapiens
atgaaggtggacaaccacttcattcaaaaggatgatgctatcctgattaatattgagagaagaccaagagctcacaaaggcagtttcaagggccaagggttccaatgtcctggttccaaaaggtttggttccccaaggctggtcaagccaaacgacggagtacccacagcgggtagctccttcatgcagctagcagcccagatgtctgtgagtttggaaagaaaattagaagctcagggagtaaataaccaaagaagaattggtggttggagatggctgaacactacggatcataatcacggacgatttcagcccgttgtggctggacgaccgaatgcggaaataccaaaagaaaagaacgttgtaaacagaatatataaggagaaagtgtggcgaaagaggccgggcagtgacgtcatcgtctgcgcggaaatggacgaacagtggggctatgtcggggctaaatcgcgccagcgctggctgttttacgcgtatgacagtctccggaagacggttgttgcgcacgtattcggtgaacgcactatggcgacgctggggcgtcttatgagcctgctgtcaccctttgacgtggtgatatggatgacggatggctggccgctgtatgaatcccgcctgaagggaaagctgcacgtaatcagcaagcgatatacgcagcgaattgagcggcataacctgaatctgaggcagcacctggcacggctgggacggaagtcgctgtcgttctcaaaatcggtggagctgcatgacaaagtcatcgggcattatctgaacataaaacactatcaataa

SEQ ID NO: 128993 - DNA, 337 bp, Homo sapiens
  misc_feature (1)...(337): n = a,t,c or g
tattctttctaagacctcttctgacttaagtaaaatggctgctatatacctggtagatgtggaccaaactgcagtttatacacagtattttgacatcagttatattccatctactgtctttttcttcaatgggcagcatatgaaagtggattatggtggagaagatccagccctcagaagcataaaagctgtccgcagaaccagccctgcaggtactttaggagaaaagccagtcaactcctagtaataacaggtaacattgggagggttctgnnnnnnnnnnnnnnnnnnnnnnnnnnnnnnnnnnnnnnnnnnnnnnnntcttcaacagcccatg

SEQ ID NO: 128994 - DNA, 1200 bp, Homo sapiens
ttattgatagtgttttatgttcagataatgcccgatgactttgtcatgcagctccaccgattttgagaacgacagcgacttccgtcccagccgtgccaggtgctgcctcagattcaggttatgccgctcaattcgctgcgtatatcgcttgctgattacgtgcagctttcccttcaggcgggattcatacagcggccagccatccgtcatccatatcaccacgtcaaagggtgacagcaggctcataagacgccccagcgtcgccatagtgcgttcaccgaatacgtgcgcaacaaccgtcttccggagactgtcatacgcgtaaaacagccagcgctggcgatatttagccccgacatagccccactgttcgtccatttccgcgcagacgatgacgtcactgcccgggtcattcatgccataatcatgattttctggtgcgatcgggttgagaagcgtgtaagtgacgcagttgcatgttttacgcttgagagcgagatagccgaagtcggcgtgctttgccgtacgcacatccgtcagtagcgacaggtcacgcctgctcgaatgtaagctctgtcgcgaatcttgcatgcctgcaggtccgaagacgtgcgccacaaccgtcctccgtatcctgtcatacgcgtaaaacagccagcgctgacgtgatttagcaccgacgtagccccactgttcgtccatttcagcgcagacaatcacatcactgcccggttgtatgcgcgaggttaccgactgcggcctgagttttttaagtgacgtaaaaccgtgttgaggccaacgcccataatgcgtgcacgggctgagaggcggtgtaagtgaactgtagttgccatgttttacggcaaggagagcagagatagcgctgatgtccggcagtgcttttgccgttacgcaccacgccttcagtagcggagcaggaaggacatccggccgttgctcattctcgtaacagtctggagatgaggaaccttgttccttccattttctctcttcaccatcccctgggctcaaggtgttggcctctgtatgatggcagccacatccctcccgcatactcaacaagatatccctgcggaccacagccctggagaacacctccatcaaggttggccccgccggaagaatttgtccaaggcggcatgcacgcaggatcaagatgaaccgtcggtgaagacccat

SEQ ID NO: 128995 - DNA, 1755 bp, Homo sapiens
atgggagtaaatgatgcagtcctcgaaatgcatggccttggcaacgattttatggtcgtcgacgcggggtttgaccaactgctggtggttgagccgccgtatgatcttgagctggattttcactatcgcatgttcaatgctgatggcagtgaagtggcgcagtgcggcaacggtgcgcgctgctttgcccgttttgtgcgtctgaaaggactgaccaataagcgtgatatccgcgtcagcaccgccaacgggcggatggttctgaccgtcaccgatgatgatctggtccgcgtaaatatgggcgaacccaacttcgaaccttccgccgtgccgtttcgcgctaacaaagcggaaaagacctatattatgcgcgccgccgagcagacaatcttatgcggcgtggtgtcgatgggaaatccgcattgcgtgattcaggtcgatgatgtcgataccgcggcggtagaaacgcttggtcctgttctggaaagccacgagcgttttccggagcgcgccaatatcggttttatgcaagtggttaagcgcgagcatattcgtttacgcgtttatgagcgtggggcaggagaaacccaggcctgcggcagcggcgcgtgtgcggcggttgcagtagggattcagcaaggtttgctggccgaagaagtacgcgtggaactccccggcggtcgtcttgatatcgcctggaaaggggaagaactgcaggaaacactcacggagcttgatgaccgggcggttgtcgattatctgattaaaaatcctgagttttttatccgtaatgcgcgcgcagtagaagcgatacgtgtgccgcatccggtacgcggcaccgtttcgttggtcgagtggcacatggcccgcgcacgtaatcatattcatgttctggaagagaacatggcgctgttgatggaacaggctatcgccaacgaaggcctgttttatcgcctactctacctgcagcgcagtctcaccgccgccagcagtctcgacgatatgctgatgcgctttcaccgctgggcgcgcgatctcggcctggcagtcgcgatgccagtcactatcaacaagggcaaccagatcattgaaaaccaactggatacagaaacaataactattagttatgaatttatcctctgtcaacatcttatcgcaaataccgagttcagctatttggcactccctgaaaattataaccgtttgtgtttaccaaattcaaaaaaccaaacaaataatcgtttcaaaacgttaaacagcaaagctattggcaggctacttgctgctggtggcgtatacaatgggaacattgaaggattcagagatactgcggaaaaactggctgtccctcctgttcagctactgacggggtggtgcgtaacggcaaaagcactgccggacatcagcgctatctctgctctcactgccgtaaaacatggcaactgcagttcacttacaccgcttctcaacccgccgggcagtgacgtcatcgtctgcgcggaaatggacgaacagtggggctatgtcggggctaaatcgcgccagcgctggctgttttacgcgtatgacagtctccggaagacggttgttgcgcacgtattcggtgaacgcactatggcgacgctggggcgtcttatgagcctgctgtcaccctttgacgtggtgatatggatgacggatggctggccgctgtatgaatcccgcctgaagggaaagctggcacgtaatcagcaagcgatatacgcagcgaattga

SEQ ID NO: 128996 - DNA, 750 bp, Homo sapiens
atgatcatcatcgatccgcgctataccgacaccggtgccgggcgcgaagatgagtggatccctattcgtccgggaacagatgccgcactggttaacggtctggcgtacgtcatgatcactgaaaacctggtggatcaggcattcctcgataaatattgcgttggctacgatgagaaaaccctgccagccagtgcgccgaaaaatggccactataaagcttatattctggctactgacgggtggtgcgtaccgccaaaagcaccgccggacatcagcgctatctctgctctcactgccgtaaaacatggcaactgcagttcacttacaccgcttctcaacccgccgggcagtgacgtcatcgtctgcgcggaaatggacgaacagtggggctatgtcggggctaaatcgcgccagcgctggctgttttacgcgtatgacagtctccggaagacggttgttgcgcacgtattcggtgaacgcactatggcgacgctggggcgtcttatgagcctgctgtcaccctttgacgtggtgatatggatgacggatggctggccgctgtatgaatcccgcctgaagggaaagctgcacgtaatcagcaagcgatatacgcagcgaattgagcggcataacctgaatctgaggcagcacctggcacggctgggacggaagtcgctgtcgttctcaaaatcggtggagctgcatgacaaagtcatcgggcattatctgaacataaaacactatcaataa

SEQ ID NO: 128997 - DNA, 2466 bp, Homo sapiens
atgattagcgtaacccttagccaacttaccgacattctcaacggtgaactgcaaggtgcagatatcacccttgatgctgtaaccactgatacccgaaaactgacgccgggctgcctgtttgttgccctgaaaggcgaacgttttgatgcccacgattttgccgaccaggcgaaagctggcggcgcaggcgcactactggttagccgtccgctggacatcgacctgccgcagttaatcgtcaaggatacgcgtctggcgtttggtgaactggctgcatgggttcgccagcaagttccggcgcgcgtggttgctctgacggggtcctccggcaaaacctccgttaaagagatgacggcggcgattttaagccagtgcggcaacacgctttatacggcaggcaatctcaacaacgacatcggtgtaccgatgacgctgttgcgcttaacgccggaatacgattacgcagttattgaacttggcgcgaaccatcagggcgaaatagcctggactgtcacgcacccaccacggttcgtcaccaaacagtggctctgctttttgccagatggcctgctgctcttcgctgaagcccgctttgtgatctggcagatgcagccagccgtgatggctgtggatgtcgccgctttcgcgcatcttttcaatcagcaacagtaccagcgcttcaccgggcgaccgcccgattccagcaaactaccctggaaaataacctgtaatggggaatgcgttaccttccactggtggctgctgggcgtagcggtccgaatatcgcgtttattgcctgtacgggtgatgacagcattggaaggtaactacaacgggacggaaggtatctccgccctgccgttcaacgggattattctcgcacactcgaacgagtccgaatgggtcactttccgtaataacaaaaacaacgaagccttcctcgatcgtgtttacatcgtgaaggtgccgtattgcttgcgcatttccgaagagatcaaaatctacgagaaattgcttaatcacattttcgagtgctggcagcacttcttgaataatcctgagtctctccagtgctatatctgggctgctaatgccgattttcgagaggcccggcaggttatcttcaagacgttttttacggtcggtgttgaagaagaactcggcatccgccagacgcggacgaacgactttctcgttaccggagataatctgctgcggatctttcgattcgatgttggcaacgaagataaagttcggcagcagtttgccgtcgttcgcatacaccgggaagtatttctggtcacctttcatggtgtaaaccagcgcttcagccggcaccgcgaggaatttctcttcgaattttgcgtcagcgttaccgccaatcttacgcgctgcttcttcggcatcggctttaatcttcgccttacgttcttcgtaatcggcgatgactttcccacgctcacgcagaatttccggatactgatcggcgttatcgatggtgaattccggctcgcccataaagcggtggccgcgaatcacgcgatcggactgaatgcccagaatggttgccggaatgactttgtcgcccatgcagcagggtcacgtgccctggcagctgatggtcgttctctggaacacgcgccaacggtggaaaccgtcgtcgccggaccgttatgtgaatcgggcgatgtctttacccagcaggaagggggaaatgttgaaacccgcgccttgccggaagtgaaggcagctgtccctcctgttcagctactgacggggtggtgcgtaacggcaaaagcactgccggacatcagcgctatctctgctctcactgccgtaaaacatggcaactgcagttcacttacaccgcttctcaacccgccgggcagtgacgtcatcgtctgcgcggaaatggacgaacagtggggatacgtcggggctaaatcgcgccagcgctggctgttttacgcgtatgacaggctccggaagacggttgttgcgcaccgtctgcggattcacagccgtctgccgattgtgatcccggcacgtatcaccgaggcgctggttgaatgctttgcccgttctacgctgcaaatcttgctggtgaatcacatcaaccatgcccatgaggtagatgaaacattccgtcaggcgatggctaagttgcgccgggtaggcgttactttgctgaaccagagcgttctgttacgtgatgtgaacgataacgcacaaacgctggcaaacctgagtaatgcgttgttcgatgccggcgtaatgccgtattacctgcatgtgctcgataaagtacagggcgcggcgcattttatggtgagtgatgacgaagcacggcagattatgcgtgagttgctgacactggtgtcgggatatctggtgccgaaactggcgcgagaaattggcggcgaacccagcaaaacgccgctggatctccagctacgccagcagtaa

SEQ ID NO: 128998 - DNA, 1236 bp, Homo sapiens
ctaaatctggtgctttttcaacaacgcgcggaactgatgataagttaaccccagtaattcagccgcgcgcttctggttatatttcccttgttgcaaactgagttgcagcaactctttttcctgctgcatgtaaatccagcggcagtggaagccccccccagtgtcccaatagggctttacagcgaaaacgtgcgcaacaaccgtcttccggagactgtcatacgcgtaaaacagccagcgctggcgcgatttagccccgacatagccccactgttcgtccatttccgcgcagacgatgacgtcactgcccggcgggttgagaagcggtgtaagtgaactgcagttgccatgttttacggcagtgagagcagagatagcgctgatgtccggcggtgcttttgccgttacgcaccaccccgtcagtagctgaacaggagggacagcggaaaacacccgcactgtttgaaatggtaaaaagaaaggagagtgaatatgagcgcatcggcactggtttgcctcgcccctggtagtgaagagactgaagccgtcaccactatcgatctgctggttcgcggcggtatcaaagtcaccactgccagcgtcgccagcgatggtaacctggcgattacctgctcgcgcggcgtgaagctgctggcggatgcgccgctggtcgaagtggctgatggcgaatatgacgtgatcgtgctgcctggtggcattaaaggcgcggagtgttttcgcgatagcactctgctggttgaaaccgttaaacagttccaccgttccgggcgtatcgtcgcggctatttgcgccgcgccagccaccgtgctggtgccgcacgatatcttcccgattggtaatatgaccggcttcccgacgctgaaagacaaaattcccgccgaacaatggctggacaagcgcgtcgtctgggatgcacgggtaaaattgctgaccagccaggggccgggtacagctatcgactttggtctgaaaattatcgaccttcacattgttaaagccctgctcgcgcagatagagcgcctgcagacggctcatcaccccgcgctcacaccacagcagccagttttgttcacgggggcggtttttgggccccaaaagcctgtgggtgccaaatggtccgaaggcccccaagggggttggttttttggggtgttgtttgggtaaagcggggatagtgagttgagatgtgtagatgataaaggtttccagggccat

SEQ ID NO: 128999 - DNA, 2036 bp, Homo sapiens
atgcgccgcaacgcttgccagtaccgcactccggcggttgtggccagccggcagaagcgctggcacggcgatctggggatgatcggaagccgcgatgtgatgctgtttatctcggactccgttggcgcgaaggaactggatctgattattccgcgtctggaagataaatctatcgcgctgctggcgatgaccggcaaaccgacgtcaccgctgggcctggcggcaaaagcggtgctggatatctccgtagaacgcgaagcctgcccgatgcaccttgcgccgacctccagcaccgtcaataccctgatgatgggtgacgcgctggcgatggcggtcatgcaggcgcgcggatttaatgaagaagattttgcccgctcccacccagccggggcactgggcgctcgcttgctgaataaagtgcatcatctgatgcgccgtgacgatgccatcccacaggtggcgttaaccgccagcgtgatggatgcgatgctggaactcagccgcaccggtctggggctggtggcggtatgtgacgctcaacaacaggtacaaggcgtctttaccgacggcgatttacgtcgctggctggttggcggcggcgcactcaccacgccagtcaatgaagcgatgacggtcggcggcaccacgttgcaatcgcaaagtcgcgccatcgacgccaaagagatcctgatgaagcgcaaaatcactgccgcaccggtggtggatgaaaacgggaaactcaccggcgcaataaaactgcaggatttctatcaagggcggggattatttaatccttcaatccccagagtttcgacagccgatgcaggtttggctaacagggcacgccgcaattgggttggaagttcctggaagcaagttggccagattatactccagggggggccacaaaacgccgagaagtctgggcagcgctacacggtgtcacatgaccgacaccgggacgcagagcgccagcgcgtgaagtcgggactacctcggtacgccgaatgcagcacgtatccgtcatgcccagtggcgctggatctggcgttcgcttcccacggcattcatatgcacgccccgggagaagctttacggatgctcgttacggcgatggataaagcggcggatgcacgcaccaaactggcgcgcctgctggcgaccaaaggcatcacccatgaaatccagatcccggatatctcaaccaaagagaaagcccagcagcccattggcctgaacatggaacaaatcaagcccgagaagcaggacttcatcaaaccggtgatcccgcaggccggaaaacacaatggagtgaatatgagcgtattacgttcgttattaactgccggggtgctggcgtcgggcctgttgtggagcctgaacggaattaccgctacccctgcggcgcaggcatctgatgatcgctacgaagttacccagcagcgtaacccggatgccgcctgtctggactgtcataaaccagataccgaagctgtccctcctgttcagctactgacggggtggtgcgtaacggcaaaagcaccgccggacatcagcgctatctctgctctcactgccgtaaaacatggcaactgcagttcacttacaccgcttctcaacccgccgggcagtgacgtcatcgtctgcgcggaactggacgaacagtggggctatgtcggggctaaatcgcgccagcgctggctgttttacgcgtatgcacagtctccgcgcacgacgcgttgttgcgcacgtattcggctgcacgcactatggcgacgctggggcgtcttatgagcctgctgtcaccctttgacgtggtgatatggatgacggatggctggccgctgtatgaatcccgcctgaagggaaagctgcacgtaatcagcaagcgatatacgcagcgaattgagcggcataacctgaatctgaggcagcacctggcacggctgggacggaagtcgctgtcgttctcaaaatcggtggagctgcatgacaaagtcatcgggcattatctgaacataaaacactatcaataa

SEQ ID NO: 129000 - DNA, 3774 bp, Homo sapiens
tcatgcattcgtcctctctgcaatacgcagaactgaactacgggcacgagggttctcagccacctcttcttcgcccggcattaacttgcctagtgctcgcagctgacggccacccagttttttgagctgctcttcagtcatcggtaaccctgccggaacttgcggaccgcggctgttttcacgcataaaacgtttcacaatacggtcttccagcgagtggaagctgatgatcgaaagccgcccacccggggccagcacgttgagcgagctttttagcgcctgctctatctcctccagttcactgtttacccaaatgcgcaccgcctggaaggtacgggtcgcgggatgtttaaacttatctttcaccggcgttgcagcagccacgacttccgccagttctttggtgcgggtcatcggctgttcgcggttacgctcgagcactgctcggcaacatatgctaccacgccaataaaacttcgcccgtaagccgtaggcctgataagacgcgcaaagcttcgcatcaggcatggcgcacgactgccggatgcggcgtgaacgccttatccggtctacacttcgcccataaaccgtaggccacatcaaatcatcaggcactttgaagtcggcatacgggtcgtcttcatcctgctcttcggcgctgagcgcgctgtgcaacactatactgctggcatcgcgctgagcaattttatcggcaacgctggcgggaataatggcgtattcaccttcgctattgttatcgaccaacaagcgggcaatcgccagacgaccattaatcaactgcgcctgtgtgagcttatcgacaaaaatcttcttaatcagattgccgtcagtgaagttaaaaccaatatcgccattggcaatggtgattcggttcatttcaataagctgcttcacctgagctttatattctttcgccaacgccgcttgtttttgctgttcgctaagctgtttatcacgctcaagctgtgcctttttattttcttctaccgccgggtttttgagggtacccatgggccggcccagtgaaccacactgaatccaagtgttccggttgagaagcggtgtaaagtgaactgcagttgccatgtttacggcagtgagagcagagatagcgctgatgtccggcagtgcttttgccgttacgcaccaccccgtcagtagctgaacaggagggacagctatgtcgaatatctggccgataaggttgcggatcgagaagaggatgcagaggaatatctggaagcaatcatggaggctcgtgttaccgttgctggcatggggctggtgatggaggtgcaggattacttcgatggcgaggccgatagactggcgaaggcgtggctggccgagtacacaccgcaaatcaagtcgttgaaagatgagcgtaaagaggcctatcgtcaaatcgtcgaaatgagtaccgaaccgcaggatgtggatctggtcaggccggcgaacaagtttgaaatgaccagggtgcgtgaaggtgaaaaggaagctgaccttccagtctggaaacaccatttgttgtgtgacgaaagcgggaactatccggctctgttgaaccattgggaaaccaggtttttgagatcgaaaccaaacgtgaaaattcataggagctctgataaaagtccaacatattttgtgttcttcatcagccagtacgacctcccagctttctacccaattaatggccattttttggtcgagagagtggtcaaagtcaggatcgtcttcattgaagaattcgctgaccatcaccatcttgccattttccagttcaacaaccgactccagcgtcatgcctttgtagttacgctcgcgaacgtaaccaatcagcccttcagcgtggttgtcgtcgttaatctcttcaacacgtaagtcttccgggcgcagcagaacatgcagtttttgccccggttcaacggcgaagttaacgtagatattacattcgcggccttcaacgttggcgcgtacgcgctgctcgtctagacgttcgatgacagtggcgttaaacatattgatttcgccaatgaagccggcaacaaacaggtttttcggctcttcgtagatttcacgcggcgtgccgtcttgctcaatgcgaccatcgcgcatcacatccctgttccgggctaccgcccagcagttcgattcaataaagtggtcatagtaagccagcactgccggaacgataccgcaggcaccgttggttggcgcagttaccacacgaccaccggcggcgttttcttcgttaactgccagcgcaaacatgtttacccagtcaatgacattcatcggatcgttagacagtttatcgctggaaaccagcatccggcgcagggcagacgcacgacgtggcacgcgcagcgggcctggcagtacaccttcggtgttcatcccgcgatcgatacatgcctgcatggtttgccagacatgcgcgaaatactcgtcgatctctttcttgctgtgcagcgccagttcgttctgggaggcagaggtgaagtccatgtactggcggcactgttcacagtggtgaaaggtgttataggctgcatatttggtcagcattatggatacagtttcccgtttcctgggctcttcaactttggattcctttatcacttctttgaacggacgcttcatgttttcgatagcgtcgatgatgtcgtggtgaaccagctgttcgttctggatacctacacaacgaccgccgtaacctgccagcagcagatcgatagcgtaagcgcccatacgggaagccagaatacggtcgtaaggcaccggagaaccaccgcgctggatgtggcccagcacagttgcgcgggtttcacgaccggtttctttctcgatgaaatgcgccagttcgtcaacatcacacatatgttcggtaatcgccacgatcgcgtgttttttacctttcgcgatacccgctttgatttcgtttaccaggtcttcacggctgaattcaacttccggaaccacaacgaattcacagccaccggcaatggccgcagccaacgtcagatctccacaataacggcccatcacttccaccacggaaatacgctggtgagaagaagaggtgtcacgcagacggtcgatcgcttctcgcgcatacagccgggcagtgacgtcatcgtctgcgcggaaatggacgaacagtggggatacgtcggggctaaatcgcgccagcgctggctgttttacgcgtatgacaggctccggaagacggttgttgcgcacgtattcggtgaacgcatgttgcagttgttcccaggaggtggagcaatcatccacgatgatcatctcccagttgctgtagtcctggcgcaaaaccgattttattgcccgaatcgccagttgttgtcggttccaggtcggcatatagattgagatcagcggattgtttttcataggttgttctcccggcttatgagctggtttgcttgccggatgcggcgtgaacgccttatccggcggggcggtgcgaatgcaggcgtcgttatttcgcatccgactatattcgtattcgtaatagccataatcctgatacgcgctggcgcggcggaagatggagttcagaatcacccctttcaccggaataccgttttgctcaaagcggctcagactggtttccacttctttcaatgtgttgaccgcataacgcgccaccattaacgtggttccgacatgacgaccaacaattgccgcatcggtcaccgcgcggggaaaccgtaattcgaaggaccacat

SEQ ID NO: 129001 - DNA, 3099 bp, Homo sapiens
atgaaacaggggttccaaaatgtagagtataagcaactagtggaggtgctagaaacggtttataacaaagctcagaaaatactaaaggttaaaggagaattgagagctgccaaggaaatgaaagatgaggcgggggagagagacagagaagtgagcagcctgaacagcaagctgttaagcctgcaacttgacatcaagaatctgcacgatgtctgcaagagacagaggaagaccttgcaggacaatcagctctgcatggaggaggcaatgaacagcagccacgacaagaagcaagcacaggcattagcattcgaggagtcagaggtggaatttgggtccagtaaacagtgtcatctgagacaactccagcaactgaagaaaaaattgctggtccttcaacaagaactggagtttcacacagaggagttgcagacttcttactattctctccgccagtatcagtccatcctagagaagcagacttccgacctggttcttctgcaccatcactgcaaactgaaagaagatgaggtgattctctatgaggaggaaatgggaaatcacaacgagaacacaggggagaagctccatttggcgcaggagcaactcgccttggccggggacaagatcgcctctctagagaggagcttaaacctctacagggataaataccagtcttccctgagcaacatcgagttactagaatgccaagtgaagatgttgcagggggaactcggcgggatcatgggtcaggagcctgagaacaagggtgatcattcaaaggtacggatatacacttctccttgcatgattcaagagcatcaggagactcagaaacgactgtctgaagtctggcaaaaggtctctcaacaggatgatctcattcaagaacttcgaaataagctggcctgcagtaacgctttggttctggagcgtgaaaaggctttgataaaactacaagccgattttgcttcctgtacagccacccacagataccctcctagctcctcagaagagtgtgaagacatcaaaaagatactgaagcacttgcaggagcagaaagacagccagtgcctgcatgtggaggagtaccagaacctggtgaaggatctgcgcgtggaactagaggccgtgtcggaacagaagagaaacatcatgaaggacatgatgaagctggagctggacctgcacggactgcgggaggagacatctgcccacattgagaggaaggataaggacatcaccatcctgcagtgccggctgcaggagctgcagctggagttcaccgagacccaaaagctcactttgaagaaagacaagttcctccaagagaaagatgagatgctgcaagagctggagaagaaactgacacaggttcagaacagcctcctgaaaaaggagaaggagctggagaagcagcagtgcatggccacagaacttgaaatgacagtcaaggaggctaagcaggacaagtccaaggaggcggagtgcaaggccctgcaggctgaggtccagaagctgaagaacagtctcgaagaggccaagcagcaggagaggctggctgctcagcaagcagcccagtgcaaagaagaggctgcactggcaggctgtcacctggaggacacccagaggaaactgcagaagggtctcctcctggacaagcagaaggcagacaccatccaggaactacagagagaacttcagatgctgcagaaggagtcctcgatggctgagaaggaacaaacctccaacagaaaacgggtggaggagctgtcattagaactctctgaagccctgaggaagcttgaaaattcagacaaggaaaagaggcagcttcagaagacagtggctgagcaggatatgaaaatgaatgacatgcttgatcgtatcaagcaccagcacagggagcaaggctccatcaaatgcaagttagaagaagatcttcaggaggccacaaagcttctggaggacaaacgggagcagttgaagaagagcaaagagcatgagaagctgatggagggagaacttgaagctttgcggcaggaatttaaaaagaaagacaagacgatagcccttcagaaggagtccttaatgagcctgcaggcccagctggacaaagctctgcagaaggagaagcactatctccagactaccatcaccaaagaagcctatgatgcattatcccggaagtcagccgcctgccaggatgacctgacacaagccctcgagaagaggacaggaagggactggaaccctcctccattcaggactcagcagagagggtcaaagtctctgacagccattcgtcctctttgtcttttccggaagctcaatcacgtgacctcagagacaaagagcctgcagcaaagcttgacacagacccaagagaagaaagctcagctggaagaggaaatcattgcttatgaggaaaggatgaaaaagctcaatacggaattaagaaaactgcggggcttccaccaggagagtgagctggaggtgcacgcctttgacaagaagctagaggagatgagctgccaggtgctgcagtggcagaagcaacaccagaatgacctcaagatgctggcagccaaagaggagcagctcagggagttccaggaggagatggccgccttaaaagagaacctccttgaggacgataaggagccctgctgcctgccccagtggtctgtgcccaaagacacctgtaggctctaccgagggaatgatcagattatgaccaacttggagcaatgggcaaaacagcagaaggtcgccaatgagaaactaggaaaccagctccgagagcaggtgaaatacattgccaagctgagtggcgaaaaggaccacctccacagtgtaatggtccacttgcagcaggaaaacaagaagctgaagaaggagatagaagagaagaagatgaaagccgagaacacaaggctatgcaccaaagccctaggcccgagcagaacggagtccacacagagggagaaagtgtgcggcaccttgggctggaaggggttgccccaggatatgggtcaaagaatggacctcaccaagtacatcgggatgccccactgcccgggttcctcatactgctag

SEQ ID NO: 129002 - DNA, 1596 bp, Homo sapiens
ttattgatagtgttttatgttcagataatgcccgatgactttgtcatgcagctccaccgattttgagaacgacagcgacttccgtcccagccgtgccaggtgctgcctcagattcaggttatgccgctcaattcgctgcgtatatcgcttgctgattacgtgcagctttcccttcaggcgggattcatacagcggccagccatccgtcatccatatcaccacgtcaaagggtgacagcaggctcataagacgccccagcgtcgccatagtgcgttcaccgaatacgtgcgcaacaaccgtcttccggagactgtcatacgcgtaaaacagccagcgctggcgcgatttagccccgacgtatccccactgttcgtccatttccgcgcagacgatgacgtcactgcccggcgggttgagaagcggtgtaagtgaactgcagttgccatgttttacggcagtgagagcagagatagcgctgatgtccggcggtgcttttgccgttacgcaccaccccgtcagtagctgaacaggagggacagccgcggttttaagcgaatcgatggagactgcgccgacaaacttattaccgcgttcgataacgtagccatattcgcgatcttcatcctgcaataatttcagtgccgaacgtgggccgaagccaggggttttacgaattaagccattcggtgtccggcgggcaatatctttcgcactgaatacctgactaatatcaacgccacggaagaaggtacggacataatcattcgccggctttagagcagggcgatgagcatcgcaggtgtgtgtctccggcttaaacgagactgatccatcttgatgtctcctcaacgcggaatattgactgtgtatcatttggtccgcccgaaacaggttggccagcgtgaataacatcgccagttggttatcgtttttcagcaaccccttgtatctggctttcacgaagccgaactgtcgcttgatgatgcgaaatgggtgctccaccctggcccggatgctggctttcatgtattcgatgttgatggccgttttgttcttgcgtggatgctgtttcaaggttcttaccttgccggggcgctcggcgatcagccagtccacatccacctcggccagctcctcgcgctgtggcgccccttggtagccggcatcggctgagacaaattgctcctctccatgcagcagattacccagctgattgaggtcatgctcgttggccgcggtggtgaccaggctgtgggtcaggccactcttggcatcgacaccaatgtgggccttcatgccaaagtgccactgattgcctttcttggtctgatgcatctccggatcgcgttgctgctctttgttcttggtcgagctgggtgcctcaatgatggtggcatcgaccaaggtgccttgagtcatcatgacgcctgcttcggccagccagcgattgatggtcttgaacaattggcgggccagttgatgctgctccagcaggtggcggaaattcatgatggtggtgcggtccggcaaggcgctatccagggataaccgggcaaacagacgcatggaggcgatttcgtacagagcatcttccat

SEQ ID NO: 129003 - DNA, 948 bp, Homo sapiens
atggatgaagctgaaaaccataattctcaacaaactaacacacgaacagaaaaccaaacaccacatgttctcactcataagtgggagttgaactatgagaacccatggacacagggaggggaacatctcacaatggggcttgtcgtgggttggaggggtcttcaagaaggtgatcctgcaagaactaatctcagttattatcaagctaatgtgggtagtggacaacaccgtgaaaacaaggggccaattaacttgggaaatgtggggaagagcaacggtgagcggggagggaagtcgctttacaggtgtaagattttcttggagagtagtgtgaccatgaaggacagggaattgccacctgtgtatgatggtgtttttgaggtgctccagtggcttctgtttctatcagctgtccctcctgttcagctactgacggggtggtgcgtaacggcaaaagcaccgccggacatcagcgctatctctgctctcactgccgtaaaacatggcaactgcagttcacttacaccgcttctcaacccgccgggcagtgacgtcatcgtctgcgcggaaatggacgaacagtggggctatgtcggggctaaatcgcgccagcgctggctgttttacgcgtatgacagtctccggaagacggttgttgcgcacgtattcggtgaacgcactatggcgacgctggggcgtcttatgagcctgctgtcaccctttgacgtggtgatatggatgacggatggctggccgctgtatgaatcccgcctgaagggaaagctgcacgtaatcagcaagcgatatacgcagcgaattgagcggcataacctgaatctgaggcagcacctggcacggctgggacggaagtcgctgtcgttctcaaaatcggtggagctgcatgacaaagtcatcgggcattatctgaacataaaacactatcaataa

SEQ ID NO: 129004 - DNA, 902 bp, Homo sapiens
tgaaaggagctgtccgcgcccgggctcttccgagaagtggttgctgacagccacaaagtgaaagggagtgaggcggcgtggaccagtaaggagtgacagtgaggattcacatttgggttatttcaagatgagcttcctactgcccaagctgactagcaaaaaggaagtagaccaggcgataaaaagtactgctgagaaggtgttggttctcacgtttgggagagatgaagatcctgtctgtctgcagctagatgatattctttctaagacctcttctgacttaagtaaaatggctgctatatacctggtagatgtggaccaaactgcagtttatacacagtattttgacatcagttatattccatctactgtctttttcttcaatgggcagcatatgaaagtggattatggatctccagatcacactaagtttgtgggaagcttcaaaaccaaacaagacttcatagatttgattgaagtaatctatcgaggagcaatgagggggaagcttattgtccaaagtcctattgatcccaagaatattcccaaatatgaccttctctatcaagacatttagtacattaattgctgtcaaagatgaagaagaaggcacatcttgacacagtacctgaatccagctggtgctgtgtttctggagtcctttggaaacatgtgtcccagaggagaagaggtttgacttgcgtgtagaaaacccggcccctgaggaaaagaccccactggttctctgatgacctgggatgcctaactgtctactccctgcaagcctcagagcagccaagtcattggtgttcattttccccacagtgatttttgtaacttctctttctaatgtttttctttatccctttaatacagaaccctcccaaacaaaaaaaaaaaaa

SEQ ID NO: 129005 - DNA, 2568 bp, Homo sapiens
atgctggccaatatcgggttttataatagtaatgtcatccataggagcaaaggagcaattggagagggcccgccagatcctcgaggaattgtagagcagaacctgggaggagacattagcatcccgtgctacaatggaccaaggcctcggcggagcgcgcagaagacaactctgggcccgctaaaccaacccaggatacccagcgcgcagtgcgcaggcgccttcccgcgggtcgcggcggcgggagcgggaggcggcggcggcggcggcagcggcgggagcggcttctgcctcggctggagactgaggcgaaggcggcagcggcggaggaggtggaggagaggcgagggtgaaggcgatggcgacgcggggcacatgaggccgcgaccggcgggacgggccgaggcccggcggaggaggcggctccgggggaacccgccgccgggcgcgcggctcccaaatcgggagggaaacggctcgggggtgtcctgggccgcggaggtgtcgggcgacggtcggggagcccggacagaagcggcgcgcactcggcggcgccccggcggtgccgacaactacccgggcgctgtccctcctgttcagctactgacggggtggtgcgtaacggcaaaagcaccgccggacatcagcgctatctctgctctcactgccgtaaaacatggcaactgcagttcacttacaccgcttctcaacccgccgggcagtgacgtcatcgtctgcgcggaaatggacgaacagtggggctatgtcggggctaaatcgcgccagcgctggctgttttacgcgtatgacagtctccggaagacggttgttgcgcacgtattcggtgaacgcactatggcgacgctggggcgtcttatgagcctgctgtcaccctttgacgtggtgatatggatgacggatggctggccgctgtatgaatcccgcctgaagggaaagctgcacgtaatcagcaagcgatatacgcagcgaattgagcggcataacctgaatctgaggcagcacctggcacggctgggacggaagtcgctgtcgttctcaaaatcggtggagctgcatgacaaagaggagctcgcagccctcttctctgagctgaagcaggagcagaagaaggtggatgagctcatcgccaaactggtgaaaaaccggacccgaatcgtcaatgagtcggatgtcttcagctgggtgatccgccgcgagttccaggagctgcgccacccggtggacgaggagaaggcccgctgcctggaggggatagggggtcacacccgtggcctggtggcctccctggacatgcagctggagcaggcccagggaacccgggagcggctggcccaagccgagtgtgtgctggaacagttcggaaatgaggaccaccatgagttcatctggaagttccactccatggcctccagtgtccagaagaaggccatggacagaacggagactaggttccgtaagaggggacagattacgggaaagatcacgaccagccgtcaaccgcacccccagaatgagcagagtccccagcggagcacctcggggtaccccctccaggaggtggtggatgatgaagtgttgggaccatcagatgaggggactggtggaagaagaggtgggataggattgactaagacgaaggaagggggccgggagctcgcccctgagcctgaggagacctgggtagtggagacgctgtgtgggctcaagatgaagctgaagcaacagcgagtgtcacccatcctccctgagcaccacaaggacttcaacagtcagcttgcccctggggtagatcccagccccccgcataggtccttttgctggaaaaggaagatggagtggtgggacaaatctgaggagtcgttggaggaggagccacggaaggtgctcgcccctgagcctgaggagatctgggtggcggagatgctgtgtggcctcaagatgaagctgaagcgacggcgagtgtcgctcgtgctccctgagcaccacgaggccttcaacaggctgcttgaggatcctgtcattaaaagattcctggcctgggacaaaggtctgagggtgtcggacaagatcccatcggagcccaccatcctgggagcatcacccaaaacccttcctctggcttctcggatttgcatccgaccttcgaatacccctccatcccgcaatttccaaatgagtacagtcaccccaacactgagctacctggccaatgacatggaggaggacgacgaggaccccaaacaaaacatcttctacttcctgtatgggaagacccgctctcgcatacccttgctccgtaagcgtcggttccagttatgccgttgcatgaacccgagggccaggaagaaccgctctcagatagtcctgttccagaaacttcggttccagttcttctgttccatgagctgcagggcttgggtttccccggaggagttggaggagaacaccggacccaggggagatgtggattttcagcaggaactttattccaatgctaatggcagacaccaggaagaaggagaggaaccatttgtgcagatcatctag

SEQ ID NO: 129006 - DNA, 1514 bp, Homo sapiens
atgattatagcccttcagaaggagtccttaatgagcctgcaggcccagctggacaaagctctgcagaaggagaagcactatctccagactaccatcaccaaagaagcctatgatgcattatcccggaagtcagccgcctgccaggatgacctgacacaagccctcgagaagaggacaggaagggactggaaccctcctccattcaggactcagcagagagggtcaaagtctctgacagccattcgtcctctttgtcttttccggaagctcaatcacgtgacctcagagacaaagagcctgcagcaaagcttgacacagacccaagagaagaaagctcagctggaagaggaaatcattgcttatgaggaaaggatgaaaaagctcaatacggaattaagaaaactgcggggcttccaccaggagagtgagctggaggtgattctctatgaggaggaaatgggaaatcacaacgagaacacaggggagaagctccatttggcgcaggagcaactcgccttggccggggacaagatcacctctctagagaggagcttaaacctctacagggataaataccagtcttccctgagcaacatcgagttactagaatgccaagtgaagatgttgcagggggaactcggcgggatcatgggtcagctttctaagacctcttctgacttaagtaaaatggctgctatatacctggtagatgtggaccaaactgcagtttatacacagtattttgacatcagttatattccatctactgtctttttcttcaatgggcagcatatgaaagtggattatggctttatctggctcttccttccttcttgacgcccattatatctcccagtttggtccccgccagttacccagtgtttgtgctgagcctgaaaaggaaaaagctactgacggggtggtgcgtaacggcaaaagcaccgccggacatcagcgctatctctgctctcactgccgtaaaacatggcaactgcagttcacttacaccgcttctcaacccgccgggcagtgacgtcatcgtctgcgcggaaatggacgaacagtggggctatgtcggggctaaatcgcgccagcgctggctgttttacgcgtatgacagtctccggaagacggttgttgcgcaccacagggagcaaggctccatcaaatgcaagttagaagaagatctccaggaggccacaaagcttctggaggacaaacgggagcagttgaagaagagcaaagagcatgagaagctgatggagggagaacttgaagctttgcggcaggaatttaaaaagaaagacaagacgttgaaagagaattccagaaagttggaggaagaaaatgagaatctccgagcagagctacagtgttgttctacacaactggaatcctctctcaacaaatacaacaccagccagcaagtcatccaagacttgaataagtcgccaatggagatacgatttcagctttatatttttacccctgaccagtacgacaaatgcatctaa

SEQ ID NO: 129007 - DNA, 363 bp, Homo sapiens
aatgaggcttccacaagctgccaggcagtggcttcctaacccggcggacgcccctcgaaacgattatcaagttgtttcactggacaggtgctgggtaaaagcttgttgagaaaataaaaaataaataaacgtgtcggtgtggtcacaaccgttccccggaggttaacagccggagaaggggcttaaggagcatcccgcggatgccagaccaggctcatgtcgcgcctgccgggcggccagtgcagggccgggccgaggtcgcctccgccgctcctcctcgcggtagctcaccggccgccgctcccggccagagccaccctcccagctgtctgagggcccccctgtactggagctttagtcgtt

SEQ ID NO: 129008 - DNA, 586 bp, Homo sapiens
  misc_feature (1)...(586): n = a,t,c or g
cagtcttcattcggtgctgtctctctctcctctcttgaattcttctatactattgtgaggacaatacaggctcttccagcttgaaacttcagttctntgcatcgctgggccaagacgttccttgagtaggattctgtgcacacactgctagttacaagactgaggggtggctttgcaaatgaggcttccacaagctgccaggcagtggcttcctaacccggcggacgcccctcgaaacgattatcaagttgtttcactggacaggtgctgggtaaaagcttgttgagaaaataaaaaataaataaacgtgttcgacccgccgccgcaagaatgatttatctgtaaaatacgtgtcggtgtggtcacaaccgttccccggaggttaacagccggagaaggggcttaaggagcatcccgcggatgccagaccaggctcatgtcgcgcctgccgggcggccagtgcagggccgggccgaggtcgcctccgccgctcctcctcgcggtagctcaccggccgccgctcccggccagagccaccctcccagctgtctgagggcgccgctgtactggagctttagtagttgac

SEQ ID NO: 129009 - DNA, 407 bp, Homo sapiens
  misc_feature (1)...(407): n = a,t,c or g
caggaactgccattttaaattaccatgtctgaaggtcaagaaacaagttattaaagtcactttagnnnnnnnnnnnnnnnnnnnnnnntgaagtgagcagttgtggccaactttttcattgtaaccagaattatgtgacagactaattgataccacataagacctcatcccaaccttcctccttgccaaaaggacccttttcctagaattctactccttcctgacttagaggaatggttacattctcacccttctcttccattcttaatggtcaatttgagccaaattctgggtgtcctctcttccagtttgctgggtatgccttcgagaacctggggatcccgaaaaattaggggaatttcttcagaaagacaatatcagcgtgcattatttctgtcttgtgagtt

SEQ ID NO: 129010 - DNA, 762 bp, Homo sapiens
cattccttcttttcttttacagtcttcattcggtgctgtctctctctcctctcttgaattcttctatactattgtgaggacaatacaggctcttccagcttgctattcccacaggggtccacgtgagcggactgcggagcagttcccagttactggggctaccccgaccatccagcaatagacataaaaccttgaaacttcagttctttgcatcgctgggccaagacgttccttgagtaggatttctgtgcacacactgctagttacaagacgtcacgatcttcaaaacatctgaggggtggctttgcaaaatgaggcttcccacaaagctcccaggcagtggcttcctaacccggcggacgcccctcgaaacggattatccaagttgtttcaactggacaggtgctgggtaaaagcttgttgagaaaataaaaaataaataaacgtgttcgacccgccgccgcaagaatgatttatctgtaaaatacgtgtcggtgtggtcacaaccgttccccggaggttaacagccggagagggggcttaaggagcatcccgcggatgccagacgcaggctcatgctcgcgcctgccgggcggcccagtgcagggccgggcaggaggtcgcctccgccgctccttcctcgcggtagctcaccggccgccgctcccggccagagccaccctcccagctcgtctcagggcgccgctgtactggagctttagtcgttgacacaggccgtggtagctactaccgggcggtcgc

SEQ ID NO: 129011 - DNA, 1790 bp, Homo sapiens
ccagcacctgtccagtgaaacaacttgattatcgtttcgaggggcgtccgccgggttaggaagccactgcctggcagcttgtggaagcctcatttgcaaagccacccctcagatgttttgaagatcgtgacgtcttgtaactagcagtgtgtgcacagaatcctactcaaggaacgtcttggcccagcgatgcaaagaactgaagtttcaagctggaagagcctgtattgtcctcacaatagtatagaagaattcaagaggggagaagagaagacagcacccgaatgaaagactgtaaaaagaaaaagaaggaaagccccagagattgaagaaaatctgcccaagactaggagggtaaccccagaggaaaccgtcttccagggcctgtttgcctggctatgccttcgagaacctggggatcccgaaaaattaggggaatttcttcagaaagacaatatcagcgtgcattatttctgtcttatcttatctagtaagctgcctcagaggggccagtccaacagaggcttccatggatttctgcctgaagacatcaaaaagggaggcagcccgggcttctaggaagatctgctttgtgtgcaagaaaaagggagctgctatcaactgccagaaggatcagtgcctcagaaacttccatctgccttgtggccaagaaagggggttgcctttcacaattttttggagagtacaaatcattttgtgacaaacatcgcccaacacagaacatccaacatggggcatgtgggggaggaaagctgcatcttatgttgtgaagacttatccccaacagagtgtttgagaacattccagagcccgtgttgtagtcaagccatctaccaccgcaagtgcatacagaaaatatgcccacacatcagtcaaagcatttcttcaaatgtccacagtgtaacaatcgaaaagagtttcctcaagaaatgctgagaatgggaattcatattccagacagagatgctgcctgggaactcgagccaggggctttctcagacttatatcagcgctatcagcactgtgatgcccccatcttgtctgtatgaacaaggcagagacagctttgaggatgaagggaggtggtgcctcattctgtgtgctacatgcggatcccacggaacccacagggactgctcctctcttagatctaacagtaagaaatgggagtgtgaggagtgttcacctgctgcagccacagactacatacctgaaaactcaggggacatcccttgctgcagcagcaccttccaccctgaggaacatttctgcagagacaacaccttggaagagaatccgggcctttcttggactgattggccagaaccttccttattagaaaagccagagtcctctcgtggcaggaggagctactcctggaggtccaagggtgtcagaatcactaacagctgcaaaaaatccaagtaacaccttctgagtagctgcttgtcccacacaatagggtatgaacgtgcgctcctccatcgggtttggggagggagcactctgggactgtgagacaaggaagcagggccagcagtgagactatgagccaagcaaagagaagtctcagtggagcatgaggagggagcagtccagatgccaacaaggaaatgcgtttatggctacaagagtgcctctgctttctcctcctctcctcccaccaaggattcttccaccttaatcttgttttcatatgcctcttcttacttcacccatgtttgttgttatgcaaataaaggttttctctccaaaaaaaaaaaaaaaaa

SEQ ID NO: 129012 - DNA, 484 bp, Homo sapiens
aagagtcagaaataaaaataaaaggtttctgttggtcaagatttaaaaaataaaaaagtttcttcctgcagccaatcacaagtccatccctttaagccaattataaacgcaccactggtgtctcccttgatgccagccccactgagtagctgtgaggtggggtggggcagggcagggttgggtaggggaagggggaggtggggcaaggggggctgctgccactcagccggcccaggagccacacagatctcttggccctcaacagcatccagggtgttccaagggctttgcagctactgcctccggtcttccgtctccgacctggaaaacgccatcaccacgtcctctgcacctgggccgcccgacccggccgggccggcaggggcagcgggtccggcgcgcagcgcgcggcggcctgttccggggcgtgctcagcccgagcagccgctgcggcggcggcagtagcagcagcaggagcggccgc

SEQ ID NO: 129013 - DNA, 372 bp, Homo sapiens
ctcaatcagtcattcaattcaacaaatattttcagagtactacaaagtttaggtcctatattataagagtagacaaaaagagccaaaaatctctgctctcaaagagcttaaatgctggtgggagctaagaagcagataaaaaaaggcgaaataatggttacttcaatttagcatataccaagtgctaggtggtcttctgagtatctactaggtattacttaatttaatcctcccaacaactccatgaggaaagtattactattgtgcatatggggaaactgagacacagagagattaagttacctgctgaagatcatgcagctcctgaaggcagaaccaagatccaaacctgatggtcttggtacaaagtcc

SEQ ID NO: 129014 - DNA, 725 bp, Homo sapiens
cgcagcggttgcatggtctgagcacgccccggaacaggcggcggcactcagcgcgccggacccgctgtccctgccggcccggccgggtcgggcggcccagggcggcaccttcctacttctgcccagccacagccctcccctcacagttgagcacctgtttgcctgaagttaatttccagaagcaggagtccccagagccaggcagggggatgaaccgcgagggagctcccgggaagagtcctgaaggagatgtacattcagcagaaggtccgagtgctgctcatgctgcggaagatgggatcaaacctgacagccagcgaggaggagttcctgcgcacctatgcaggtgtggttatacagccagctcagccagctgcctccgcactccatcgaccagggtgcagaggacgtggtgatggcgttttccaggtcggagacggaagaccggaggcagtagctgcaaagcccttggaacaccctggatgctgttgagggccaagagatctgtgtggctcctgggccggctgagtggcagcagccccccttgccccacctcccccttcccctacaccaaccctgccctgccccaccctacctcacagctactcagaggggctggcatcaagggagacaccagtggtgcgtttataattggcttaaagggatggacttgtgattggctgcaggaagaaactttttttttttttaaatcttgaccaacagaa

SEQ ID NO: 129015 - DNA, 951 bp, Homo sapiens
atggactttgtaccaagaccatcaggtttggatcttggttctgccttcaggagctgcatgatcttcagcaggccttgccttcctaatcagatgctggatgctgctgccccgcccctcagcttgaagggccagctgattagcaccgggagtgccacatacagtgacatgacaagggctggtgaaaataacatcgcacaaggatatgcctcgctgtcctggcaccctcctctcactccaaataacacatacctgtttacagaagtttctacactacaacacaaccatgaaaaatggagccacaggttagcagagcaagtggcatcgtggacaactgatgggaggaccaaaaagggatctgaaaagctggccaatggcacccagtctaaagagtcccactctggattcctgaacaagaaaacacagttagtccaaaatagaatgaaagtaaggacaaaaagcgaccagtttctcaggggctccttgcggggagcttaccgcgccctcactgtccgccggcccgagtgctaccggagatcaccagcggcccggacgccagcgagtggaacatctcggtcgcactctcattggttccagggggccggaagtgcgtgcgtccagcggaagtgctcccccggcgcggtccgccaggccagtgccctcaggacaagcatcataccaccacatactgttacacacaatgcagctgttctacgaaagggctccagcagcacagtgggaggctctataaatgccaccagggaagggggtggcagctggcagtgtgggaaggagagaatacctgcagtagcacagacaacatgtcagaaagaccatgggcagccagactggtacttttcggggcaaagtgaagatctggccttttacaaagggggtgcagaggacgtggtgatggcgttttccaggtcggagacggaagaccggaggcagtag

SEQ ID NO: 129016 - DNA, 517 bp, Homo sapiens
attggctgactttggctatagaaaaaagaaaggaacgattagagacagttttttttggaaagctaagtcttccctttatcgagtcaagaaacccccccttcttgagctatttacagcttttaacaattgagtaaagtacgctccggtcaccatggtgacagccgccctgggtcccgtctgggcagcgctcctgctctttctcctgaggtgtgagatccgtatggtggagctcacctttgacagagctgtggccagcggctgccaacggtgctgagactctgaggaccccctggatcctgcccatgtatcctcagcctcttcctgcgggcggccccacgccctgcctgaggagcagaccctacattaatatcaccatcctgaagggtgacaaaggggacccaggcccaatgggcctgccagggtacatgggcagggaggggccccaaggggagcctggcccttagggcagcaagggtgacaagggggagatgggcaggccccggcgccccgtgccaga

SEQ ID NO: 129017 - DNA, 1147 bp, Homo sapiens
ctaaccgcatgagggattaacagcaccagccaacgctgcccgttcagtaagctcatccgctctggcaaaagcctcttctttaaaaggcaccgtcacattcgcacctttaccaccagcactaaagaaagcgttcagtgtgttgatgaaatcattgatgggtgccaacacgcgcccatagggatgttcaatattcagttgctgagcaaattgctgatgaatgaatggcgatttgctgtgggccgtcagggcatcgcggatttctgaaggatttaaacgcccccccgtttcaccagacacaaccgggaccgccgcgccaaatggtgcgcgaacttcgtctgctgttcggcaaggtggcaatccactcaagttggcactggtagaaaccagcggtttaccataagcctggcacaaagcaaccaccaacgaatggtcggtgtctcgtacagcaagcgaatcaaagcggcccgtcaaccagcgcggtgttgtcgcaggcgcgggaaagacaaaggtgacaggaccatgtctgaagtaagtcttccggtgcatcaacatatatcgaaaaatcgacaaaatcagaaacaaatacatgatgtggatcgtgtggataatccatcccgctctgtaagacatttaacccttcaagaattaaaatatcaggctgaacaaccgttttatctccatccgggatcacatcataaataagatgtgagtaaacaggtgctgtaacgtttggcacgccggatttgagatcggaaacaaacttcaccaggcgatgcatatcatacgattccgggaagcctttcttcttcatcagaccacgttctttcagaacctgattagggtgaaggaagccatctgtagtgatcagttcaacacgacgatgttccgccaacggcttaatagcgcctgcaatacacgggcggttgtacttttccccaccgcgacactgccagcaatactgataatgtaaggaatgcgttgcccgttggtaccaagaaactgttccagaacctggacggcgcagattcgagcttatatagaagttcagcaaacgtgacaaaggtaaatagatctcggcaacttcttctaacgagagatcttcattaatacctctgagacgcgcgatctcatcttccgataacgtcat

SEQ ID NO: 129018 - DNA, 927 bp, Homo sapiens
atgccccatgtgtgcgctcaacgtcggctcccggtggcagcggtacttccacctgacggtgcgcagaactgcatcctgctcgctgggctgtctgctggcactttctgccatcatggaggtgttcacatcttgctgtccaatccagtggccactagcctcctggtagctattgacagggtgggtcagatacccatccctccacctccaccccctgccctgccctatgactgctgctgtcctccacccagcaggcacacagaggatagggaacatgtgcctattccactacactggaagcttatggtaaaccgctggtttctaccagtgccaactgagtggattgccaccttgtcgaacagtagtcgaagttcgcggacctgcagcatgcaaggccttagtttcctggacagtcaggtccaccttaaagcaatgatcgaggatttaagagggaatgtttctaaagaatctagcccatgtctggcagataatgcagatgttggacaatttcccatggaaggaggacagaaggaccccaagcagcggatcatccctttctgccagggggtgacaaacctcagtggaccccatggtcctggagcagtatgtggtggtagccactaccagaagcaggagagttcggagatcagcctcagcgtggggcaggtgtggacatcatcgagaagaatgagtcaggttggtggttcgtcacactgccgaggagcaaggctgggtccctgcaacgtgcctcgaaggccagatggggtgcaggatgagttttctctgcagcctgaagaagatgctggattggattcagagaagagtgagtctatgaccaggacacaggtagtcaagaatcttcaaaagccagcatcctacatcattcattcactggacagcaccttcaaagagctaaccatgactccatga

SEQ ID NO: 129019 - DNA, 478 bp, Homo sapiens; identical to SEQ ID NO: 117934
  misc_feature (1)...(478): n = a,t,c or g

SEQ ID NO: 129020 - DNA, 413 bp, Homo sapiens; identical to SEQ ID NO: 122730

SEQ ID NO: 129021 - DNA, 5976 bp, Homo sapiens; identical to SEQ ID NO: 119514
  misc_feature (1)...(5976): n = a,t,c or g

SEQ ID NO: 129022 - DNA, 2238 bp, Homo sapiens; identical to SEQ ID NO: 117937

SEQ ID NO: 129023 - DNA, 2151 bp, Homo sapiens; identical to SEQ ID NO: 118551

SEQ ID NO: 129024 - DNA, 1824 bp, Homo sapiens; identical to SEQ ID NO: 123214

SEQ ID NO: 129025 - DNA, 1251 bp, Homo sapiens; identical to SEQ ID NO: 119494

SEQ ID NO: 129026 - DNA, 2121 bp, Homo sapiens; identical to SEQ ID NO: 124478

SEQ ID NO: 129027 - DNA, 1140 bp, Homo sapiens; identical to SEQ ID NO: 119252

SEQ ID NO: 129028 - DNA, 2013 bp, Homo sapiens
atgaacattgatgcaaaaatcctcaataaaatactggcaaaccgaatccagcagcacatcaaaaagcttatccaccatgatcaagtgggcttcatccctgggatgcaaggctggttcaatatatgcaaatcaataaatgtaatccagcatataaacagagccaaagacaaaaaccacatgattatctcaatagatgcagaaaaggcctttgacaaaattcaacaacccttcatgctaaaaactctcaataaattaggtattgatgggatgtatttcaaaataataagagctatctatgacaaacccacagccaatatcatactgaatgggcaaaaactggaagcattccctttgaaaactggcacaagacagggatgccctctctcaccactcctattcagcatagtgttggaagttctggccagggcaattaggcaggagaaggaaataaagggtattcaattaggaaaaaaggaagtcaaattgtccctgtttgcggatgacatgattgtatatctagaaaaccccattgtctcagcccaaaatctccttaagctgataagcaacttcagcaaagtctcaggatacaaaatcaatgtacaaaaatcacaagcattcttatacaccaacaacagacaaacagagagccaaatcatgagtgaactgccattcacaattgcttcaaagagattaaaatacctaggaatccaacttacaagggatgtgaaggacctcttcaaggagaactacaaaccactgctcaaggaaataaaagaggatacaaacaaatggaagaacattccatgctcatgggtaggaagaatcaatatcatgaaaatggccatactgcccaaggtaatttacagattcaatgccatccccatcaagctaccaatgcctttcttcacagaactggaaaaaactactttaaagttcatatggaatgaaaaaagagcccgcatcgccaagtcaatcccaagccagaagaacaaagctggaggcatcacactacctgacttcaaactatactacaaggctacagtaaccaaaacagcatggtactggtaccaaaacagagatatagatcaatggaacagaacagagccctcagaaataacgccgcatatctacaactatctgatctttgacaaacctgagaaaaacaagcaaatccagaaagccttcatcctccatcaaggaaccttgggtaatgtggaacatgggaaccaatgtcagatgaaattgatgtatgaacataatcttcagagaacagcctgcaatatgacctatggatcatttggtggtgtaaaaggtagaggagcctcttcctgtgggcaccactaccactggcccacagaagtgttctggcaggccactgaccatgttcacttaaagtccaaggtctcttcagacagctgtggtaaatgctgccaggcctgggactcacccttcagggcagtgggctcccatctggcccagggcaggtccagaaatagtgtccaagagcctaagcctggacttggagaccccaggagcctgcttgttgctctacctcagtgtggccaagctgtggctaaggtggtatccaggatgcaagacaaagttctctttactcctcgttctcttctccttaagcagaggatggagtcactttcattgctccggccagccctgctggccctgggcaatgaggggcttagcacccaggccagcagctgcggagggtatactgggtcccccagcagtgccagaccactggcgctgcgctcaatttctcaccgggccttagctgccttcccgtggggcagggctcgcgacctgcagcccgccatgcctgagcctcccaccccctccgtgggctcctgtgcggccgagcttccccgggctggggagtgcgggcacagggcgcgggactggcaggcagctccacctgcagccccagtgcagggtccactgggtgaagccagctgggctcctaagtctggtggggatgtggagaacctttatgtctag

SEQ ID NO: 129029 - DNA, 2244 bp, Homo sapiens; identical to SEQ ID NO: 119518

SEQ ID NO: 129030 - DNA, 2805 bp, Homo sapiens; identical to SEQ ID NO: 121603

SEQ ID NO: 129031 - DNA, 2742 bp, Homo sapiens; identical to SEQ ID NO: 116262

SEQ ID NO: 129032 - DNA, 2481 bp, Homo sapiens; identical to SEQ ID NO: 118549

SEQ ID NO: 129033 - DNA, 873 bp, Homo sapiens
atcatggcggtcgcgctggcgttaggtatcggtacgatgattggctggcgccgtgtggcaacgactatcggtgagaaaatcggtaagaaaggcatgacctacgctcaggggatgtctgcccagatgacggcggcagtgtctatcggcctggcgagttataccgggatgccggtttccactactcacgtactctcctcttctgtcgcggggacgatggtggtagatggtggcggcttacagcgtaaaaccgtgaccagcattctgatggcctgggtgtttacccttccggctgcggtactgctttccggcgggctgtactggctctccttgcagttcctgtaatcgtacgcaccaaaacgagcgggtcagctggcccgcttcagattgtgacatagtgcgctttgttcatgccggatgcggcgtgaacgccttatccggcctacaaaaacatgcaaattcaatagattgcagagattatgtaggcctgataagcggagcgcatcaggcaattttgcggttgtaatcaggctcgagcgggtcagtttactggccccgtttttttatggcgtattattgctgaaatgcttaatgcccaagcgtcaatgcaatgaggctgaccaccaccagacccacacatgcgctgggcaaaaaaaaatggcgacgcacccgcttccaggggagaataaattcattatcggggaggatcgggaataccgttgggctttgatgttcccaaacgagaacgcccctgtttgttggggtttggccatggtgaggtaaaaaaagcccccctctttcaccttattgagaagaacaactggaatcctcttaaaagtaaacccggaggggattgccaacgttgggacctgggcg

SEQ ID NO: 129034 - DNA, 3255 bp, Homo sapiens
atggtaaagggatcaattcaacaagaggagctaactatcctaaatatttatgcacccaatacaggagcacccagattcataaagcaagtcctcagtgacctacaaagagacttagactcccacacattaataatgggagactttaacaccccactgtcaacattagacagatcaacgagacagaaagtcaacaaggatacccaggaattgaactcagctctgcaccaagcagacctaatagacatctacagaactctccaccccaaatcaacagaatatacatttttttcagcaccacaccacacctattccaaaattgaccacatagttggaagtaaagctctcctcagcaaatgtaaaagaacagaaattataacaaactatctctcagaccacagtgcaatcaaactagaactcaggattaagaatctcactcaaagccgctcaactacatggaaactgaacaacctgctcctgaatgactactgggtacataacgaaatgaaggcagaaataaagatgttctttgaaaccaacgagaacaaagacaccacataccagaatctctgggacgcattcaaagcagtgtgtagagggaaatttatagcactaaatgcctaccagagaaagcaggaaagatccaaaattgacaccctaacatcacaattaaaagaactagaaaagcaagagcaaacacattcaaaagctagcagaaggcaagaaataactaaaatcagagcagaactgaaggaaatagagacacaaaaaacccttcaaaaaatcaatgaatccaggagctggttttttgaaaggatcaacaaaattgatagaccgctagcaagactaataaagaaaaaaagagagaagaatcaaatagacacaataaaaaatgataaaggggatatcaccaccgatcccacagaaatacaaactaccatcagagaatactacaaacacctctacgcaaataaactagaaaatctggaagaaatggatacattcctcgacacatacactctcccaagactaaaccaggaagaagttgaatctctgaatcgaccaataacaggctctgaaattgtggcaataatcaatagtttaccaaccaaaaagagtccaggaccagatggattcacagccgaattctaccagaggtacaaggaggaactggtaccattccttctgaaactattccaatcaatagaaaaagagggaatcctccctaactcattttatgagaccagcatcattctgataccaaagccgggcagagacacaaccaaaaaagagaattttagaccaatatccttgatgaacattgatgcaaaaatcctcaataaaatactggcaaaccgaatccagcagcacatcaaaaagcttatccaccatgatcaagtgggcttcatccctgggatgcaaggctggttcaatatacgcaaatcaataaatgtaatccagcatataaacagagccaaagacaaaaaccacatgattatctcaatagatgcagaaaaagcctttgacaaaattcaacaacccttcatgctaaaaactctcaataaattaggtattgatgggacgtatttcaaaataataagagctatctatgacaaacccacagccaatatcatactgaatggacaaaaactggaagcattccctttgaaaactggcacaagacagggatgccctctctcaccgctcctattcaacatagtgttggaagttctggccagggcaatcaggcaggagaaggaaataaagggtattcaattaggaaaagaggaagtcaaattgtccctgtttgcagacgacatgattgtttatctagaaaaccccatcgtctcagcccaaaatctccttaagctgataagcaacttcagcaaagtctcaggatacaaaatcaatgtacaaaaatcacaagcattcttatacaccaacaacagacaaacagagagccaaatcatgagtgaactcccattcacaattgcttcaaagagaataaaatacctaggaatccaacttacaagggatgtgaaggacctcttcaaggagaactacaaaccactgctcaaggaaataaaagaggagacaaacaaatggaagaacattccatgctcatgggtaggaagaatcaatatcgtgaaaatggccatactgcccaaggtaatttacagattcaatgccatccccatcaagctaccaatgactttcttcacagaattggaaaaaactactttaaagttcatatggaaccaaaaaagagcccgcattgccaagtcaatcctaagccaaaagaacaaagctggaggcatcacactacctgacttcaaactatactacaaggctacagtaaccaaaacagcatggtactggtaccaaaacagagatatagatcaatggaacagaacagagccctcagaaataatgccgcatatctacaactatctgatctttgacaaacctgagaaaaacaagcaatggggaaaggattccctgtttaataaatggtgctgggaaaactggctagccatatgtagaaagctgaaactggatcccttccttacaccttatacaaaaatcaattcaagatggattaaagatttaaacgttaaacctaaaaccataaaaaccctagaagaaaacctaggcattaccattcaggacataggcgtgggcaaggacttcatgtccaaaacaccaaaagcaatggcaacaaaagacaaaattgacaaatgggatctaattaaactaaagagcttctgcacagcaaaagaaactaccatcagagtgaacaggcaacctacaacatgggagaaaatttttgcaacctactcatctgacaaagggctaatatccagaatctacaatgaactcaaacaaatttacaagaaaaaaacaaacaaccccatcaaaaagtgggcgaaggacatgaacagacacttctcaaaagaagacatttatgcagccaaaaaacacatgaagaaatgctcatcatcactggccatcagagaaatgcaaatcaaaaccactatgagatatcatctcacaccagttagaatggcaatcattaaaaagtcaggaaacaacaggccagaaaagaccaaaagttttttacctcctttgccaacacaaagttcaattcacagtggtttcctagagcattgtgttgaacaggattctgaggctctgtctggagaggctggtaaaagtctgatgtttgccatgggtgtaggaagtgaacgagcaaagcat

SEQ ID NO: 129035 - DNA, 3813 bp, Homo sapiens; identical to SEQ ID NO: 128656

SEQ ID NO: 129036 - DNA, 3156 bp, Homo sapiens; identical to SEQ ID NO: 124193

SEQ ID NO: 129037 - DNA, 3325 bp, Homo sapiens; identical to SEQ ID NO: 124194

SEQ ID NO: 129038 - DNA, 1870 bp, Homo sapiens; identical to SEQ ID NO: 123235

SEQ ID NO: 129039 - DNA, 2070 bp, Homo sapiens; identical to SEQ ID NO: 119520

SEQ ID NO: 129040 - DNA, 1296 bp, Homo sapiens; identical to SEQ ID NO: 119528

SEQ ID NO: 129041 - DNA, 3229 bp, Homo sapiens; identical to SEQ ID NO: 128659

SEQ ID NO: 129042 - DNA, 3352 bp, Homo sapiens
atggtaaagggatcaattcaacgagaggagctaactatcctaaatatttatgcacccaatacaggagcacccagattcataaagcaagtcctcagtgacctaaaaagagacttagactcccacacattaataatgggagactttaacaccccactgtcaacattagacagatcaacgagacagaaagtcaacaaggatacccaggaattgaactcagctctgcaccaagcagacctaatagacatctacagaactctccaccccaaatcaacagaatatacatttttttcagcaccacaccacacctattccaaaattgaccacatagttggaagtaaagctctccttagcaaatgtaaaagaacagaaattataacaaactatctctcagaccacagtgcaatcaaactagaactcaggattaagaatctcactcaaagccgctcaactacatggaaactgaacaacctgctcctgaatgactactgggtacataacgaaatgaaggcagaaataaagatgttctttgaaaccaacgagaacaaagacaccacataccagaatctctgggacgcattcaaagcagtgtgtagagggaaatttatagcactaaatgcctacaagagaaagcaggaaagatccaaaattgacaccctaacatcacaattaaaagaactagaaaagcaagagcaaacacattcaaaagctagcagaaggcaagaaataactaaaatcagagcagaactgaaggaaatagtgacacaaaaaacccttcaaaaaatcaatgaatccaggagctggttttttgaaaggatcaacaaaattgatagaccgctagcaagactaataaagaaaaaaagagagaagaatcaaatagacacaataaaaaatgataaaggggatatcaccaccgatcccacagaaatacaaactaccatcagagaatactacaaacacctctacgcaaataaactagaaaatctagaagaaatggatacattcctcgacacatacactctcccaagactaaaccaggaagaagttgaatctctgaatagaccaataacaggctctgaaattgtggcaataatcaatagtttaccaaccaaaaagagtccaggaccagatagattcacagccgaattctaccagaggtacaaggaggaactggtaccattccttctgaaactattccaatcaatagaaaaagagggaatcctccctaactcattttatgaggccagcatcattctgataccaaagccgggcagagacacaaccaaaaaagagaattttagaccaatatccttgatgaacattgatgcaaaaatcctcaataaaatactggcaaaccgaattcagcagcacatcaaaaagcttatccaccatgatcaagtgggcttcatccctgggatgcaaggctggttcaatatacgcaaatcaataaatgtaatccagcatataaacagagccaaagacaaaaaccacatgattatctcaatagatgcagaaaaagcctttgacaaaattcaacaacccttcatgctaaaaactctcaataaattaggtattgatgggacgtatttcaaaataataagagctatctatgacaaacccacagccaatatcatactgaatgggcaaaaactggaagcattccctttgaaaactggcacaagacagggatgccctctctcaccactcctattcaacatagtgttggaagttctggccagggcaatcaggcaggagaaggaaataaagggtattcaattaggaaaagaggaagtcaaattgtccctgtttgcagatgacatgattgtttatctagaaaaccccatcgtctcagcccaaaatctccttaagctgataagcaacttcagcaaagtctcaggatacaaaatcaatgtacaaaaatcacaagcattcttatacaccaacaacagacaaacagagagccaaatcatgggtgaactcccattcacaattgcttcaaagagaataaaatacctaggaatccaacttacaagggatgtgaaggacctcttcaaggagaactacaaaccactgctcaaggaaataaaagaggacacaaacaaatggaagaacattccatgctcatgggtaggaagaatcaatatcgtgaaaatggccatactgcccaaggtaatttacagattcaatgccatccccatcaagctaccaatgactttcttcacagaattggaaaaaactactttaaagttcatatggaaccaaaaaagagcccgcatcgccaagtcaatcctaagccaaaagaacaaagctggaggcatcacactacctgacttcaaactatactacaaggctacagtaaccaaaacagcatggtactggtaccaaaacagagatatagatcaatggaacagaacagagccctcagaaataatgccgcatatctacaactatctgatctttgacaaacctgagaaaaacaagcaatggggaaaggattccctatttaataaatggtgctgggaaaactggctagccatatgtagaaagctgaaactggatcccttccttacaccttatacaaaaatcaattcaagatggattaaagatttaaacattagacctaaaaccataaaaaccctagaagaaaacctaggcattaccattcaggacataggcgtgggcaaggacttcatgacagcaaaagaaactaccatcagagtgaacaggcaacctacaacatgggagaaaattttcgcaacctactcatctgacaaagggctaatatccagaatctacaatgaactcaaacaaatttacaagaaaaaaacaaacaaccccatcaaaaagtgggcgaaggacatgaacagacacttctcaaaagaagacatttatgcagccaaaaaacacatgaagaaatgctcatcctcactggccatcagagaaatgcaaatcaaaaccactatgagatatcatctcacaccagttagaatggcaatcattaaaaagtcaggaaacaacagcttcctaacattccttgggaatccacgtctgcccagctttcaggctgcaggtccacaagtccaggtgaattttctcccttgccagcgcccaggattccatggggtacagtcctgtccaatcagaacattgcattctcttggccactatgattggctcagagatgaccatgtgactcgatcaaatctgaccctaagaattttgctagaaagaccaagaagaaaagcaccattttaccctctagattttccaagaagttatgatgcaggcctagagctgttggtgccatcatgtcaccacaagggacagcctgcttggaaatggagccaacgcagag

SEQ ID NO: 129043 - DNA, 1422 bp, Homo sapiens; identical to SEQ ID NO: 124508

SEQ ID NO: 129044 - DNA, 1716 bp, Homo sapiens; identical to SEQ ID NO: 124200

SEQ ID NO: 129045 - DNA, 705 bp, Homo sapiens
atgactcaccctttaggaggccattccaatgttctatctagacaacagcttctaggtgatgggaaatttgctgatagcgctgaattctatggtgcgttggaacttctggccagggcaattaggcaggagaaggaaacaaagggtattcgattaggaaaagaggaagtcaaattgttgctgtttgcagatgacatgattgtatatctagaaaaccccattgtctcagcccaaaatctccttaagctgataagcaacttcagcaaagtctcaggatacaaaatcaatgtacaaaaatcacaagcattcttatacaccaacaacagacaaacagagagccaaatcatgagtgaactcccattcacaattgcttcaaagagaataatatacctaggaatccaacttacaagggatgtgaaggacctcttcaaggagaactacaaaccactgctcaaggaaataaaagaggatacaaagaaatggaagaacattccatgctcatgggtaggaagaatcaatatcatgaaaatggccatactgcccaagctatttgcggaccacctatttggtggtgttgaggtctttcttttcgtggggatggcctatgatcactatgtggccatctctaagccactgcactatttgatcatcgtgaatcgactggtttgcatccttctgttggtggtggccgtgactggaggattttga

SEQ ID NO: 129046 - DNA, 2388 bp, Homo sapiens
atgagggaggaacttcgcttcgggtcccggcgaattcgcgccggggttcttgcctttccagttagactcagcccactgtatgatcaagtcgtgcatctctggcacacagtcaatgcttcatgcatctttgtggaactggatcaaaatgaatggcatcttggtcacacttcagccacagaggtgcacactcagggctgcatggtgagaccggaaaggcaagagaaacccaacaacctgagccaatgctgtgcacagcatgctgtgagccagtgctggcaacaagacaccaacaagaggaaagaggccaggtgctgtgagccagtgctggcaacaagacaccaaaaaaagcaagaggccgggtactatgagccagtgctggcaacaagacaccaaaaaaagcaagaggccgggtgctatgagccagtgctggcaacaggacaccaaaaagagcaagaggccggcatttctgtaacacagtttcctcagttttattgttcttatgtacttaacaatggatctcactcgctctcagaaacacggatgggcgtcctccccatcacacggcacaagcccatggccagtgagactcagaaccagcctggccaagccctgcaaatggcaggtcagcctttgctggtggctgtcagcgtctcctggatcctcgttctccctcgtgagatcatctctgctcatcatcgtccctcatgcggaatccgtgtccaggcgaccatccctgctctccagggtcggtctcttccctgcacgttattaacacagggtgtggcaacgcagtccaagcccacagacaagagaccacctgataaaaagaaatccatcacaggacgtgtgaaggaggcagcaaccacgtggaactcgtgtctcgaacacagtgcagtcttcacacctcagcgctgggcatcgggaggcagccttcatgtgatgctaccctatgaggccagcaagggctcccgggaaatgaaaacggcagcagccggcacccagtcccagcagcagacaggagcagcgttggaagttctggccagggcaattaggcaagagaaggaaataaagggtattcaattaggaaaagaggaagtcaaattgtccctgtttgcagatgacatgattgtatatctagaaaaccccactgtctcagcccaaaatctccttaagctgataagcaacttcagcaaagtctcaggatacaaaatcaatgtacaaaaatcacaagcattcttatacaccaacaacagacaaacagagagccaaatcatgagtgaactcccattcacaattgcttcaaagagaataacatacctaggaatccaacttacaagggatgcgaaggacctcttcaaggagaactataaaccactgctcaaggaaataaaagaggatacaaacaaatggaagaacattccatgctcatgggtaggaagaatcaatatcgtgaaaatggccatactgcccaaggaacctggatgggcgaggtccctggtctttggggcgcggggcctgcagggacagggtcgctgcgggcagagcagagggggtggtgggtcctgcctggggggcgggggcagcaccgagaactggcagcaccgagaaccgtcagcacggaaaaccggcagcaccgagaaccggcggcaccgagaaccggcggcaccgagaaccggcagcaccgagaaccagcaccgagaaccggcagcaccgagaaccggcaccgagaaccggcaccgagaaccgtcagcacggaaaaccggcagcaccgagaaccggcggcaccgagaaccggcagcaccgagaaccggcagcaccgagaaccagcaccgagaaccggcagcaccgagaaccggcaccgagaaccggcaccaagaaccggcggcaccgagaaccggcggcaccgagaatcggcagcaccgagaaccggcagcaccgagaaccggcaccgagaaccggcagcaccgagaaccggcaccaagaaccggcagcaccgagaaccggcagcaccgagaaccggcaccgagaaccggcagcaccgagaaccgtcagcaccgagaatcggcagcaccgagaaccggcagcaccgagaaccggcaccaagaaccggcagcaccgagaaccggcactgagaaccggcaccgagaaccgtcggcaccgagaaccgtcggcaccgagaaccggcggcaccgagaactggtggcaccgagaaccggcggcaccgagaaccggccccgagagccacctgcggggaccaggcccaggcacaccccgatgcggggcggctctgagggcgccttgtttcaccaaaggcggtttttggaacccacgccggaccgtgaacaactcgagggcattcgatacccaccggtagcctcggtgtcctag

SEQ ID NO: 129047 - DNA, 2274 bp, Homo sapiens; identical to SEQ ID NO: 124201

SEQ ID NO: 129048 - DNA, 3192 bp, Homo sapiens; identical to SEQ ID NO: 118064

SEQ ID NO: 129049 - DNA, 3354 bp, Homo sapiens; identical to SEQ ID NO: 116243

SEQ ID NO: 129050 - DNA, 3192 bp, Homo sapiens
atgggagactttaacaccccactgtcaacattagacagatcaacgagacagaaagtcaacaaggatacccaggaattgaactcagctctgcaccaagcagacctaatagacatctacagaactctccaccccaaatcaacagaatatacatttttttcagcaccacaccacacctattccaaaattgaccacatactgggaagtaaagctctcctcagcaaatgtaaaagaacagaaattatagcaaactatctctcagaccacagtgcaatcaaactagaactcaggattaagaatctcactcaaaaccgctcaactacatggaaactgaacaacctgctcctgaatgactactgggtacataacgaaatgaaggcagaaataaagatgttctttgaaaccaacgagaacaaagacacaacataccagaatctctgggacgcattcaaagcagtgtgtagagggaaatttatagcactaagtgcccacaagagaaagcaggaaagatccaaaattgacaccctaacatcacaattgaaagaactagaaaagcaagagcaaacacattcaaaagctagcagaaggcaagaaataactaaaatcagagcagaactgaaggaaatagagacacaaaaaacccttcaaaaaattaatgaatccaggagctggttttttgaaaggatcaacaaaattgatagaccactagcaagactaataaagaaaaaaagagagaagaatcaaatagatgcaataaaaaatgataaaggggatatcaccatcgatcccacagaaatacaaactaccatcagggaatactacaaacacctctacgcaaataaactagaaaatctagaagaaatggataaattcctggacacatacactctcccaagactaaaccaggaagaagttaaatctctgaatagaccaataacaggagctgaaattgtggcaataatcaatagcttagcaatcaaaaagagtccaggaccagatggattcacagccgaattctaccagcggtacaaggaggaactggtaccattccttctgaaactattccaatcaatagaaaaagagggaatcctccctaactcattttatgaggccagcatcattctgataccaaagccaggcagagacacaacaaaaaaagagaattttagaccaatatccttgatgaacattgatgcaaaaatcctcaataaaatactggcaaaccgaatccagcagcacatcaaaaagcttatccaccatgatcaagtgggcttcatccctgggatgcaaggctggttcaatatacacaaatcaataaatgtaatccaacatataaacagagccagagacaaaaaccacatgattatctcaatagatgcagaaaaagcatttgacaaaattcaacaacccttcatgctaaaaactctcaataaattaggtattgatgggacgtatctcaaaataataagagctatctatgacaaacccacagccaatatcatactgaatgggcaaaaactggaagcattccctttgaaaactggcacaagacagggatgccctctctcaccactcctattcaacatagtgttggaagttctggccagggcaattaggcaggagaaggaaataaagggtattcaattaggaaaagaggaagtcaaattgtccctgtttgcagacgacatgattgtatatctagaaaaccccattgtctcagcccaaaatctccttaagctgataagcaacttcagcaaagtctcaggatacaaaatcaatgtacaaaaatcacaagcattcttatacaccaacaacagacaaacagagagccaaatcatgagtgaactcccattcacaattgcttcaaagagaataaaatacctaggaatccaacttacaagggatgtgaaggacctcttcaaggagaactacaaaccactgctcaaggaaataaaagaggatacaaacaaatggaagaacatgccatgctcatgggtaggaagaatcaatatcgtgaaaatggccatactgcccaaggtaatttacagattcaatgccatccccatcaagctaccaatggctttcttcacagaattggaaaaaactactttaaagttcatatggaaccaaaaaagagcccgcatcgccaagtcaatcctaagtcaaaagaacaaagctggaggcatcacactacctaacttcgaactatactacaaggctacagtaaccaaaacagcatggtactggtaccaaaacagatatatagaccaatggaacagaacagagccctcagaaataacaccgcatatctacaactatctgatctttgacaaacctgggaaaaacaagcaatggggaaaggattccctatttaataaatggtgctgggaaaactggctagccatatgtagaaagctgcaactggatcccttccttacaccttatacaaaaatcaattcaagatggattaaagacttaaacgttagacctaaaaccataaaaaccctagaagaagacctaggcattaccattcaggacataggcatgggcaaggacttcatgtctaaaacaccaaaagcaatggcaacaaaagacaaaattgacaaatgggatctaattaaactcaagagcttctgcacagcaaaagaaaccaccatcagagtgaacaggcaacctacaaaatgggagaaaattttcgcaacctactcatttgacaaagggctaatatccagaatctacaatgaactccaacaaatttacaagaaaaaaacaaacaaccccatcaaaaagtgggcgaaggacatgaacagacacttctcaaaagaagacatttatgcagccaaaaaacacatgaaaaaatactcatcatcactggccattagagaaatgcaaatcaaaaccacaatgagataccatctcacacccgttagaatggcaaccattaaaaactcaggaaacaacaggtcattgtgtttttataaggaaaacctaagcctttgtctggcgatccttctctctgttcctgtgcaagaaggaggggccagaagttttctggccccagcaggaggcgtggcaggccgagcaacaagtcactatggcggacacatggcgactgcagagaggctgtcagtggagctatctgggcaagccctgaaggaattccaaaagggccctttatctccaaaacagtttaag

SEQ ID NO: 129051 - DNA, 2745 bp, Homo sapiens; identical to SEQ ID NO: 128662

SEQ ID NO: 129052 - DNA, 2313 bp, Homo sapiens; identical to SEQ ID NO: 124197

SEQ ID NO: 129053 - DNA, 1545 bp, Homo sapiens; identical to SEQ ID NO: 124207

SEQ ID NO: 129054 - DNA, 3303 bp, Homo sapiens; identical to SEQ ID NO: 124208

SEQ ID NO: 129055 - DNA, 1827 bp, Homo sapiens; identical to SEQ ID NO: 119535

SEQ ID NO: 129056 - DNA, 2985 bp, Homo sapiens; identical to SEQ ID NO: 121567

SEQ ID NO: 129057 - DNA, 3033 bp, Homo sapiens
atgtctggctttctgatctctcctaaacataagcatggcactaactctggaattgtcagttgggcagatgtacagagtcagctcaggcacatagaagcagcatttgaccaggaggctgcggcagtgttgatggcacggcttggggtgttccgagcggagtcagaggaggggcccgatgtgctccggtggctggaccgacaactcatccgactgcactctctactgacaacgcttgatatcgtgccagctggcaaaggagaggtagtgaaagggcccatgtccatttcacagcaggcaaaggggtgtcaaaagtttggacagtataacaaagaagaccccacttcttttaggttatcagattccttttctctatatcctcagtttatgttccatctgagaagatctccatttcttcaagtgtttaacaacagtcctgatgagtcgtcatattacagacatcattttgcccggcaggacctgacccagtccctcatcatgatccagcccattctctactcttactcctttcatgggccaccagagccagtactcttggatagcagcagcattctagctgacagaattttgctgatggatactttctttcaaattgtcatttatcttggtgagaccatagcccagtggcgtaaagctggctaccaggacatgcccgagtatgaaaacttcaagcaccttctgcaggcaccactggatgatgctcaagaaattctgcaagcacgcttcccgatgccacgttacatcaacacggagcatggaggcagtcagaagaaaagagagaagaatcaaatagacgcaataaaaaatgataaaggggatatcaccaccgagcccacagaaatacaaactaccatcagagaatactataaacacctctatgcaaataaactagaaagtctagaagaaatgaataaattcctcgacacatacactctcccaagactaaaccaggaagaagttgaatctctgaatagacaaataacaggctctgaaattgaggcaataattaatagcttaccaaccaaaaaaagtccaggaccagacagattcacagccaaattctaccagagaaccaatgaccaaaaacacatgattatctcaatagatgcagaaaaagcctttgacaaaattcaacaaccctttatgctaaaaactctcaataaattaggtattgatgggacgtatttcaaaataataagagctatttatgacaaacccacagccaatatcatactgaatgggcaaaaactggaagcattccctttgaaaactggcacaagacagggatgccctctctcactgctcctattcaacataatgttggaagttctggccagggcaatcaggcaggagaaggaaataaagggtattcaatttggaaaagaggaagtcaaattgtccctgtttgcagatgacatgattgtatatctagaaaaccccattgtcttagcccaaaatctccttaagctgataagcaacttcagcaaagtctcaggatacaaaatcaatgtgcaaaaatcacaagcattcttatacaccagtaacagacaaacagagagccaaatcatgagtgaactcccattcacaattgcttcaaagagaataaaatacctaggaatccaacttacaagggatgtgaaggacctcttcaaggagaactacaaaccactgctcaatgaaataaaagaggatacaaacaaatggaagaacattccatgctcatgggtaggaagaatcaatatagtgaaaatggccatactgcccaaggtaatttacagattcaatgccatccccatcaagctatcaatgactttcttcacggaattggaaaaaactactttagagttcatatggaaccaaaaaagagcccgcattaccaagtcaatcctaagccaaaagaacaaagctgaaggcatcacgctacctgacttcaaactacagtacaaggctacagtaaccaaaacagcatggtactcgtaccaaaacagagatatagatcaatggaacagaacagagccctcagaaatagtgccatgcatctacaactatctcatctttgacaaacctgacaaaaacaagaaatggggaaaggattccctatttaataaatggtgctgggaaaactggctagccatatgtagaaagctgaaactggatcccttccttacaccttatacaaaaattaattcaagacggattaaagacttaaatgttagacctaaaaccataaaaaccctagaagaaaacctaggcaataccattcaggacgcctcaaaaaagaaggtgtatatgctctataacctgcagccagaccggtctgtgactggtggagcctggtacagtgaccaggattttgaatctgaatttgtagaggtgcttaaccaacagtgttttaaattcctacagtccaaggcagaaacagcacgagaaagcaaacagaacccaatgatacaaagaaatagttcatttgcctcatcacatgaagtgtggaaatatatctgcgaattgggaatcagtaaggtagagttatccatggaagacattgaaaccatcctgaatacactcatttatgatggaaaagtggagatgacgattattgctgcaaaagaaggcacagttggcagtgtagatggacacatgaaactgtacagggcagtcaatccaatcatccctcccacaggtttggtccgggcaccctgtggactctgcccggtgactcttgctttgtaccggaagaagctggcacttactagccaacttgcttcttttgggttgctgtgcatgtttccgattgtttgtgaggtttgttctcatctcggacagattcctcatgaaactggacaatgtggttattatggtctacagcagcggtccccaacctttttggcaccagggaccagttttgtagaagacaatttttccacggacctggttgggggatggattcaggatgaaactgctcctcctcagatcatcagtcatgagttagattcttataaggaacgcgcaacctag

SEQ ID NO: 129058 - DNA, 1431 bp, Homo sapiens; identical to SEQ ID NO: 124497

SEQ ID NO: 129059 - DNA, 1975 bp, Homo sapiens
tgcaatcaaactagaactcaggattaagaatctcactcaaaaccgctcaactacatggaaactgaacaacctgctcctgaatgactactgggtacatagcgaaatgaaggcagaaataaagatgttctttgaaaccaacgagaacaaagacacaacataccagaatctctgggacacattcgaagcaaaaagcaagagcaaacaacattcaaaagctagcagaaggcaagaaataactaaaatcagagcagaactgaaggaaatagagatacaaaaaacccttcaaaaaattaatgaatccaggagctggttttttgaaaggatcaacaaaattgatagaccactagcaagactaataaagaaaaaaagagagaagaatctaatagacgcaataaaaactgataaaggggatatcaccaccaatcccacagaaatacaaactaccatcagagaatactacaaacacctctacgcaaataaactagaaaatcgagaagaaatggataaattcctcgacacatacactctcccaagactaaacgaggaagaagtcgaatctctgaatacaccaataacaggctcagaaattgtagcaataatcaatagcttaccaaccaaaaagagtccaggaccagatggattcacagccgaattgtaccagaggtacaaggaggaactggtaccattccttctgaaactattccaatcaatagaaaaagagggaatcctccctaactcattttatgaggccagcatcattctgataccaaagccaggcagagacacaaccaaaaaagagaattttagaccaatatcgttgatgaacattgatgcaaaaatcctcaataaaatactggcaaaaggaatccagcagcacatcaaaaagcttatccaccatgatcaagtgggcttcatccctgggatgcaaggccggttcaatatacgcaaatcaataaatgtaatccagcatataaacagaaccaaagacaaaaaccacatgattatctcaatagatgcagaaaaagcctttgacaaaattcaacaaccctttatgctaaaaactctcaataaattaggtattgatgggacgtatttcaaaataataagagctatctatgacaaacccacagccagtatcatactgaatgggcaaaaactagaagcattccgtttgaaaactggcacaagacagggatgccctctctcaccactcctattcaacatagtgtttgaaattctggcccgggcaattaggcaggagaaggaaataaagggtattcaattaggaaaagaggaagtcaaattgtccctgtttgcaggcgacatgattgtatatctagaaaaccccattgtctcagcccaaaatctccttaagctgataagcaacttcagcaaagtctcaggatacaaaatcaatgtgcaaaaatcacaagcattcttatacaccaataacagacaaacagagagccaaatcatgagtgaactcccattcacaattgcttcaaagagaataaaatacctaggaatccaacttacaagggatgtgaaggacctcttcaaggagaactacaaaccactgctcaaggaaataaaagaggatacaaacaaatggaagaacattccatgctcatgggtaggaagaatcaatatcgtgaaaatggccatactgcccaagctgataggcaactgcagcaaaatctcaggatacaaaatcaatgtgcaaaaatcacaagcattcttatacaccaataacagacaaacagagagccaaatcatgagtgaactcgcattcacaattgcttcaaagaaaatcaaatacctaggaatccaacttacaagggatgtgaaggacctcttcaaggagaactacaaaccactgctcaatgaaataaaagaggatacaaacaaatggaagaacattccatgctcatgggtaggaagaatcaatatcgtgaaaatggccatactgcccaag

SEQ ID NO: 129060 - DNA, 3894 bp, Homo sapiens
atgaagccagaaataaagatgttctttgaaaccaacgagaacaaagacacaacataccagaatctctgggacacattcaaagcagtgtgtagagggaaatttatagcactaaatgcccacaagagaaagcaggaaagatctaaaatcaacaccctaacatcacaattcaaagaactagagaagcaagagcaaacaaattcaaaagctagcagaaggcaagaaataactaagatcagagcagaactgaaggaaatagagacacaaaaaccccttcaaaaaatcaatgaatccaggagctggttttttgaaaagatcaacaaaattgatagaccgctagcaagactaataaagaagaaaagagagaagaatcaaatagacgcaataaaaaatgacaaaggggatatcaccactgatcccacagaaatacaaactaccatcagagaatactataaacacctctacgcaaataaactagaaaatctagaagaaatggataaattcctggacatgtacactctcccaagactaaaccaggaagaagttgaatctctgaatagaccaataacaggctcagaaattgaggcaataattaacagcttaccaaccaaaaaaagtccaggaccagatggattcacagctgaattctaccagaggtacaaggaggagctggtatcattccttctgaaactattccaatcaataaaaaaagagggaatcctcctgaacttattttatgaggacagcatcatcctgaaaccaaagcctggcagagacacaacaaaaaaagagaattttagaccaatatccttgatgaacattgatgcaaaaatcctcattaaaatactggcaaaccgaatccagcaacacatcaaaaagcttatccaccatgatcaagtgggcttcatccctgggatgcaaggctggttcaacatacgaaaatcaataaatgtaatccagcatataaacagaaccaaagacaaaaaccacatgattatctcaatagatgcagaaaaggcctttgacaaaattcaacaacccttcatgttaaaaactctcaataaattaggtattcatgggacatatctcaaaataataagagctatctatgacaaacccacagccaatatcatactgaatgggcaaaaactgaaagcattccctttgaaaactggcacaagacagggatgccctctctcaccactcgtattcaacatagtgttggaagttctggcctgggcaatcaggcaggagaaggaaataaagggcatccaattaggaaaagaggaagtcaaattatccctgtttgcagatgacatgactgtatatctagaaaacccgatcatctcagcccaaaatctccttaagctgataagcaacttcagcaaagtctcaggatacaaaatcaatgtacaaaaatcacaagcattcttatacaccaataacggacaaacagagagcctaatcatgagtgaactcccattcacaattgcttcaaagagaataaaatacctaggaatccaacttacaagggatgtgaaggacctcttcaaggagaactacaaaccactgctcaatgaaataaaagaggattacaaacaaatggaagaacattccatgctcatgggtaggaagaatcaatatcgtgaaaatggccatactgcccaagtgaggagcgcctctgcccggccgcccatcgtctgggaagtgaggagcgcctctgcccggccgcccatcatctgggaagtgaggagcgcctctgcccggccgcccatcgtctgggaagtgaggagcgcctctgcccggccgccctgtctgggaagtgaggagcacctctgcccggccgctgtgcaatcttccaagtgtgaaggacagccattctgcaggtgtacccaacagctccaaagagacagcgaccatcgagaaggggccatgatgacgatggcggttttgtcgaaaagaaaagggggaaatgcaaagaagttgaaaactttgaaaaaaaatttagaagaatgtataactagaataaccaatacagagaagtgcttaaaggagctgatggagctgaaaaccaaggctcgagaactacgtgaagaatgcagaagcctcaggagccgatgcgatcaactggaagaaagggtatcagcgatggaagatgaaatgaatgaaatgaagcgagaagggaagtttagagaaaaaagaataaaaagaaatgagcaaagcctccaagaaatatgggactatgtgaaaagaccaaatctatgtctgattagtgtacctgaaagtgatggagagaatggaaccaagttggaaaacactctgcaggatattatccaggagaacttccccaatctaccaaggcaggccaatgttgagattcaggaaatacagagaacgccacaaagatactcctcgagaagagcaactccaagacacataattgtcagattcaccaaagttgaaatgaaggaaaaaatgttaagggcagccagagagaaaggtcgggttaccctcaaagggaagcccatcagactaactgcggatctctcggcagaaatcctacaagccagaagagagtgggggccgatattcaacattcttaaagacaagaattttcaacccagaatttcatatccagccaaactaagcttcataagcgaaggagaaataaaatcctttacagacaagcaaatgctgagagattttgtcaccaccaggcctgccctaaaagagctcctgaaggaagtgctaaacatggaaaggaacaaccggagctggttttttgaaaagatcaacaaaattgatagaccactagcaagagtaataaagaagaaaagagagaagaatcaaatagacgcaataaaaaatgataaagaggatatcaccaccaatcccacagaaatacaaactatcatcagagaatactacaaacacctctacccaaataaactagaaaatctagaagaaatggatacattcctcgacacatacaccttcccaagactaaaccaggaagaagttgaatctctgaatacatcaataacaggctctgaaattgtggcaataatcagtatagcataccaaccaaaaaaagtccaggaccagatggatccacagccgaattctaccagagtgttggaagttctggccagggcaattaggcaggagaaggaaataaagggtattcaattaggaaaagaggaagtcaaattgtccctctttgcagatgacatgattgtatatctagaaaaccccattgtctcagcccaaaatctccttaagctgataagcaacttcagcaaagtctcaggatacaaaatcaatgtacaaaaatcacaagcattcttatacaccaacaacagacaaacagagagccaaatcatgagtgaactcccattcacaattgcttcaaagagaataaaatgcctaggaatccaacttacaagggatgtgaaggacctcttcaaggagaactacaaaccactgctcaaggaaataaaagaggatacaaacaaatggaagaacattccatgctcatgggtaggaagaatcaatatcgtgaaaatggccatactgcccaaggtaatttacagattcaatgccatccccatcaagctaccaatgactttcttcacagatttggaaaaaactactttaaatttcatatggaaccaaaaaagagcccgcatcaccaagtcaatcctaagccaaaagaacaaagccggaggcatcacactacctgacttcaaactatactacacggctacagtaaccaaaacagcatggtactggtaccaaaacagcatggtactggtaccaaaacagagatatagatcaatggaacagaacagagccctcagaaataacgccgcatgtctacaactatctgatctttga

SEQ ID NO: 129061 - DNA, 4309 bp, Homo sapiens
atgcattcctgcttgccagatgccacaggggaaggagaactttacaactccctgggctctctgacctggagctttctttccatgataggagtacttctttgggttgacttctctggtgacagtattgacttgtgctccccactttggaacaggaccaacttggaggccttgcagaagaagctggaggagctagagcttgatgagcagcagcgaaagcgccttgaggcctttcttacccagaagcagaaggtgggagaactgaaggatgacgactttgagaagatcagtgagctgggggctggcaatggcggtgtggtgttcaaggtctcccacaagccttctggcctggtcatggccagaaagctaattcatctggagatcaaacccgcaatccggaaccagatcataagggagctgcaggttctgcatgagtgcaactctccgtacatcgtgggcttctatggtgcgttctacagcgatggcgagatcagtatctgcatggagcacatggtcctgttgcaggaaaggccctgccctggcttcctctggatggaaaattctgactatgggctgctgcttcccttggaccttctgctttgcctcagcttcagtttttcaaaggtgttgtcagatttagtcagtgacatcctaatccacgggatgaaggctcgaaaccgctcaattcatggagatgtggtagttgtggagctgcttcctaaaaatgaatggaaaggaagaaccgtagccctgtgtgagaatgactgtgacgacaaggcttcgggcgagtccccaagtgagcccatgcctacaggtcgagtggtgggcatacttcagaagaactggcgggattatgtggtgacatttccgtccaaagaagaggtccaatctcagggcaaaaatgctcagaaaatcctggttacaccttgggattacagaattcccaaaattcgaattagcactcagcaagcagaaaccctccaggacttcagggtggtcgtgcgcatcgattcctgggagtcaacatctgtgtatccaaatggacattttgtgcgtgttttaggaagaatcggagatctggaaggggaaattgcaaccatcctggtggaaaacagtatttcagttattcctttctcagaagctcagatgtgtgagatgccagtaaacacaccagaaagtccctggaaggtgagtcctgaagaggaacaaaaacgtaaagacttgaggaaaagccatctcgtattcagcattgaccccaaaggttgtgaagatgtggatgacacactctcagtcagaaccttaaataatggcaacctggaacttggggtccacatcgcagatgtaacacactttgtggcaccaaattcttacattgatattgaagctagaacaaggtatgctgtaagcatcatgtgggaactggataaagcctcttatgaaattaagaaagtgtggtatggcagaaccattattcgatcagcatacaaactgttctatgaagcagcccaagaactactggatggaaacttaagcgttgttgatgatattccagaattcaaagacttggatgagaagagcagacaagccaagctggaggagttggtgtgggcaattggaaagctgaccgacatagctcgccatgtcagagctaaacgagacggatgtggtgccctggaactggaaggggtagaggtttgcgtacagctagatgacaaaaagaacattcacgacctcatccccaagcagccccggaagtccaataaaacactggctgattctctggataatgcgaacgacccccacgatcccattgtgaacaggctactgcgctccatggccacgcaggccatgtcgaatgctctgtacttctccaccggatcctgtgcggaggaggagttccatcattacggtcttgcattagataaatatacccactttacttctccaataagaagatattcagatattgtagtacaccgcttgttaatggcagccatttcaaaagataagaaaatggaaattaagggaaatctgttcagcaacaaagatcttgaggaattatgcagacatatcaacaacagaaaccaagcagcacagcattctcagaagcagtctactgagctcttccagtgcatgtacttcaaagacaaagaccctgccaccgaggagcgttgcatatctgacggagttatttattcaattagaacaaatggtaataaaaggcctgacatatctgagggagaagcacaagatcatgcacagagtatagttgcttttaaagaagatgaagccagaggacaggaaattggtaaacatagtgctgtcggccatgtcccttcagccacagcactgccaacactgactggtgttgagaggagagctgaagcggagatgagtggactagggtgggctgttggaactgactggacagcttacaagccccgtagattaggtgatacatcactgcatataaacagagccaaagacaaaaaccacatgattatctcaatagatgcagaaaaagcctttgacaaaattcaacaacccttcatgctaaaaactctcaataaattaggtattgatgggacgtatttcaaaataataagagctatctatgacatacccacagccaatatcataccgaatgggcaaaaactggaagcattccctttgaaaactggcacaagacagggatgccctctctcaccactcctattcaacatagtgttggaagttctggccagggcaatcaggcaggagaaggaaataaagggtattcaattaggaaaagaggaagtcaaattgtccctgtttgcagacgacatgattgtttatctagaaaaccccatcgtctcagcccaaaatctccttaagctgataagcaacttcagcaaagtctcaggatacaaaatcaatgtacaaaaatcacaagcattcttatacaccaacaacagacaaacagagagccaaatcatgagtgaactcccattcacaattgcttcaaagagaataaaatacctaggaatccaacttacaagggatgtgaaggacctcttcaaggagaactacaaaccactgctcaaggaaataaaagaggacacaaacaaatggaagaacattccatgctcatgggtaggaagaatcaatatcgtgaaaatggccatactgcccaaggtaatttacagattcaatgccatccccatcaagctaccaatgactttcttcacagaattggaaaaaactactttaaagttcatatggaaccaaaaaagagcccgcatcgccaagtcaatcctaagccaaaagaacaaagctggaggcatcacactacctgacttcaaactatactacaaggctacagtaaccaaaacagcatggtactggtaccaaaacagagatatagatcaatggaacagaacagagccctcagaaataatgccacatatctacaactatctgatctttgacaaacctgagaaaaacaagcaatggggaaaggattccctatttaataaatggtgctgggaaaactggctagccatatgtagaaagctgaaactggatcccttccttacaccttatacaaaaatcaattcaagatggattaaagatttaaacgttagacctaaaaccataaaaaccctagaagaaaacctaggcattaccattcaggacataggcgtgggcaaggacttcatgtccaaaacaccaaaagcaatggcaacaaaagccaaaattgacaaatgggatctaattaaactcaagagcttctgcacagcaaaagaaactaccatcagagtgaacaggcaacctacaacatgggagaaaattttcgcaacctactcatctgacaaagggctaatatccagaatctacaatgaactcaaacaaatttacaagaaaaaaacaaacaaccccatcaaaaagtgggcgaaggacatgaacagacacttctcaaaagaagacatttatgcagccaaaaaacacatgaaaaaatgctcaccatcactggccatcagagaaatgcaaatcaaaaccacaatgagataccatctcacaccaacccacttattgtcattggaattgaagaatgtctcagaggaaaagaaaaacttgaaacattatactattggaattcagacacggaccaccaggtctgatggctggggtggccgtaatggaagtcagaccacaaaaaggagcaacccagcttctgagagaacatttcagctaaagcataagttgatagatgtcacaatccaagttcttttagatttccacgcaggaacttcagagttggtgacaagaattg

SEQ ID NO: 129062 - DNA, 2826 bp, Homo sapiens; identical to SEQ ID NO: 127426

SEQ ID NO: 129063 - DNA, 3303 bp, Homo sapiens; identical to SEQ ID NO: 124216

SEQ ID NO: 129064 - DNA, 2854 bp, Homo sapiens
atggaagatgaaatgaatgaaatgaagcgagaagggaagtttagagaaaaaagaataaaaagaaatgagcaaagcctccaagaaatatgggactatgtgaaaagaccaaatctacatctgattggtgtacctgaaagtgatgtggagaatggaaccaagttggaaaacactctgcaggatattatccaggagaacttccccaatctagcaaggcaggccaacgttcagattcaggaaatacagagaacgccacaaagatactcctcgagaagagcaactccaagacacataattgtcagattcaccaaagttgaaatgaaggaaaaaatgttaagggcagccagagagaaagggcactgtaactctggcaaaagtcacagatccctttgggaacaaaacaagggaatatttaccacatgtatttgtgatgatgccgaggacttacagtctccttcaactgctggaccctggtttggggttctttataccaaaggtggaccctaccctcaggaagacatattcagtgaagaagttcatacaggccctaagttgaggaagaaaattcaagagtaccagttaacaagcaaatggtcaaaaagtgatgttcaggtttctgtggagaggagaatggctggaggaaatccaaaccagtgccatattggggaagttctcctggatggattcacagctgaattctaccggaggtacaaggaggaactggtaccattccttctgaaactattccaatcaatagaaaaagagggaatcctccctaactcattttatgaggccagcatcattctgatacaaaagccaggcagagacacaacaaaaaaagagaattttagaccaatatccttgatgaacattgatgcaaaaatcctcaataaaatactggcaaaacgaatccagcagcacatcgaaaagcttatccaccatgatcaagtgggcttcatccctgtgatgcaaggctggttcaatatatgcaaatcaataaatgtaatccagcatataaacagagccaaagacaaaaaccacatgattatctcaatagatgcagaaaaagcctttgataaaattcaacaacccttcatgctaaaaactctcaataaattaggtattgatgggatgtatttcaaaataataagagctatctatgacaaacctacagccaatatcatactgaatgggcaaaaactggcagcattccctttgaaaactggcacaagacagggatgccctctctcaccactcctattcaacatagtgttggaagtcctggccagggcaatcaggcaggagaaggaaataaagggtattcaattaggaaaagaggaagtcaaattgtccctgtttgcagatgacatgatcgtatatctagaaaaccccattgtctcagcccaaaatctccttaagctgataagcaacttcagcaaagtctcaggatacaaaatcaatgtacaaaaatcacaagcattcttatacaccaataacagacaaacagagagccaaatcatgagtgaactcccattcacaagtgcttcaaagagaataaaatacctaggaatccaacttacaagggatgtgaaggacctcttcaaggagaactacaaaccactgctcaaggaaataaaagaggatacaaacaaatggaagaacattccatgctcatgggtaggaagaatcaatatcgtgaaaatggccatactgcccaaggtaatttatagattcaatgccatccccatcaagctaccaatgcctttcttcacagaattggaaaaaactactttaaagttcatatggaaccaaaaaagagccctcatcaccaagttaatcctaagccaaaagaacaaagctggaggcatcacactacctgactttaaactatactacaaggctacagtaaccaaaacagcatggtactggtaccaaaacagagataaagatcaatggaacagaacagagccctcagaaataacgccgcatatctacaattatctgatctttgacaaacctgagaaaaacaagcaatggggaaaggattccctatttaataaatggtactgggaaaactgcctagccatatgtagaaagctgaaactagatcccttccttacaccttatacaaaaattaattcaagatggattaaagacttaaatgttagacttaaaaccataaaagccctagaagaaaacctaggcaataccattcaggacataggcatgggcaaggacttcatgtctaaaacaccaaaagcaatggcaacaaaagacaaaattgacaaatgggatctaattaaaccaaagagcttctgcacagcaaaagaaactaccatcagagtgaacaggcaacctacaaaatgggagaaaattttcgcaacctactcatctgacaaagggctaatatccagaaactacaatgaactcaaacaaatttacaagaaaaaaacaatcggccccatcaaaaagtgggcagaggatatgaacaggcacttctcaaaagaagacacttatgcagccaaaaaacacatgaaaaaatgctcatcatcactggccatcagagaaatgcaaatcaaaaccacaatgagataccatctcacaccagttagaatggtgatcattaaaaagtcaggaaacaacaggtgctggagaggatgtggagaaacaggaacactttcacactgttggtgggactgtaaactaatcaaccattgtggaatttttgagagattaaggaccgaagactggtggggactcataaatgatacaagtaaagtattagccacaacagaagaaaaaggggtgcccaaacgcataatcttgaaatttgatgtctgtgctgtcattaatagca

SEQ ID NO: 129065 - DNA, 3349 bp, Homo sapiens; identical to SEQ ID NO: 127433

SEQ ID NO: 129066 - DNA, 3855 bp, Homo sapiens
atggggaaaaaacagaacagaaaaactggaaactctaaaacgcagagcgcctctcctcctccaaaggaacgcagttcctcaccagcaacagaacaaagctggatggagaatgattttgacgagctgagagaagaaggcttcagacgatcaaattactctgagctatgggaggacattcaaaccaaaggcaaagaagttgaaaactttgaaaaaaatttagaagaatgtataactagaataaccaatacagagaagtgcttaaaggagctgatggagctgaaaaccaaggctcgagaactacatgaagaatgcagaagcctcaggagccgatgcgatcaactggaagaaagggtatcagcaatggaagatgaaatgaatgaaatgaagcgagaagggaagtttagagaaaaaagaataaaaagaaatgagcaaagcctccaagaaatatgggactatgtgaaaagaccaaatctacgtctgattggtgtacctgaaagtgatgtggagaatggaaccaagttggaaaacactctgcaggatattatccaggagaacttccccaatctagcaaggcaggccaacgttcagattcaggaaatacagagaatgccacaaagatactcctcgagaagagcaactccaagacacataattgtcagattcaccaaagttgaaatgaaggaaaaaatgttaagggcagccagacagaaagcaccacaccacacctattccaaaattgaccacatagttggaagtaaagctctcctcagcaaatgtaaaagaacagaaattataacaaactatctctcagaccacagtgcaatcaaactagaactcaggattaagaatctcactcaaagccgctcaactacatggaaactgaacaacctgctcctgaatgactactgggtacataacgaaatgaaggcagaaataaagatgttctttgaaaccaacgagaacaaagacaccacataccagaatctctgggacacattcaaagcagtgtgtagagggaaatttatagcactaaatgcctacaagagaaagcaggaaacatccaaaattgacaccataacatcacaattaaaagaactagaaaagcaagagcaaacacattcaaaagctagcagaaggcaagaaataactaaaatcagagcagaactgaaggaaatagagacacaaaaaacccttcaaaaaatcaatgaatccaggagctggttttttgaaaggatcaacaaaattgatagaccgctagcaagactaataaagaaaaaaagagagaagaatcaaatagacacaataaaaaatgataaaggggatatcaccaccgatcccacagaaatacaaactaccatcagagaatactacaaacacctctacgcaaataaactagaaaatctagaagaaatggatacattcctcgacacatacactctcccaagactaaaccaggaagaagttgaatctctgaatagaccaataacaggctctgaaattgtggcaataatcaatagtttaccaaccaaaaagagtccaggaccagatggattcacagccgaattctaccagaggtacaaggaggaactggtaccattccttctgcaactattccaatcaatagaaaaagagggaatcctccctaactcattttatgaggccagcatcattctgataccaaagccgggcagagacacaaccaaaaaagagaattttagaccaatatccttgatgaacattgatgcaaaaatcctcaataaaatactggcaaaccgaatccagcagcacatcaaaaagcttatccaccatgatcaagtgggcttcatccctgggacgcaaggctggttcaatatacgcaaatcaataaatgtaatccagcatataaacagagccaaagacaaaaaccacatgattatctcaatagatgcagaaaaagcctttgacaaaattcaacaacccttcatgctaaaaactctcaataaattaggtattgatgggacatatttcaaaataataagagctatctatgacaaacccacagccaatatcatactgaatgggcaaaaactggaagcattccctttgaaaactggcacaagacagggatgccctctctcaccgctcctattcaacatagtgttggaagttctggccagggcaatcaggcaggagaaggaaataaagggtattcaattaggaaaagaggaagtcaaattgtccctgtttgcagacgacatgattgtttatctagaaaaccccatcgtctcagcccaaaatctccttaagctgataagcaacttcagcaaagtctcaggatacaaaatcaatgtacaaaaatcacaagcattcttatacaccaataacagacaaacagagagccaaatcatgagtgaactcccattcacaattgcttcaaagagaataaaatacctaggaatccaacttacaagggatgtgaaggacctcttcaaggagaactacaaaccactgctcaaggaaataaaagaggacacaaacaaatggaagaacattccatgctcatgggtaggaagaatcaatatcgtgaaaatggccatactgcccaaggtaatttacagattcaatgccatccccatcaagctaccaatgactttcttcacagaattggaaaaaactactttaaagttcatatggaaccaaaaaagagcctgcatctccaagtcaatcctaagccaaaagaacaaagctggaggcatcacactacctgacttcaaactatactacaaggctacagtaaccaaaacagcatggtactggtaccaaaacagagatatagatcaatggaacagaacagagccctcagaaataatgccacatatctacaactatctgatctttgacaaacctgagaaaaacaagcaatggggaaaggattccctatttaataaatggtgctgggaaaactggctagccatatgtagaaagctgaaactggatcccttccttacaccttatacaaaaatcaattcaagatggattaaagatttaaacgttagacctaaaaccataaaaaccctagaagaaaacctaggcattaccattcaggacataggcgtgggcaaggacttcatgtccaaaacaccaaaagcaatggcaacaaaagccaaaattgacaaatgggatctaattaaactaaagagcttctgcacagcaaaagaaactaccatcagagtgaacaggcaacctacaacatgggagaaaattttcacaacctactcatctgacaaagggctaatatccagaatctacaatgaactcaaacaaatttacaagaaaaaaacaaacaaccccatcaaaaagtgggcgaaggacatgaacagacacttctcaaaagaagacatttatgcagccaaaaaacacatgaagaaatgctcatcatcactggccatcagagaaatgcaaatcaaaaccactatgagatatcatctcgcaccagttagaatggcaatcattaaaaagtcaggaaacaacagcactattcacagtagcaaagacatggattcaacccaaatgtgcatcaatgatacactgtatgaagaaagtgtagaacatatacaccatgaaatacaatccagccataaaaaaggagttcacatcctttgcagcaatatggatggagctgaaagccactttcctaagcaaactaatgcaagaacagaaagccaaatactgcatgttctcacttggctttcttttaacccaccagttacaattactaaagttcatgaaaatgtctaccagccaagtaccactcgtaacactgaaacaacgcagggagtcccaagaaccagggaagaccaagaagcatatttataa

SEQ ID NO: 129067 - DNA, 2562 bp, Homo sapiens; identical to SEQ ID NO: 116377

SEQ ID NO: 129068 - DNA, 2956 bp, Homo sapiens; identical to SEQ ID NO: 124191

SEQ ID NO: 129069 - DNA, 2049 bp, Homo sapiens; identical to SEQ ID NO: 124224

SEQ ID NO: 129070 - DNA, 3276 bp, Homo sapiens
atggtaaagggatcaattcaacaagaggagctaactatcctaaatatttatgcacccaatacaggagcacccagattcataaagcaagtcctcagtgacctacaaagagtcttagactcccacacattaataatgggagactttaacaccccactgtcaacattagacagatcaacgagacagaaagtcaacaaggatacccaggaattgaactcagctctgcaccaagcagacctaatagacatctacagaactctccaccccaaatcaacagaatatacatttttttcagcaccacaccacacctgttccaaaattgaccacatagttggaagtaaagctctcctcagcaaatgtaaaagaacagaaattataacaaactatctctcagaccacagtgcaatcaaactagaactcaggattaagaatctcactcaaagccgctcaactacatggaaactgaacaacctgctcctgaatgactactgggtacataacgaaatgaaggcagaaataaagatgttctttgaaaccaacgagaacaaagacaccacataccagaatctctgggacgcattcaaagcaaccgctagcaagactaataaagaaagaagagagaagaatcaaatagacacaataaaaaatgataaaggggatatcaccaccgatcccacagaaatacaaactaccatcagagaatactacaaacacctcttcgcaaataaactagaaaatctagaagaaatggatacattcctcgacacatacactctcccaagactaaaccaggaagaagttgaatctctgaatagaccaataacaggctctgaaattgtggcaataatcaatagtttaccaaccaaaaagagtccaggaccagatggattcacagccgaattctaccagaggtacatggaggaactggtaccattccttctgaaactattccaatcaatagaaaaagagggaatcctccctaactcattttatgaggccagcatcattctgataccaaagccgggcagagacacaaccaaaaaagagaattttagaccaatatccttgatgaacattgatgcaaaaatcctcaataaaatactggcaaaccgaatccagcagcaaatcaaaaagcttatccaccatgatcaagtgggcttcatccctgggatgcaaggctggttcaatatacgcaaatcaataaatgtaatccagcatataaacagagccaaagacaaaaaccacatgattatctcaatagatgcagaaaaagcctttgacaaaattcaacaacccttcatgctaaaaactctcaataaattaggtattgatgggacgtatttcaaaataataagagctatctatgacaaacccacagccaatatcatactgaatgggcaaaaactggaagcattccctttgaaaaccggcacaagacagggatgccctctctcaccgctcctattcaacatagtgttggaagttctggccagggcaatcaggcaggagaaggaaataaagggtattcaattaggaaaagaggaagtcaaattgtccctgtttgcagacgacatgattgtttatctagaaaaccccatcgtctcagcccaaaatctccttaagctgataagcaacttcagcaaagtctcaggatacaaaatcaatgtacaaaaatcacaagcattcttatacaccaacaacagacaaacagagagccaaatcatgggtgaactcccattcacaattgcttcaaagagaataaaatacctaggaatccaacttacaagggatgtgaaggacctcttcaaggagaactacaaaccactgctcaaggaaataaaagaggagacaaacaaatggaagaacattccatgctcatgggtaggaagaatcaatatcgtgaaaatggccatactgcccaaggtaatttacagattcaatgccatccccatcaagctaccaatgactttcttcacagaattggaaaaaactactttaaagttcatatggaaccaaaaaagagcccgcattgccaagtcaatcctaagccaaaagaacaaagctggaggcatcacactacctgacttcaaactatactacaaggctacagtaaccaaaacagcatggtactggtaccaaaacagagatatagatcaatggaacagaacagagccctcagaaataatgccgcatatctacaactatctgatctttgacaaacctgagaaaaacaagcaatggggaaaggattccctatttaataaatggtgctgggaaaactggctagccatatgtagaaagctgaaactggatcccttccttacaccttatacaaaaatcaattcaagatggattaaagatttaaacgttaaacctaaaaccataaaaaccctagaagaaaacctaggcattaccattcaggacataggcgtgggcaaggacttcatgtccaaaacaccaaaagcaatggcaacaaaagacaaaattgacaaatgggatctaattaaactaaagagcttctgcacagcaaaagaaactaccatcagagtgaacaggcaacctacaacatgggagaaaattttcgcaacctactcatctgacaaagggctaatatccagaatctacaatgaactcaaacaaatttacaagaaaaaaacaaacaaccccatcaaaaagtgggtgaaggacatgaacagacacttctcaaaagaagacatttatgcagccaaaaaacacatgaagaaatgctcatcatcactggccatcagagaaatgcaaatcaaaaccactatgagatatcatctcacaccagttagaatggcaatcattaaaaagtcaggaaacaacagtgaaggttatccggacttgctgaatactgagtatgagcagatttcttttggaaatcaaagaggaactaaggttgtgcctggtgacccaagggaaacaaaaacacatgcagatgcagaagccagaagcagaatttggctagtgctggcgtcagtggtgcaggatagatggaccaatatttatgaggaaatctcccaccttgctccatggaacaaacaggtcactgagcagcagccaaaatctgctgctgcacagagcttaaggcctgggcccagtgatcctgttggcctctcctttcctgggtactgtgaatcaggtgcaccagcagcatttcttcatgccagggctgagacattaaaattaagtagtgcaactatgtctgctacagaaatcaaaggggaagggcagtctcagacaggaaggactcagtaa

SEQ ID NO: 129071 - DNA, 2277 bp, Homo sapiens; identical to SEQ ID NO: 119544

SEQ ID NO: 129072 - DNA, 3562 bp, Homo sapiens
atgggagactttaacaccccactgtcaacattagacagatcaacgagacagaaagtcaacaaggatacccaggaattgaactcagctctgcaccaagcggacctaatagacatctacagaagtctccacgccaaatcaacagaatatacatttttttcagcaccacaccacacctattccaaaattgaccacatacttggaagtaaagctctcctcagcaaatgtaaaagaacagagattataacaaactatctctcagaccacagtgcaatcaaactagaactcagaattaagaatctcactcaaaaccgctcaactacatggaaactgaacaacctgctcctgaatgactactggatacatgacgaaatgaaggcagaaataaagatgttctttgaaaccaacgagaacaaagacacaacataccagaatctctgggatgcattcaaagcaaccgctagcaagactaataaagaagaaaagagagaagaatcaaatagacacaataaaaaatgataaaggggatatcaccaccgatcccacagaaatacaaactaccatcagagaatactacaaacacctctatgcaaataaactagaaaatctagaagaaatggataaattcctcgacacatacactctcccaagactaaaccaggaagaagttgaatctctgaatagaccaataacaggagctgaaattgtggcaataatcaatagtttaccaaccaaaaagagtccaggaccagatggattcacagccgaattctaccagaggtacaaggaggaactgcatataaacagagccaaagacaaaaaccacatgattatctcaatagatgcagaaaaggcctttgacaaaattcaacaacccttcatgctaaaaactctcaataaattaggtattgatgggacgtatttcaaaataataagagctatctatgacaaacccacagccaatatcatactaaatgggcaaaaactggaagcattccctttgaaaactggcacaagacagggatgccctctctcaccactcctattcaacatagtgttggaagttctggccagggcaattaggcaggagaaggaaataaagggtattcaattaggaaaagaggaagtcaaattgtccctgttcgcagacgacatgactgtatatctagaaaaccccattgtctcagcccaaaatctccttaagctgataagcaacttcagcaaagtctcaggatacaaaatcaacgtgcaaaaatcacaagcattcttatacaccaacaacagacaaacagagagccaaatcatgagtgaactcccattcacaattgcttcaaagagaataaaatacctaggaatccaacttacaagggatgtgaaggacctcttcaaggagaactacaaaccactgctcaaggaaataaaagaggatacaaacaaatggaagaacattccatgctcatgggtaggaagaatcaatatcatgaaaatggccatactgcccaaggtaatttacagattcaatgccatccccataaagctaccaatgactttcttcacagaattggaaaaaactactttaaagttcatatggaaccaaaaaaagagcccgcatcgccaaggcaatcctaagccaaaagaacgaagctggaggcatcacgatacctgacttcaaactatactacaaggatacagtaaccaaaacagcatggtactggtaccaaaacagagatctagaccaatggaacagaacagagccctcggaaataatgccgcatatctacaaccatctgatctttgacaaacctgacaaaagcaaggaatggggatatgattccctatttaataaatggtgctgggaaaactggctagccatatgtagaaagctgaaactggatcccttccttacactttatacaaaaattaattcaagatggattaaagacttaaatgttagacataaaaccataaaagccctagaagaaaacctaggcaataccattcaggacatagacatgggcaaggacttcatgtctaaaacaccaaaagcaatggcagcaaaagccaaaattgacaaatgggatctaattaaactaaacagcttctgcacagcaaaagaaactaccatcagagtgaataggcaacctacagaatgggagaaaatttttgcaatctactcatctgacaaagggctaatatccagaatctacaatgaactcaaacaaatttacaagaaaaaaacaaacaaccccatcaaaaagtggacgaaggatatgaacagacacttctcaaaagaagacttttacgcagcccaaagacacatgaaaaaatgttcatcatcactggccatcagagaaatgcaaatcaaaaccacataccatgctggaccagatggatttacagccgaattctaccagaggtacaaggaggaactggtaccattccttctgaaactattccaatcaatagaaaaagagggaatcctccctaactcattttatgaggccagcatcatcctgataccaaagcctggtagagacacaaccaaaaaagagaattttagaccaatatccttgatgaacattgatgcaaaaatcctcaataaaatactggcaaaacgaatccagcagcacatcaaaaagcttatccaccatgatcaagtgggtttcatccctgggatgcaaggctggttcaatatatgcaaatcaataaacgtaatccagcatataaacagaaccaaagacaaaaaccacatgattatctcaatagatgcagaaaaggcctttgacaaaattcaacaactcttcatgctaaaaactctcaataaattaggtattgatgggacgtatctcaaaataataagagctatctatgacaaacccacagccaatatcatactgaatgggcaaaaactggaagcattccctttgaaaactggcacaagacagggatgccctctctcaccactcctattcaacatagtgtgggaagttctggccagggcaatgaggcaggagaaggaaataaagggtattcaattaggaaaagaggaagtcaaattgtccctgtttgcagacgacatgattgtgtatctagaaaaccccattgtctcagcccaaaatctccttaagctgataagcaacttcagcaaagtctcaggatacaaaatcaatgtacaaaaatcacaagcattcttatacaccaataacagacaaacagagagccaaatcatgagtgaactcccattcacaactgcttcaaagagaataaaatacctaggaatccaacttacaagggatgagaaggacctcttcaaggagaactacaaaccactgctcaaggaaataaaagaggatacaaacaaatggaagaacattccatgctcatgggtaggaagaatcaatattgtgaaaatggccatactgcccaaggtccttctatatgatccactctttgactggaccatgaatcctttgaaagctttgtatttacagcagaggccggaagatgaaactgagcttcaccctactctgaatgcagatgaccaagaatgcaaacgaaatctcag

SEQ ID NO: 129073 - DNA, 2649 bp, Homo sapiens; identical to SEQ ID NO: 121977

SEQ ID NO: 129074 - DNA, 2232 bp, Homo sapiens; identical to SEQ ID NO: 116248

SEQ ID NO: 129075 - DNA, 963 bp, Homo sapiens; identical to SEQ ID NO: 124228

SEQ ID NO: 129076 - DNA, 2931 bp, Homo sapiens
atggaagatgaaatgaatgaaatgaagcaagaagagaagtttagagaaaaaagaataaaaagaaatgagcaaaccctccaagaaatatgggactatgtgaaaagaccaaatctacatctgattggtgtacctgaaagtgatggggagaatggaaccaagttggaaaacactctgcaggatattatccaggagaacttccccaatctagcaaggcaggccaacgttcagattcaggaaatacagagaatgccacaaagatactcctcgagaagagcaactccaagacacataattgtcagattcaccaaagttgaaatgaaggaaaaaatgttaagggcagccagagagaaagacagatcaatgagacaaaaagtcaacaaggatacccaggaattgaactcagctctgcaccaagcggacctaatagacatctacagaactctccaccccaaatcaacagaatatacatttttttcagcaccacaccacacctataccaaaattgaccacatacttggaagtaaagctctcctccgcaaatgtaaaagaacagagattataacaaactatctctcagaccacagtgcaatcaaactagaactcaggattaagaatctcactcaaaaccgctcaactacatggaaactgaacaacctgcttctgaatgactactgggtacataacaaaatgaaggcagaaataaagatgttctttgaaaccaacgagaacaaagacacaacataccagaatctctgggacgcattcaaagcaaaatacaaactaccatcaaggaatactacaaacacctctatgcaaataaactcgaaaatctggaagaaatggataaattcctggacacataacactctcccaagactaaaccaggaagaagttgaatctctgaatagaccaataacaggagctgaaattgtggcaataatcaatagtttaccaaccaaaaagagtccaggaccagatggattcacagccgaattctaccagaggtacaaggaggaactggtaccattccttctgaaactattccaatcaatagaaaaacagggaatcctccctaactcattttatgaggccagcaccattctgataccaaagccgggcagagacacaaccgaaaaagagaattttagaccaatatccttgatgaacattgatgcaaaaatcctcaataaaatactggcaaaacgaatccagcagcacatcaaaaagcttatccaccatgatcaagtgggcttcatccctgggatgcaaggctggttcaatatacacaaatcaataaatgtaatccagcatataaacagagccaaagacaaaaaccacatgattatctcaatagatgcagaaaaagcctttgacaaaattcaacaacgcttcatgctaaaaactctcaataaattaggtattgatgggacgtatttcaaaataataagagctatctatgacaaacccacagccaatatcatactgaatgggcaaaaactggaagcaatccctttgaaagctggcacaagacagggatgtcctctctcaccactcctattcaacatagtgttggaagttctggccagggtaattaggcaggagaaggaaataaagggtattcaattaggaaaagaggaagtcaaattgtccctgtttgcagatgacatgattgtatatctagaaaaccccattgtcacagcccaaaatctccttaagctgataagcaacttcagcaaagtctcaggatacaaaatcaatgtacaaaaatcacaagcattcttatacaccaacaacagacaaacagagagccaaatcatgagtgaactcccattcacaattgcttcaaagagaataaaatacctaggaatccaacttacaagggatgtgaaggacctcttcaaggagaactacaaaccactgctcaaggaaataaaagaggatacaaacaaatggaagaacattccatgctcatgggtaggaagaatcaatatcatgaaaatggccatactgcccaagccatatgtggatggcaaagctgaaagagcactgattgtaacactctttctggggcttcaggggtcatggccccacccccgccagatgctgctgcagatccacatgaagttttgctcctgccagcacccaaaagcactcgccctggttcctgcacctgctcacctgcactccccgtcctgtgatgggtggaaggcagtgggaccaagcaagtggagtccatccctgccagcactgaagcagccagctagttctagcacccctgcactcgagttcctgcctgcaaagggaaatcttcaccctggacaagccccagtctcactcctgcctctccaacagatgcctggtgaatttgaccccactccagtggtccagaccaccattaccatccaggagccccaggtagttctgaaaatcaaagggaggaaagtggacctccttttggacactggggttggtctctcagctctcctctccaatccgggccccttctcttctcttagcacaaatgagaggggtatctcagaaaggctcttaatccggtattttttccaactctttagttgtagctggggagacttgttgttcacccatgcctttctaattatacctgagagcccaactcctctgctgaaccggtatattctggccagtatggggaccaccattctggtggcctctgaacaaactatttgtctccccctagtgaagactgatattaacacagaagtttgggcaattcaagggaaaattggccaatccacaaatgccataccagtccaggttcaccttaaggatcccacctcatttcctaatcagaaacaatatcccctgaaaccagaagttaggaaaggactagaagccatcattgataacaaggttgcagggcctcctcaaaccctgcaacagcccttgtaa

SEQ ID NO: 129077 - DNA, 1785 bp, Homo sapiens; identical to SEQ ID NO: 118555

SEQ ID NO: 129078 - DNA, 4884 bp, Homo sapiens
atggggaaaaaacagaacagaaaaactggaaactctaaaaagcagagtgcctctcttcctccaaaggaacgcagcttctcaccagcaactgaacaaagctggacggagaatgactttgatgagctgagagaagaaggcttcagacgatcaaattactatgagctacgggaggacattcaaaccaaaggcaaagaagttgaaaactttgaaaaaaatttagaagaatcaccacaccacacctattccaaaattgaccacatacttggaagtaaagctctcctcagcaaatgtaaaagaacagaaattataacaaactatctctcagaccacagtgcaatcaaactagaactcaggattaagaatctcactcaaaaccgctcaactacatggaaactgaacaacctgctcctgaatgactactgggtacctaacgaaatgaaggcagaaataaagatgttctttgaaaccaacgagaacaaagacacaacataccagaatctctgggaggcattcaaagcagtgtgtagagggaaatttatagcactaaatgcccacaagagaaagcaggaaagagctaaaattgacaccctaacatcacaattaaaagaactagaaaagcaagagcaaacacattcaaaagctagcagaaggcaagaaataactaaaatcagagcagaactgaaggaaagagagacacaaaaaacccttcaaaaaattaatgaatccaggagctggttttttgaaaggatcaacaaaattgatagaccactcgcaagactaataaagaaaaaaagagagaagaatcaaatagaggcaataaaaaatgataaaggggttatcaccaccgatcccacagaaatacaaactaccatcagagaatactacaaacacctctacacaaataaactagaaaatctagaagaaatggataaattccttgacacatacactctcccaagaccaaaccaggaagaagttgaatctctgaatagaccaataacaggatctgaaattgtggcaataatcaatagcttaccaaccaaaaagagtccaggaccagatggattcacagccaaattctaccagaggtacaaggaggaactggtatcattccttctgaaactattccaatcaatagaaaaagagggaatcctccctaactcattttatgaggccagcatcattctgaaaccaaagccgggcagagacataaccaagaaagagaattttagaccaatatccttgatgaacattgatgcaaaaatcctcaataaaatactggcaaaacgaatccagcagcacatcaaaaagcttatccaccatgatcaagtgggcttcatccctgggatgcaaggctggttccatataagcaaatcaataaatgtaatccagcatataaacggagccaaagacaaaaaccacatgattatctcaatagatgcagaaaaggcctttgacaaaattaaacaacacttcatgctaaaaactctcaataaattaggtattgatgggaggtatttcaaaataataagagctatctatgacaaacccacagccaatatcatactgaatgggcacaaactggaagcattccctttgaaaactggcacaagacagggatgccctctctcaccactcccattcaacatagtgttggaagttctggccagggcaattaggcaggagaaggaaataaagggtattcaattaggaaaagaggaagtcaaattgtctctgtttgcagacgacatgattgtatatctagaaaaccccatcgtctcagcccaaaatctccttaagctgataagcaacttcagcaaagtctcaggatacaatatcaatgtgcaaaaatcacaagcattcctgtacaccaacaacagacaaacagagagccaaatcatgagtgaactcccattcacaatggcttcaaagagaataaaatacctaggaatccaacttacaagggatgtgaaggacctcttcaaggagaactacaaaccactgctgaaggaaataaaagaggatacaaacaaatggaagaacattccatgctcatgggtaggaagaatcaatatcgtgaaaatggccatactgcccaaggtaatttacaggttcagtgccatccccatcaagctaccaatgactttcttcacagaattggaaaaaactactttaaagttcatatggaaccaaaaaagagcccgcatcgtcaagtcaatcctaagccaaaagaacaaagctggaggcaccacactacctgacttcaaactatactacaaggctacagtaaccaaaatagcatggtactggtaccaaaacagagatatagatcaatggaacagaacagagccctcagaaataatgccgcatatctacaactatctgatctttgacaaacctgagaaaaacaagcaatggggaaaggattccttatttaataaatggtgctgggaaaactggctagccatatgtagaaagctgaaactggatcccttccttacaccttatacaaaaatcaattcaagatggattaaagacttaaacgttagacctaaaaccataaaaaccctagaagaaaacctaggcattaccattcaggacataggcatgggcaaggacttcatgtctaaaacaccaaaagcaatggcaacaaaacccaaaattgacaaatgggatctaatgaaactaaagagcttctgcacagcaaaagaaactaccatcagagtgaacaggcaacctacaaaatgggagaaaatttttgcaacctactcatctgacaaagggctaatatccagaatctacaatgaactcaaacaaatttacaagaaaaaaacaaacaaccccatcaaaaagtgggcaaaggacatgaacagacacttctcaaaagaagacatttatgcagccaaaaaacacatgaaaaaatgctcaccatcactggccatcagagaaatgcaaatcaaaaccacaatgagataccatctcccaccagttagaatggcaatcattaaaaagtcaggaaacaacagtcttgctagtggtctatcaattgacaaaattcaacaacccttcatgctaaaaactctcaataaattaggtattgatgggacgtatttcaaaataataagagctatctatgacaaacccacagccaatatcatactgaatgggcaaaaactggaagcattccctttgaaaactggcacaagacagggatgccctctctcaccgctcctattcaacatagtgttggaagttctggccagggcaatcaggcaggagaaggaaataaagggtattcaattaggaaaagaggaagtcaaattgtccctctttgcagacgacatgattgtttatctagaaaaccccatcgtctcagcccaaaatctccttaagctgataagcaacttcagcaaagtctcaggatacaaaatcaatgtacaaaaatcacaagcattcttatacaccaacaacagacaaacagagagccaaatcatgagtgaactcccattcacaattgcttcaaagagaataaaatacctaggaatccaacttacaagggatgtgaaggacctcttcaaggagaactacaaaccactgctcaaggaaataaaagaggatacaaacaaatggaagaacattccatgctcatgggtaggaagaatcaatatcgtgaaaatggccatactgcccaaggtaatttatagattcaatgccatccccatcaagctaccaatgactttcttcacagaattggaaaaaactactttaaagttcatatggaaccaaaaaagagcccgcattgccaagtcaatcctaagccaaaagaacaaagccggaggcatcacactacctgacttcaaactatactacaaggctacagtaaccaaaacagcatggtactggtaccaaaacagagatatagatcaatggaacagaacagagccctcagaaataacgccgcttacctacaactatctgatctttgacaaacctgagaaaaacaagcaatggggaaaggattccctatttaataaatggtgctgggaaaactggctagccatatgtagaaagctgaaactggatcccttccttacaccttatacaaaaatcaattcaagatggattaaagatttaaacgttagacctaaaaccataaaaaccctagaagaaaacctacgcattaccattcaggacatagggatgggcgaggacttcatgtccaaaacaccaaaagcaatggcaacaaaagccaaaattgacaaatgggatctaattaaactaaagagcttctgcacagcaaaagaaactaccatcagagtgaacaggcaacctacaaaatgggagaaaattttcgcaacctactcatctgacaaagggctaatatccagaatctacaatgaactcaaaccaatttacaagaaaaaaacaaacaaccccatcaaaaagtgggcgaaggacatgaacagacacttctcaaaagaagacatttatgcagccaaaaaacacatgaaaaaatgctcatcatcactggccatcagagaaatgcaaatcaaaaccacaatgagatatcatctcacaccagttagaatggcaatcattaaaaagtcaggaaacaacagaagtaaagacataaaagatagagaagatcctttggcttatggagtttttgctccagtcgtaagggtggaatcaagtttacaggaaggaagctggtgggtttcattttggacagaacgaggacgagctatgtgggagaacattcaaatagagctaggattcaggaagaagcaggacccaggatgccaccttacgtggaaatgtggatactacttctatgatggacgaagaggaggaagttgtttgcagatgcaactgactctgtag

SEQ ID NO: 129079 - DNA, 5962 bp, Homo sapiens
atgtcaagtgaatgggagtggttgaggtgctcagaagttaaaggtcagagagacgtgaggccagggtgtttggggtgggactttcgtgtgtatattgttgaggacacccaggatgaggacagaacttggagtgtcaaggaagcctgtgagctggtccttagagttcaggaaatgatcatcacaagggtggtagatgctgcaccacaccacacctattccaaaattgaccacatagttggaagtaaagctctcctcagcaaatgtaaaagaacagaaattataacaaactgtctctcagaccacagtgcaatcaaactagaactcaggattaagaatctcactcaaagccgctcaactacatggaaactgaacaacctgctcctgaatgactactgggtacataacgaaatgaaggcagaaataaagatgttctttgaaaccaacgagaacaaagacaccacataccagaatctctgggacgcattcaaagcagtgtgtagagggaaatttatagcactaaatgcctacaagagaaagcaggaaagatccaaaattgacaccctaacatcacaattaaaagaactagaaaagcaagagcaaacacattcaaaagctagcagaaggcaagaaataactaaaatcagagcagaactgaaggaaatagagacacaaaaaacccttcaaaaaatcaatgaatccaggagctggttttttgaaaggatcaacaaaattgatagaccgctagcaagactaataaagaaaaaaagagagaagaatcaaatagacgcaataaaaaatgataaaggggatatcaccaccgatcccacagaaatacaaactaccatcagagaatactacaaacaactctacgcaaataaactagaaaatctagaagaaatggatacattcctcgacacatacactctcccaagactaaaccaggaagaagttgaatctctgaatagaccaataacaggctctgaaattgtggcaataatcaatagtttaccaaccaaaaagagtccaggaccagatggattcacagccgaattctaccagaggtacaaggaggaactggtaccattccttctgaaactattccaatcaatagaaaaagagggaatcctccctaactcattttatgaggccagcatcattctgataccaaagccaggcagagacacaaccaaaaaagagaattttagaccaatatccttgatgaacattgatgcaaaaatcctcaataaaatactggcaaaccgaatccaacagcacatcaaaaagcttatccaccatgatcaagtgggcttcatccctgggatgcaaggctggttcaatatacgcaaatcaataaatgtaatccagcatataaacagagccaaagacaaaaaccacatgattatctcaatagatgcagaaaaggcctttgacaaaattcaacaacccttcatgctaaaaactctcaataaattaggtattgatgggacgtatgtcaaaataataagagctatctatgacaaacccacagccaatatcatactgaatgggcaaaaactggaagcattccctttgaaaactggcacaagacagggatgccctctctcaccgctcctattcaacatagtgttggaagttctggccagggcaatcaggcaggagaaggaaataaagggtattcaattaggaaaagaggaagtcaaattgtccctgtttgcagacgacatgattgtttatctagaaaaccccatcgtctcagcccaaaatctccttaagctgataagcaacttcagcaaagtctcaggatacaaaatcaatgtacaaaaatcacaagcattcttatacaccaacaacagacaaacagagagccaaatcatgggtgaactcccattcacaattgcttcaaagagaataaaatacctaggaatccaacttacaagggatgtgaaggacctcttcaaggagaactacaaaccactgctcaaggaaataaaagaggatacaaacaaatggaagaacattccatgctcatgggtaggaagaatcaatatcgtgaaaatggccatactgcccaaggtaatttatagattcaatgccatccccatcaagctaccaatgactttcttcacagaattggaaaaaactactttaaagttcatatggaaccaaaaaagagcccgcattgccaagtcaatcctaagccaaaagaacaaagctggaggcatcacactacctgacttcaaactatactacaaggctacagtaaccaaaacagcatggtactggtatcaaaacagagatatagaccaatggaacagaacagagccctcagaaataatgccacacatctacaactatctgatatttgacaaacctgacaaaaacaagcaatggggaaaggattccctatttaataaatggtgctgggaaaactggctagacatatggagaaagctgaaactggatcccttccttacaccttatacaaaaattaattcaagatcgattaaagacttacatgttagacctaaaaccataaaaaccctagaagaaaacctaggcgataccattcaggacataggcatgggcaaggacttcatgtctaaaacatcaaaagcaatggcaacaaaagccaaaattgacaaatgggatctaattcaactcaagagcttctgcacagcaaaagaaactaccatcagagtgaacaggcaacctacagaatgggagaaaatttttgcaatctactcatctgataaaggactaatattcagaatctacaaagaactcaaacaaatttacaagaaaaaaacaaacagccccatcaaaaagtgggtgaaggatatgaacagacacttctcaaaagaagccatttatgcagccaaaagacacatgaaaaaatgctcatcatcactggccatcagagaaatgcaaatcaaaaccacactctcgttgccagctcaagtgtctgtggtggtcatgggctttccttctgctgggattccagaggcctgtggcaagagcgggctgttccttgcctattcaattaacccattccctcagagtcactgggaccaggaacaagtcatgcattggttgtgtgatgtgccgtcaagcattgtcgtggtgaattgggccctttctgttgaccaatgccggctgcaggcattgcggttttcagtgcatctcatcgatttgctgagcatgcttctcagatgtaatggtttcactgggattcagaaagctgtagaggatcataaccggcagcagatcccagtgaccatgaccttttttggtacaagtttggctttgggactttggagcttctttcttgatccaatcactgagctgttcgtgaccagcgtcctggaggaaagaggtcacacgaacaaattggagatggtaaatgcaggggattttattgccaatgaaagtggctctcagagggaagcctctcattccatgctttcccttctcatggcataatgtaccccatacccttccctacccctccatttccccacaagagccagggttctccctcttctcaggacttgctggtgcagggctgctgaggtttgctgggcatctgctccagtccctagttgcctcagattttctggtacctgaagatatcaccagtgaagcctgcaaaacagcaaagtggcagcctgcccctttctctgggagctccattccagtggggtacagacatgttgccagcccaaatgcacctgcaggaggtcgctggagaccctggtacttcatcccaaagagaaatcgaaactctgtctacaggagaacacaggcagaggtggctgtaggccccagtttggaggtcctgcccagagatgatgaatggattgggatcctgtttaaagaaatggtctggccaaatttttgtggagcagctgtgctgtgctgggggatcccttctctccccagtcagtctggactctctgaagcctgcaggctggaaaagctgggtcattcaaacagcaaagatagtggcccacccctcccgtcaggaacaccaacctgtcctgggaaggcacaacactattgccagggactggctggaattccaagccaggcaatcaggcaggagaaggaaataaagggtattcaattaggaaaagaggaagtcaaattgtccctgtttgcagacgacatgattgtttatctagaaaaccccatcgtctcagcccaaaatctccttaagctgataagcaacttcagcaaagtctcaggatacaaaatcaatgtacaaaaatcacaagcattcttatacaccaacaacagacaaacagagagacaaatcatgagtgaactcccattcacaattgcttcaaagagaataaaatacctaggaatccaacttacaagggatgtgaaggacctcttcaaggagaactacaaaccactgctcaaggaaataaaagaggacacaaacaaatggaagaacattccatgctcatgggtaggaagaatcaatatcgtgaaaatggtcatactgcccaaggtaatttacaggttcaatgccatccccatcaagctaccaatgactttcttcacagaattggaaaaaactactttaaagttcatatggaaccaaaaaagagcccgcatcgccaagtcaatcctaagccaaaagaacaaagctggaggcatcacactacctgacttcaaactatactacaaggctacagtaaccaaaacagcatggtactggtaccaaaacagagatatagatcaatggaacagaacagagccctcagaaataacgccgcatatctacaactatctgatctttgacaaacctgagaaaaacaagcaatggggaaaggattccctatttaataaatggtgctgggaaaactggctagccatatgtagaaagctgaaactggatcccttccttaccccttatacaaaaatcaattcaagatggattaaagacttaaacgttagacctaaaaccataaaaaccctagaagaaaacctaggcattaccattcaggacataggcgtgggcaaggacttcatgtccaaaacaccaaaagcaatggcaacaaaagccaaaattgacaaatgggatctaattaaactaaagagcttctgcatagcaaaagaaactaccatcagagtgaacaggcaacctacaacatgggagaaaattttcacaacctactcatctgacaaagggctaatatccagaatctacaatgaactcaaacaaatttacaagaaaaaaacaagcaaccccatcaaaaagtgggcaaaggacatgaacagacacttctcaaaagaagacatttatgcagccaaaaaacacatgaaaaaatgctcatcatcactggccatcagagaaatgcaaatcaaaaccactatgagatatcatctcacaccagttagaatggcaatcattaaaaagtcaggaaacaacaggaattccactcctggcatttttgctcaaagaaataatcctaaggacaacagacgccttagacatgacagtgttcattatttcatgattcataaaagtaaaaacaaaaataaaacacctaaaagtctaaaagcacaggaaaggcaagactggcccactcttcagttcctgattttgttaaacaagtgcactgctgtcgacatgacaaaaggtcttccaggtggggcctggggagtgtggactgacagaggccacttcctgggcttctccattggctctacccccaccaaaggtgagcatgagctgagggagggtgcttttcatgcttctccattgtttctgcccatgctaagggtaaacacatgcaaagagcctcttgctggctcttacttctcagcatcatctactggctggaagcctgaattacacctccaaataaaagtaaatcactacaacaataaacttgaggaagacactgcatatctgcaaccaaggagcccttacagagccttggtcctctga

SEQ ID NO: 129080 - DNA, 2054 bp, Homo sapiens
atgaaggcagaaataaagatgttctttgaaaccaacaagaacaaagacacaacataccagaatctctgggacgcattcaaagcagtgtgtagagggaaatttatagcactaaatgcccacaagagaaagcaggaaagatccaaaattgacaccctaacatcacaattaaaagaactagaaaagcaagagcaaacacattcaaaagctagcagaaggcaagaaataactaaaatcagagcagaactgaaggaaatagagacacaaaaaacccttcaaaaaattaatgaatccaggagctggttttttgaaaggatcaacaaaatagatagaccactagcaagactactaaagaaaaaaagagagaagaatcaaatagacgcaataaaaaatgataaaggggatatcaccaccgatcccacagaaatacaaactaccatcagagaatactacaaacacctctacgcaaataaactagaaaatctagaagaaatggataaattcctcgacacatacactctcccaagactaaaccaggaagaagttgaatctctgaatagaccaataacaggagctgaaattgtggcaataatcaatagcttaccaaccaaaaaaaagtccaggaccagatggattcacagccgaattgtaccagaggtacaaggaaggagctgtgttggaagttctggccagggcaatcaggcaggagaaggaaataaagggtattcaattaggaaaagaggaagtcaaattgtccctctttgcaggtgacatgattgtatatctagaaaaccccattgtctcagcccaaaatctccttaagctgataagcaacttcagcaaagtctcaggatacaaaatcaatgtgcaaaaatcacaagcattcttatacaccaataacagacaaacagagagccaaatcatgagtgaactcccattcacaattgcttcaaagagaataaaatacctaggaatccaacttacaagggatgtgaaggacctcttcaaggagaactacaaaccactgctcaatgaaataaaagaggatacaaacaaatggaagaacattccatgctcatgggtaggaagaatcaatatcgtgaaaatggccatactgcccaaggtaatttacggattcaatgccatccccatcaagctaccaatgactttcttcacagaattggaaaaaaactacttaaaagttcatatggaaccaaaaaagagcccgcatcgccaagtgaatcctaagccaaaagaacaaagctggaggcatcacactacctgacttcaaactgtactacaaggctacagtaaccaaaacagcatggtactggtaccaaaacagagatatagatcaatggagcagaacagagccctcagaaataatgccgcatatctacaactatctgatctttgacaaacctgacaaaaacaagaaatggggaaaggattccctgtttaataaatggtgccgggaaaactggctagccatatgtagaaagctgaaactggatcccttccttacaccttatacaaaaattaattcaagatggattaaagacttaaatgttagacctaaaaccataacaaccctagaagaaaaactaagcaataccattcaggacataggcatgggcaaggattccatgtctaaaacaccaaaagcaatggcaacaaacgtcaaaattcaaaaatgggatctaataaaactaaagagcttctgcacagcaaaagaaactaccatcagagtgaacaggcaacctacaacatgggagaaaattttcgcaacctactcatctgacaaagggctaatatccagaatctacaatgaactcaaacaaatttacaagaaaaaaacaaacaaccccatcaaaaagtgggtgaaggacatgaacagacacttctcaaaagaagacatttatgcagccaaaaaacacatgaaaaaatgctcaccatcactggccatcagagaaatgcaaatcaaaaccacaatgagataccatctcacaccagttagaatggcaatcattaaaaagtcaggaaacaaccggtgctag

SEQ ID NO: 129081 - DNA, 3230 bp, Homo sapiens; identical to SEQ ID NO: 128679

SEQ ID NO: 129082 - DNA, 5544 bp, Homo sapiens
atgggagactttaacaccccactgtcaacattagacagagcaacgagacagaaagtcaacaaggatacccaggaattgaactcagctctgcaccaagcagacttaatagacatctacagaactctccaccccaaatcaacagaatatacatttttttcagcaccacaccacacctattccaaaattgaccacatacttggaagtaaagctctcctcagcaaatgtaaaagaacagaaattataacaaactatctctcagaccacagtgcaatcaaactagaactcaggattaagaatctcactcaaaaccgctcaattacatggaaactgagcaacctgctcctgaatgactactgggtacataacgaaatgaaggcagacataaagatgttctttgaaaccaatgagaacaaagacacaacataccagaacctctgggacacattcaaagcagtgtgtagagggaaatttttagcactaaatgcccacaagaaaaagcaggaaagatccaaaattgacaccctaacatcacaattaaaagaactagaaaagcaagagcaaacacattcaaaagctagcagaaggcaagaaataactaaaatcggagcagaactgaaggaaatagagacacaaaaaacccttcaaaaaattaacgaatccaggagctggttttttgaaaggatcaacaaaattgataaaccgctagcaagactaataaagaaaaaaagagagaagaatcaaatagacgcaataaaaaatgataaaggggatatcaccaccgatcccacagaaatacaaactaccatcagagaatacaacaaacacctctatgcaaataaactagaaaatctagaagaaatggataaattcctcgacacatactctctcccaagactaaaccaggaagaagttgaatctctgaatagaccaataacaggagctgaaattgtggcaataatcaatagcttaccaactaaaaagagtccaggaccagatggattcacagccaaattctaccagaggtacaaggaggaatgtaaaatactggcaaaccaaatccagcagcacatcaaaaagcttacccaccaggatcaagtggacttcatccctgggatgcaaggctggttcaatatacgcaaatcaataaatgtaatccagcatataaacagaagcaaagacaaaaaccacatgattatctcaatagatgcagaaaaggcctttgacaaaattcaacaacccttcatgctaaaaactctcaataaattacgtattgatgggacgtatctcaaaataataagagctatctatgacaaacccacagccaatatcatactgaatgggcaaaaactggaagcattccctttgaaaactggcacaagacagggatgctctctctcaccactcctattcaacatagtgttggaagttctggccagggcaattaggcaggagaaggaaataaagggtattcaattaggaaaagaggaagtcaaattgtccctgtttgcagacaacattattgtatatctagaaaaccccattgtctcagcccaaaatctccttaagctgataagcaacttcagcaaagtctcaggatacaaaatcaatgtacaaaaatcacaagcattcttatacaccaacaacagacaaacagagagccaaatcatgagtgaactcccattcacaattgcttcaaagagaataaaatacctaggaatccaacttacaagggatgtgaaggacctcttcaaggagaactacaaaccactgctcaaggaaataaaagaggatacaaacaaatggaagaacatcccatgctcatgggtaggaagaatcaatatcgtgaaaatggccatactgcccaagataatttacagattcaatgccatccccatcaaactaccaatgactttcttcacagaattggaaaaaactactttaaagttcatatggaaccaaaaaaggagcctgcattgccaagtcaatcctaagccaaaagaacagagctggaggcatcacgctatctgacttcaaactgtactacaaggctacagtaaccaaaacagcatggtactggtaccaaaacagagatatagatcaatggaacaaaacagagccctcagaaataatgccacatatctacaactatctgatctttgacaaacctgagaaaaacgagcaatggggaaaggattccctatttaataaatggtgctgggaaaactggctagccatatgtagaaagctgaaactggatcccttccttacaccttatacaaaaatcaattcaagatggattaaagacttaaacgttagacctaaaaccataaaaaccctagaagaaaacctaggcattaccattcaggacataggcatgggcaaggacttcatgtctaaaacaccaaaagcaatggcaacaaaagccaaaattgacaaatgggatctaattaaactaaagaacttctgcacagcaaaagaaactaccatcagagtgaacaggcaacctacaaaatgggagaaaattttcacaacctactcatctgacaaagggctaatatccagaatctacaatgaactccaacaaatttacaagaaaaaaacaaacaaccccatcaaaaagtgggcaaaggacatgaacagacacttctcaaaagaagacatttatgcagccaaaaaacacatgaaaaaatgctcaccatcactggccatcagagaaatgcaaatcaaaaccacaatgagataccatgtcacaccagttagaatggcaaccattaaaaagtcaggaaacaacagctggaggtcatgcctgcaaccatgggcagcacattcaacaacttaccggcacccaggaaccatggagaaaaaaaccagcagcggggacacccccactgtcttcccatccaccctgggtcgcaagaaaagcacaagtgctcaactaactgaactgacagctcttacacttgagttaagcaagggaaaggtaagaaacgccccttcaaagttagatctaagcccttttgagatgctgtatggatggccttttctcaccaatgatttcttattagaccaagagacctctgaattgggcaagcatgtaaactctctggctcgttttcaacaggaattaactcaagtagcagaagcccaaccccaagaagtaggaccacctttatttaacccaggatatttggtattgcccaagcagggagggccttacaccattctcctttcaatgccctcagcagtaaaagttacaggtattgattcctggatacatcatgctcaagttaaagcctggaaaactgagagagcaatccccggcagcccagcggaatgtcttggataccaatgtgaggaaataagagacctgaagctgaaaatcaaaagagataagaaaatgagcaagggctactcatcctactcagttccagtcatccattcagtcatccagtcatccagtctttgtacaactggtacacagaagtcaagaattgaggtttgggaacctctgcctagatttccgaagatgtatggatatgcctggattcctagacaaaagtttgctgcaggggcagggccctcatggagaacctctgttaaggcagtgcagaagggaaatgtggggtcgaagccccaccacagagaccctactggggcactgcctagtggagctgtgagaagaggaccaccatcctccagacctcagaatggtagatccactggcagcttgcaccgtgtgcctggaaaagttgcaggcacccaatgccagtctgtgaaaccagccaatgggtctgtatccttgggcagtatggccattttcacgatattgattcttcctacccatgagcgtggaatgttcttccatttgtttgtatcctcttttatttccttgagcagtggtttgtagttctccttgaagaggtccttcacatcccttgtaagttggattcctaggtattttattctctttgaagcaattgtgaatgggagttcactcatgatttggctctctgtttgtctgttgttgatgtataagaatgcttgtgatttttgcacattgattttgtatcctgagactttgctgaagttgcttatcagcttaaggagattttgggctgagacgatggggttttctagatatacaatcatgtcatctgcaaacaaggacaatttgacttcctcttttcctaattgaatgccctttatttccttctcctgcctgattgccctggccagaacttccaacactatgttgaataggagtggtgagagagggcatccctgtcttgtgccagttttcaaagggaatgcttccagtttttgtccattcagtatgatattggctgtgggtttgtcatagatagctcttattattttgagatatgtcccatcaatacctaaattattgagagtttttagcatgaagggttgttgaattttgtcaaaggccttttctgcatctattgagataataatgtggtttttgtctttggttctgtttatatgcagctccttcttgtacctctggtagaattcggctgtgaatccatctggtcctggactttttttggttggtaagctattaattattgcttcaatttcagagcctgttattggtctattcagagattcaatttcttcctggtttagtcttgggagggtgtatgtgttgaggaatttatccatttcttctagattttctagtttatttgtgtagagatgtttatagtattctctgatagtagtctggatttctgtgggatcagtgatgatatctcctttgtcattttttattgcatctatttgattcttctctcttttcttctttattagttttgctagtggtctatcaattttgttgaccttttcaaaaaaccagcccctggattcattgattttttgaagggttttttgtgtctctatttccttcagttctgctctgattttagttatttcttgccttctgctagcttttgaatgtgtttgctcttgcttctctagctcctttaattgtgatgttagggtgtcaattttagatttttcctgctttctcttgtgggcatttagtgctataaatttgcctctacacactgctttgaatgtgtcccagagattctggtatgttgtgtctttgttctcattggtttcaaagaacatctttatttctgccttcatttcgttatgtacccagtagtcattcaggagcagattgttcagtttccatgtagttgagtggttttgagtgagtttcttaatcctgagttctagtttgattgcactgtggtctgagagacagtttgttataatttctgttcttttacatttgctgaggagtgctttacttccaagtatgtggtcaattttggaataggtgtggtgtggtgctgaaaagaatgtatattctgttgatttgtggtggaaagttctgtagatgtctattaggtccacttggtgcagagctgagttcaattcctggatatccttgttaactttctgtctcattgatctgtctaatgttgacagtggggtgttaaagtctcccat

SEQ ID NO: 129083 - DNA, 4008 bp, Homo sapiens
atggggaaaaaacagaacagaaaaactggaaactctaaaacgcagagcgcctctcctcctccaaaggaacgcagttcctcaccagcaacagaacaaagctggatggagaatgattttgacgagctgagagaagaaggcttcagacgatcaaattactctgagctatgggaggacattcaaaccaaaggcaaagaagttgaaaactttgaaaaaaatttagaagaatgtataactagaataaccaatacagagaagtgcttaaaggagctgatggagctgaaaaccaaggctcgagaactacgtgaagaatgcagaagcctcaggagccgatgcgatcaactggaagaaagggtatcagcaatggaagatgaaatgaatgaaatgaagcgagaagggaagtttagagaaaaaagaataaaaagaaatgagcaaagcctccaagaaatatgggactatgtgaaaagaccaaatctacgtctgattggtgtacctgaaagtgatgtggagaatggaaccaagctggaaaacactctgcaggatattatccaggagaacttccccaatctagcaaggcaggccaacgttcagattcaggaaatacagagaacgccacaaagatactcctcgagaagagcaactccaagacacataattgtcagattcaccaaagttgaaatgaaggaaaaaatgttaagggcagccagagagaaagaaatacaaactaccatcagagaatactacaaacacctctacgcaaataaactagaaaatctagaagaaatggatacattcctcgacacatacactctcccaagactaaaccaggaagaagttgaatctctgaatagaccaataacaggctctgaaattgtggcaataatcaatagtttaccaaccaaaaagagtccaggaccagatggattcacagccgaattctaccagaggtacaaggaggaactggtaccattccttctgaaactattccaatcaatagaaaaagagggaatcctccctaactcattttatgaggccagcatcattctgataccaaagccgggcagagacacaaccaaaaaagagaattttagaccaatatccttgatgaacattgatgcaaaaatcctcaataaaatactggcaaaccgaatccagcagcacatcaaaaagcttatccaccatgatcaagtgggcttcatccctgggatgcaaggctggttcaatatacgcaaatcaataaatgtaatccagcatataaacagagccaaagacaaaaaccacatgattatctcaatagatgcagaaaaagcctttgacaaaattcaacaacccttcatgctaaaaactctcaataaattaggtattgatggtacatatttcaaaataataagagctatctatgacaaacccacagccaatatcatactgaatgggcaaaaactggaagcattccctttgaaaactggcacaagacagggatgccctctctcaccgctcctattcaacatagtgttggaagttctggccagggcaatcaggcaggagaaggaaataaagggtattcaattaggaaaagaggaagtcaaattgtccctgtttgcagacgacatgattgtttatctagaaaaccccattgtctcagcccaaaatctccttaagctgataagcaacttcagcaaagtctcaggatacaaaatcaatgtacaaaaatcacaagcattcttatacacgaacaacagacaaacagagagccaaatcatgggtgaactcccattcacaattgcttcaaagagaataaaatacctaggaatccaacttacaagggatgtgaaggacctcttcaaggagaactacaaaccactgctcaaggaaataaaagaggacacaaacaaatggaagaacattccatgctcatgggtaggaagaatcaatatcgtgaaaatggccatactgcccaaggtaatttacagattcaatgccatccccatcaagctaccaatgactttcttcacagaattggaaaaaactactttaaagttcatatggaaccaaaaaagagcccgcattgccaagtcaatcctaagccaaaagaacaaagctggaggcatcacactacctgacttcaaactatactacaaggctacagtaaccaaaacagcatggtactggtaccaaaacagagatatagatcaatggaacagaacagagccctcagaaataatgccgcatatctacaactatctgatctttgacaaacctgagaaaaacaagcaatggggaaaggattccctatttaataaatggtgctgggaaaactggctagccatatgtagaaagctgaaactggatcccttccttacaccttatacaaaaatcaattcaagatggattaaagatttaaacgttaaacctaaaaccataaaaaccctagaagaaaacctaggcattaccattcaggacataggcgtgggcaaggacttcatgtccaaaacaccaaaagcaatggcaacaaaagacaaaattgacaaatgggatctaattaaactaaagagcttctgcacagcaaaagaaactaccatcagagtgaacaggcaacctacaacatgggagaaaatttttgcaacctactcatctgacaaagggctaatatccagaatctacaatgaactcaaacaaatttacaagaaaaaaacaaacaaccccatcaaaaagtgggcgaaggacatgaacagacacttctcaaaagaagacatttatgcagccaaaaaacacatgaagaaatgctcatcatcactggccatcagagaaatgcaaatcaaaaccactatgagatatcatctcacaccagttagaatggcaatcattaaaaagtcaggaaacaacagggacaacacaaaggaagcactgctgtgtaacaacttggtggctgaagtcttggaggccaaacaggctcagaagcttcaaggcaaagcagccgtcctcagcctctcaaaaatctatgcgatcacagagacaaatgctgagacacccaacaggaagatgaaaattaaactgaagagacccatgaccaaattgcacccaagcatccaaatgttggtggtcacatccaggcctatgaaatgggaaatctgcctgatggggcattttaaccaggagaatctaaatgagcaaccgaatttagaaatcactaggcgggaacagaaagagcaaacacacaatccaagaaccacttctcctacccctttgtccatgacagacattaataatcaacatgagcactctttccctcagaacgcagccaaagctcaggagactatttcccttgtttccgctggtgtcatcctctcagccacactcacctctccaccacccacccccctttttgaccctgcaacttccttccaaatgcaggaggaaaccgcccagcttactcacaagggccccagccaacagagtgcagataagacaagcaccttggcagcgagacaatcctctcattgcatcattcagcatttcagccttagatgccatgaaggggacagtgctcagaccctctgcccttcagagagaccatcccgtactctgttgctgaatgggagaccacacggctcctctgggcgactcttccagaacagtctgggactgagctccaccacagatcctgggtgtggctggttcacaggcttggactgcccagagcacagctggccaggaaaaacagggcagaaggaatgttggtggcagggaggaagcagagaacagcatctgctcttcttacctcatttaggccccttattactatctctctccttcaccaagaatatagagaaaggagcgggccacagcacatgggcagcaggatcggatgctcagcatggagcagccatagacccaccccctcctctgcagctgcatgtgtgcttttcagaaaccaccaaattcaaaaccccaaactgccaaggtcgaatcttccgggaaaggccaattcagcctgcggttattcatgtttga

SEQ ID NO: 129084 - DNA, 2710 bp, Homo sapiens
ggtggacttctaactttttctgcacaggaatttggaagactttgttatggcaggtgccgtactcttactttacaaacaaacattaggggcagcccaggcagcacacctttctggatttaccaaaaatacacattttcctattctactgttgctttaccacatggttcagttgtagcctcagaattactttatggaagaaactgagtgtagacagagagtatgaggtctgatggtcatggaataattgttttgagtccacagcatcatggaaacctcttgggaatagagtataggcttcccagtgatgttagtcttatccatcctcctctatacatgtgagatgtttcaggattcagtggcctttgaggatgtggctgtgaccttcacccaagaggagtgggctttgctggatccttcccagaaaaatctctgtagagatgtgatgcaagaaaccttcaggaacctggcctctatagatgacatgattgtatatttagaaaaccctatcatctcagcccaaaatctccttaagctgataagcaacttcagcaaagtctcaggatacaaaatcaatgtgcaaaaatcacaagcattcctatacaccaacaacagacaaacagagagccaaatcatgagtgaactcccattcacaattgcttcaaagagaataaaatacctaggaatccaacttacaagggatgtgaaggacctcttcaaggagaactacaaaccgctgctcaaggaaataaaagaggatacaaacaaatggaagagcattacatgcacatgggtaggaagaatcaatatcgtgaaaatggccatactgcccaaggactcagtggtctttgaggatgtagatgtgagcttcacccaggaggagtgggctttgctggatccttcccagaagaatctctacagagatgtgatgcaggaaaccttcgggaacctgtcctctatagtgctggaagcttatggaccgaaacggtttgcggcaaagttacgcaatgttggattgccgttatatttgcccaacgggtgtgcgccgaatctttcactcattctcggcggcgctggtgcaaaactggaagatatggcggcagcgtataccgcgtttgctcgccacggcaaggcaggcaaattgcgcttacagcctgacgatccgctgcttgaacggcctttaatgtcgtcgggggcggcgtggatcattcgccggattatggctgatgaagcgcaacccttgccggatagtgccttgccgcgcgtcgccccactggcatggaaaacgggcaccagctatggctatcgtgacgcctgggcgattggggttaacgctcgctatgtcattgggatctggactggcagaccggacggcacgcccgttgttggtcagtttggctttgccagtgccgtaccattgttgaatcaggtcaataatatcttactgtcgcgcagtgcgaatctgccggaagacccgcgcccgaactcagtcactcgtggcgttatctgctggccgggcggacagtctttgccggaaggtgacggtaactgtcgccgccgcctggcaacctggctgctggacgggagtcagccgccaactctattactgccggagcaggaaggcattaatggcattcgtttccccatctggctggatgaaaatggcaaactatatggttcccaacgtcgagccaatcctattagcgccttcagaacgctatgccgtcgagagaaccgcgttacgggtattcgaaacgtcacagcccgcgtggataatacagccatcacagtgatgttccagcgtagagaggtcgtaggcctgatgtccgcaggtaacattgcccctaacatgcaagctttaaggggtgacccaaggctacctgaagaacaggttttccctgccattccggcaacgggaaaccagcggaaatccgtcgcccatcacgtgacggattccgtaggtcccaaactaccgtcgtcaggcccccggcagggtaccggttccaaaaggaccggcgtcatcatgctggattcaatatgcagtgagccacaaataacccctggcaccgccgaaggcttcgtggtgaacatgtatgccactggctacgaaatcacccgtacccgtgatgccatcaacaacgtcgaagctttacttggagcggaatctgcggtggttaaacaaggttcccgttccgaacaggtaataccggcttccgaaacttgcggcaacgcaacctgcggagttccactgccatccgtcgataccattaacgcgctcaaccgcctgaaagcttacgacaagctgtcgcttgatcaacgtagccagatgcgccgcattatgctgtgcgtttctgacactatcgacaaagtggtgaagatccctggcgtgagtgctgacgatcagcgcctgttgaagaaactgaagtccgacatgcttagcaccatcgagtatgcaccggtgtggatcatcatggcggtcgcgctggcgttaggtatcggtacgatgattggtggcgccgtgtggcaacgactatcggtgagaaaatcgtcacggcgaatcgtcgagttgttgtacgagccaagaagagcttcagacgacagcatcaccaggggagacatcacgcaccagcgtacaacgatacacgcatgcatagaacgcagcaagtcatatcgagttcatgacagcggactcgactatagcgcgagcagatag

SEQ ID NO: 129085 - DNA, 4605 bp, Homo sapiens
atggggaaaaaacagaacagaaaaactggaaactctaaaacgcagagcgcctctcctcctccaaaggaacgcagttcctcaccagcaacagaacaaagctggatggagaatgattttgacgagctgagagaagaaggcttcagacgatcaaattactctgagctacgggaggacattcaaaccaaaggcaaagaagttgaaaactttgaaaaaaatttagaagaatgtataactagaataaccaatacagagaagtgcttaaaggagctgatggagctgaaaaccaaggctcgaaaactacgtgaagaatgcagaagcctcaggagccgatgcgatcaactggaagaaagggtatcagcaatggaagatgaaatgaatgaaatgaagcgagaagggaagtttagagaaaaaagaataaaaagaaatgagcaaagcctccaagaaatatgggactatgtgaaaagaccaaatctacgtctgattggtgtacctgaaagtgatgtggagaatggaaccaagttggaaaacactctgcaggatattatccaggagaacttccccaatctagcaaggcaggccaacgttcagattcaggaaatacagagaacaccacaaagatactcctcgagaagagcaactccaagacacataattgtcagattcaccaaagttgaaatgaaggaaaaaatgttaagggcagccagagagaaagacagatcaacgagacagaaagtcaacaaggatacccaggaattgaactcagctctgcaccaagcagacctaatagacatctacagaactctccaccccaaatcaacagaatatacatttttttcagcaccacaccacacctattccaaaattgaccacatagttggaagtaaagctctcctcagcaaatgtaaaagaacagaaattataacaaactatctctcagaccacagtgcaatcaaactagaactcaggattaagaatctcactcaaagccgctcaactacatggaaactgaacaacctgctcctgaatgactactgggtacataacgaaatgaaggcagaaataaagatgttctttgaaaccaatgagaacaaagacacaacataccagaatctctgggacgcactcaaagcagtgtgtagagggaaatttatagcactaaatgcccacaagggaaagcaggaaagatctgaaattgacaccctaacatcacaattaaaagaactagaaaagcaagagcaaacacattcaaaagctagcagaaggcaagaaataactaaaatcagagcagaactgaaggaaatagagacacaaaaaacccttcaaaaaatcaatgaatccaggagctggttttttgaaaggatcaacaaaattgatagaccgctagcaagactaataaagaaaaaaagagagaagaatcaaatagacacaataaaaaatgataaaggggatatcaccaccgatcccacagaaatacaaactaccatcagagaatactacaaacacctctacgcaaataaactagaaaatctagaagaaatggatacattccttgacacatacactctcccaagactaaaccaggaagaagttgaatctctgaatcgaccaataacaggctctgaaattgtggcaataatcaatagtttaccaaccaaaaagagtccaggaccagatggattcacagccgaattctaccagaggtacaaggaggaactggtaccattccttctgaaactattccaatcaataggaaaagagggaatcctccctaactcattttatgaggccagcatcattctgacaccaaagccgggcagagacacaaccaaaaaagagaattttagaccaatatccttgatgaacattgatgcaaaaatcctcaataaaatactggcaaaccgaatccagcagcacatcaaaaagcttatccaccatgatcaagtgggcttcatccctgggatgcaaggctggttcaatatacgcaaatcaataaatgtaatccagcatataaacagagccaaagacaaaaaccacatgattatctcaatagatgcagaaaaagcctttgacaaaattcaacaacccttcatgctaaaaactctcaataaattaggtattgatgggacgtatttcaaaataataagagctatctatgacaaacccacagccaatatcatactgaatgggcaaaaactggaagcattccctttgaaaactggcacaagacagggatgccctctctcaccgctcctattcaacatagtgttggaagttctggccagggcaatcaggcaggagaaggaaataaagggtattcaattaggaaaagaggaagtcaaattgtccctgtttgcagacgacatgattgtttatctagaaaaccccatcgtctcagcccaaaatctccttaagctgataagcaacttcagcaaagtctcaggatacaaaatcaatgtacaaaaatcacaagcattcttatacaccaacaacagacaaacagagagccaaatcatgggtgaactcccattcacaattgcttcaaagagaataaaatacctaggaatccaacttacaagggatgtgaaggacctcttcaaggagaactacaaaccactgctcaaggaaataaaagaggacacaaacaaatggaagaacattccatgctcatgggtaggaagaatcaatatcgtgaaaatggccatactgcccaaggtaatttacagattcaatgccatccccatcaagctaccaatgactttcttcacagaattggaaaaaactactttaaagttcatatggaaccaaaaaagagcccgcatcgccaagtcaatcctaagccaaaagaacaaagctggaggcatcacactacctgacttcaaactatactacaaggctacagtaaccaaaacagcatggtactggtaccaaaacagagatatagatcaatggaacagaacagagccctcagaaataatgccgcatatctacaactatctgatctttgacaaacctgagaaaaacaagcaatggggaaaggattccctatttaataaatggtgctgggaaaactggctagccatatgtagaaagctgaaactggatcccttccttacaccttatacaaaaatcaattcaagatggattaaagatttaaacgttagacctaaaaccataaaaaccctagaagaaaacctaggcattaccattcaggacataggcgtgggcaaggacttcatgtccaaaacaccaaaagcaatggcaacaaaagccaaaattgacaaatgggatctaattaaactaaagagcttctgcacagcaaaagaaactaccatcagagtgaacaggcaacctacaacatgggagaaaattttcgcaacctactcatctgacaaagggctaatatccagaatctacaatgaactcaaacaaatttacaagaaaaaaacaaacaaccccatcaaaaagtgggcgaaggacatgaacagacacttctcaaaagaagacatttatgcagccaaaaaacacatgaagaaatgctcatcatcactggccatcagagaaatgcaaatcaaaaccactatgagatatcatctcacaccagttagaatggcaatcattaaaaagtcaggaaacaacagctcgagggaagcagccccgaagcctccgcggcggcggcggcggcggtcgcggatcctctccaggctgctcgcaaagtccggccggccggaggcagccgccaactcctctcaacttctgccgatccgctgggcgaagcaacacgcttcctgcgcgtctctcctaggggctgagccggtctccgagggtctcggccgcctccactccctggcgctgcacacaacttacgtggaggccaggcccgcgcggggggcccagagaaagccggcgccgggcgaggctcttgcaggttctcagacccgaacacagacctgggttagagttggggacttgcctgtaataagtgacttacccattgccctcaacctaaggaagccttgccatttaaaacctcccaatggagcctatcaaagcgtgcttcaaagtgtgagggaggctgagagaggaattacagaaccgcctgacattggctgcaacctgatggggagatctgactcaaggaacagtacgatggccattgatgtccccgcccacgcactctgtagaagccttgggaatcttttcaaagcactgcccccacccgagagcatcatgacttctgttgctgggacaaaggtaagaatcattaggaaacacgatcacagtagtgcacctgcttacgcacgatatccagcccagagaaggtcccgcttcctaagccctcctgagactcaccagccacaagcccacatctatactaagttctttcgaaggccctctttactgctggacattcttcctttgtgcaacacgttaataaacccaacttggttcagccacagcgctgcaatgaacattcacggcataaaaaggaatgagagcatgtcttttgcaggagcatggatggagctggaggttatcatccttagcaaactaacacaagaacagaaaaccaaataccgcaagttctcacttataagtgggcactaa

SEQ ID NO: 129086 - DNA, 4809 bp, Homo sapiens
atggtaaagggatcaattcaacaagaggagctaactatcctaaatatttatgcacccaatacaggagcacccagattcataaagcaactcctgagtgacctacaaagagacttagactcccacacattaataatgggagactttaacaccccactgtcaacattagacagatcaacgagacagaaagtcaacaaggatacccaggaattgaactcagctctgcaccaagcagacctaatagacatctacagaactctccaccccaaatcaacagaatatacattgttttcagcaccacaccacacctattccaaaattgaccacatacttggaagtaaagctctcctcagcaaatgtaaaagaacagaaattataacaaactatctctcagaccacagtgcaatcaaactagaactcaggattaagaatctcactcaaagccgctcaactacatggaaactgaacaacctgctcctgaatgactactgggtacataacgaaatgaaggcagaaataaagatgttctttgaaaccaacgagaacaaagacaccacataccagaatctctgggacgcattcaaagcagtgtgtagagggaaatttatagcactaaatgcctacaagagaaagcaggaaagatccaaaattgacaccctaacatcacaattaaaagaactagaaaagcaagagatcaacaaaattgatagaccgctagcaagactaataaagaaaaaaagagagaagaatcaaatagacacaataaaaaatgataaaggggatatcaccaccgatcccacagaaatacaaactaccatcagagaatactacaaacacctctacacaaataaactagaaaatctagaagaaatggatacattcctcgacacatacactctcccaagactaaaccaggaagaagttgaatctctgaatagaccaataacaggatctgaaattgtggcaataatcaatagtttaccaaccaaaaagagtccaggaccagatggattcacagccgaattctaccagaggtacaaggaggaactggtaccattccttctgaaactattccaatcaatagaaaaagagggaatcctccctaactcattttatgaggccagcatcattctgataccaaagccgggcagagacacaaccgaaaaagagaattttagaccaatatccttgatgaacattgatgcaaaaatcctcaataaaatactggcaaaccgaatccagcagcacatcaaaaagcttatccaccatgatcaagtgggcttcatccctgggatgcaaggctggttcaatatacgcaaatcaataaatgtaatccagcatataaacagagccaaagacaaaaaccacatgattatctcaatagatgcagaaaaagcctttgacaaaattcaacaacccttcatgctaaaaactctcaataaattaggtattgatgggatgtatttcaaaataataagagctatctatgacaaacccacagccaatatcatactgaatgggcaaaaactggaagcattccctttgaaaactggcacaacacagggatgccctctctcaccgctcctattcaacatagtgttggaagttctggccagggcaatcaggcaggagaaggaaataaagggtattcaattaggaaaagaggaagtcaaattgtccctgtttgcagacgacatgattgtttatctagaaaaccccatcgtctcagcccaaaatctccttaagctgataagcaacttcagcaaagtctcaggatacaaaatcaatgtacaaaaatcacaagcattcttatacaccaacaacagacaaacagagagccaaatcatgagtgaactcccattcacaattgcttcaaagacaataaaatacctaggaatccaacttacaagggatgtgaaggacctcttcaaggagaactacaaaccactgctcaaggaaataaaagaggacacaaacaaatggaagaacattccatgctcatgggtaggaagaatcaatatcgtgaaaatggccatactgcccaaggtaatttacagattcaatgccatccccatcaagctaccaatgactttcttcacagaattggaaaaaactactttaaagttcatatggaaccaaaaaagagcccgcatcgccaagtcaatcctaagccaaaagaacaaagctggaggcatcacactacctgacttcaaactatactacaaggctacagtaaccaaaacagcatggtactggtaccaaaacagagatatagatcaatggaacagaacagagccctcagaaataatgccgcatatctacaactatctgatctttgacaaacctgagaaaaacaagcaatggggaaaggattccctatttaataaatggtgctgggaaaactggctagccatatgtagaaagctgaaactggatcccttccttacaccttatacaaaaatcaatccaagatggattaaagatttaaacgttagacctaaaaccataaaaaccctagaagaaaacctaggcattacctttcaggacataggcgtgggcaaggacttcatgtccaaaacaccaaaagcaatggcaacaaaagccaaaattgacaaatgggatctaattaaactaaagagcttctgcacagcaaaagaaactaccatgagagtgaacaggcaacctacaacatgggagaaaattttcgcaacctacgcatctgacaaagggctaatatccagaatctacaatgaactcaaacaaatttacaagaaaaaaacaaacaaccccatcaaaaagtgggcgaaggacatgaacagacacttctcaaaagaagacatttatgcagccaaaaaacacatgaagaaatgctcatcatcactggccatcagagaaatgcaaatcaaaaccactatgagatatcatctcacaccagttagaatggcaatcattaaaaagtcaggaaacaacaggagctggtattttgaaaagatcaacaaaattgatagactgctagcaagactaataaagaaaaaaagagagaagaatcaaatagacgcaataaaaaatgataaaggggatatcaccactgatcccacagaaatacaaactaccaccagagaatactataaacacctctatgcaaataaactagaaaatctagaagaaatggataaattcctcgacacatacaacctcccaagactaaagcaggaagaagttgaatctctgaatagaccaataagaggctctgaaattgtggcaataatcaatagcttaccaaccaaaaaaagtccaggaccagatggattcacagccgaattctaccacaggtacaaagaggagctggtaccattgcttctgaaactattccaatcaatagaaaaagaggtaatcctccctaactcattttatgaggccagcatcatcctgataccaaagcctgacagagacacagcaaaaaaagagaattttagaccaatatccttgatgaacatcgatgcaaaaatcctcaataaaatactggcaaaccgaatccagcagcacatcaaaaagcttatccaccatgatcaagtgggcttcatccctgggatgcaaggctggttcaacatacgcaaatcagtaaatgtaatccagcatataaacagaaccaaagacaaaaaccacatgatcatctcaatagatgcagaaaagtcctttgataaaattcaacaacacttcatgctaaaaactctcaataaattaggtattgatgggtcatatctcaaaataataagagctacctatgacaaacccacagccaatatcatactgaatgggcaaaaactggaagcattccctttgaaaactggcacaagacacggatgccccctctcaccactcctattcaacatagtgttggaagttctggccagagcaatcaggcaggagaaggaaataaagggtattcaattaggaaaagaggaagtcaaattgtccctgttcatagatgacatgattgtatatctagaaaaccccatcatctcagcccaaaatctccttaagctgataagcaacttcagcaaagtctcaggatacaaaatcaatgtacaaaaatcacaagcattcttatacaccaacaacagacaaacagagagccaaatcatgagtgaactcccattcacaattgcttcaaagagaataaaatacctaggaatccaacttacaagggatgtgaaggacctcttcaaggagaactacaaaccactgctcgaggaaataaaagaggatccaaacaaatgtaagaacattccatgctcatgggtaggaagaatctatatcgtgaaaatggccatactgcccaagtgctcaagctctgctaagggacagactgcctctgcaagtgggtccctgacccccctgcctcctgatggggagagacctcccaaaacgggtcgacagacacctcatacaggagagctccggctggcatcagggcagtaccctgcagggatggagcttccagaggaaggagcaggcagcaatctttgctgctctgcagccaccactgcaagagaccaaaactggatggagaatcagtttgatgaactgacagaggtaggctttggaaagtgggtaataacaaactcttctgagctaaaagagcatgttctaattcaatgcaaggaagctaagaaccttcataaaaggttacaggaactgctaactagaataaccagtttagagagaaacataaatgacctgatggagctgaaaaacacagtacgagaacttcgtgaagcatacacaagtatcaatagccaaatcaattga

SEQ ID NO: 129087 - DNA, 5931 bp, Homo sapiens
atggggaaaaaacagaacagaaaaactggaaactctaaaacgcagagtgcctctcctcctccaaaggaacgcagttcctcaccagcaacggaaaaaagctggatggagaatgactttgacgagctgagagaagaaggtttcagacgatcaaattactctgagctacgggaggacattcaaaccaaaggcaaagaagttgaaaactttgaaaaaaatttagaagaatgtataactagaataaccaatacagagaagtgcttaaaggagctgatggagctgaaaaccaaggctcgagaactacgtgaagaatgcagaagcctcaggagccgatgtgatcaactggaagaaagggtatcagcaatggaagatgaaatgaatgaaatgaagcgagaagggaagtttagagaaaaaagaataaaaagaaatgagcaaagcctccaagaaatatgggactatgtgaaaagaccaaatctacgtctgactggtgtacctgaaagtgacggggagaatggaaccaagttggaaaacactctgcaggatattatccaggagaacttccccaatctagcaaggcaggtcaatgttcagattcaggaaatacagagaacgccacaaagatactcctcgagaagagcaactccaagacacataattgtcagattcaccaaagttgaagtgaaggaaaaaatgttaagggcagccagagagaaaggtcgggttaccctcaaagggaagcccatcagactaacagcggatctctcggcagaaaccctacaagccagaagagagtgggggccaatattcaacattcttaaagaaaagaattttcaacccagaatttcatatccagccaaactaagcttcataagtgaaggagaaataaaacactttacagacaagcaaatgctgagagattttgtcaccaccaggcctgccctaaaagagctcctgaaggaagtgctaaacatggaaaggaacaaccagtaccagccgctgcaaaatcatgccaaaatacagatcaacgagacagaaagtcaacaaggatacccaggaattgaactcagctctgcaccaagcggacctaatagacatctacagaactctccacaccaaatcaacagaatatactttttttcagcaccacaccacacctattccaaaattgaccacatagttggaagtaaagctctcctcagcaaatgtaaaagaacagaaattataacaaactatctctcagaccacagtgcaatcaaactagaactcaggattaagaatctcaatcaaagccgctcaactacatggaaactgaacaacctgctcctgaatgactactgggtacataacgaaatgaaggcagaaataaagatgttctttgaaaccaacgagaacaaagacacaacataccagaatctctgggacgcattcaaagcagtgtgtagagggaaatttatagcactaaatgcccacaagagaaagcaggaaagatccaaaattgacaccctaacatcacaattaaaagaactagaaaagcaagagcaaacacattcaaaagctagcagaaggcaagaaataactaaaatcagagcagaactgaaggaaatagagacacaaaaaacccttcaaaaaatcaatgaatccaggagctggttttttgaaaggatcaacaaaattgatagaccgctagcaagactaataaagaaaaaaagagaggagaatcaaatagacacaataaaaaatgataaaggggatatcaccaccgatcccacagaaatacaaactaccatcagagaatactacaaacacctctatgcaaataaactagaaaatctagaagaaatggataaattccttgacacatacactctcccaagactaaaccaggaagaagttgaatctctgaatagaccaataacaggagctgaaattgtggcaataatcaatagtttaccaaccaaaaagagtccaggaccagatggattcacagctgaattctaccagaggtacaaggaggaactggtaccattccttctgaaactattccaatcaatagaaaaagagggaatcctccctaactcattttaatgaggccagcatcattctgataccaaagccgggcagagacacaaccaaaaaagagaattttagaccaatatccttgatgaacattgatgcaaaactcctcaataaaatactggcaaaccgaatccagcagcacatcaaaaagcttatccaccatgatcaagtgggcttcatccctgggatgcaaggctggttcaatatacgcaaatcaataaatgtaatccagcatataaacagagccaaagacaaaaaccacatgattatctcaatagatgccgaaaaagcctttgacaaaattcaacaacccttcatgctaaaaactctcaataaattaggtattgatgggacatatatttcaaaataataagagctatccatgacaaacccacagccaatatcatactgaatgggcaaaaactggaagcattccctttgaaaactggcacaagacagggatgccctctctcaccactcctattcaacatagtgttggaagttctggccagggcaattaggcaggagaaggaaataaagggtattcaattaggaaaagaggaagtcaaattgtccctgtttgcagacgacatgattgtatatctagaaaaccccattgtctcagcccgaaatctccttaagctgataagcaacttcagcaaagtctcaggatacaaaatcaatgtgcaaaaatcacaagcattcttatgcaccaacaacacacaaacagagagccaaatcatgagtgaactcccattcacaattgcttcaaagagaataaaatacctaggaatccaacttacaagggatgtgaaggacctcttcaaggagaactacaaaccactgctcaaagaaataaaagaggatacaaacaaatggaagaacattccatgctcatgggtaggaagaatcaatattgtgaaaatggccatactgcccaaggtaatttctagattcaatgccatccccatcaagctaccaatgactttcttcacagaattggaaaaaactactttaaagttcatatggaaccaaaaaagagcccgcatcaccaagtcaatcctaagccaaaagaacaaagctggaggcatcacactacctgacttcaaactatactacaagcctacagtaaccaaaacagcatggtactggtaccaaaacagagatatagatcaatggaacagaacagagccctcagaaataacgccgcatacctacaactatctgatctttgacaaacctgagaaaaacaagcaatggggaaaggattccctatttaataaatggtgctgggaaaactggctagccatatgtagaaaactgaaactggatcccttccttacaccttatacaaaaatcaattcaagatggattaaagatttaaacgttagacctaaaaccataaaaaccctagaagaaaacctaggcattaccattcaggacataggcgtgggcaaggacttcatgtccaaaacaccaaaagcaatggcaacaaaagccaaaattggcaaatggtacctaattaaactaaagagcttctgcacagcaaaagaaactaccatcagagtgaacaggcaacctacaacatgggagaaaattttcgcaacgtactcatctgacaaagggctaatatccagaatctacaatgaactcaaacaaatttacaagaaaaaaacaaacaaccccatcaaaaagtgggcgaaggacatgaacagacacttctcaaaagaagacatttatgcagccaaaaaatacgtgaaaaaatgctcatcatcactggccatcagagaaatgcaaatcaaaaccactatgagataccatctcacaccagttagaatggcaatcattaaaaagtcaggaaacaacagcaaaaagaacaaagctggaggaatcatgccagctgacttcaaactatactacaaggctatgggaacaaaaacagcatgggacatggatgaaactgaaaaccatcatgctcagcaaactaacacaagaacagaaaaacaaacaccacatgttctcactcataagtgggagttgaacaatgagaacacatggacacagggaaggaaacatcacacatcagggcctgtcaacagttgtctggagaaacaggaagagccaccatcattgcttcgtctaaataatcggatcaaacagctactcccaccggtagatttaacggaactgttacttgagatagatgcccagacaggatttacacatgagtttgcgcatgtcagtgaatctggtgctcgagcgcaagatttgcacatcagtttatgtgcggtattgatggctgaagcctgtaatatcggactggaaccgctgataaagcacaatataccagcactgacccgccatcggctcagttgggtgaaacagaattaccttcgtgcagaaacgctggtcagggccaatgcccgcctggttgattttcagtccacactggagcttgctggtcgttggggaggtggagaagtggcatcagctgacggcatgcgccttgtcacaccagtgaagaccatcaactcaggatctaacagaaaatatttttgttctggacgagggatcacctggtataacttcgtatctgatcggtactctgggttccatggcattgtggtacccggtacattacgggattcgatttttgtacgggaaggacttcttgagcagcagacagggctgaatccagttgaaatcatgacagacattgcgggtagcagcgatattattttcggtctgttctggctactggggtatcagttttccccccggcttgccgatgcaggtgaggcggtgttctggcgggtgaataaatcggcaaactacggagtactggataagttggcccgaggatatgcagatctgtcaaaagcggagagtcagtgggatgagatgatgcgaaccgctggttcgctgaagttgggtacaattcatgcgtcagaactcattcgctctttactgaaaagctcgcgcccatcaggactggcacaggcaattatggaagtagggcgtgtaaacaaaacgctatatctcctcaattatattgatgatgaagattatcgtcggcggatcctgacgcagcttaatcgaggagaaggccgccacgctgtggctcgtgcgatttgttacggacaacgcggagagatcagaaagcgttatcgtgaagggcaggaagatcaactgggggcgctgggcctggttactaatgcagtggttctgtggcacacgctctatatggaggaagcgttgagttggatgcgccgcaatggcgaagaaattatagatgaagatatcgcttggctatctcccctgatgcacgggcatatcaatatggcaatcaggcaggagaaagaaataaagggtattcaattaggaaaagaggaagtcaaatggtccctgtttgcagatgacatgattgtatatttagaaaaccccatcgcctcagcccaaaatctccttaagctgataagcaacttcagcaaagtctcaggatacaaaatcaatgtgcaaaaatcacaagcattcttatacaccaataacagacaaacagagagccaaatcatgagtgaactcccattcacaattgcttcaaagagaataaaatacctaggaatccaacttacaagggatgtgaaggacctcttcaaggagaactacaaaccaatgctcaatgaaataaaagaggatacaaacaaatggaagaacattccatgctcatggataggaagaatcaacatcgtgaaaatggcaatactgcccaagctaatttatagattcaatgccatccccatcaagctaccaatgactttcttcacagaattggaaaaaactactttaaagttcatatga

SEQ ID NO: 129088 - DNA, 8710 bp, Homo sapiens
  misc_feature (1)...(8710): n = a,t,c or g
atgtcgtacagcagcaagtctgctttgcacttgaaaatccttcaggcaggacaggaggttcttaagtgtgacaatctaaaaacttgtcacacttcacatggatctgtcatggcggaaacagcggttatcaatcacaagaaacgtaaaaatagcccgcgaatcgtccagtcaaacgacctcactgaggcggcatatagtctctcccgggatcaaaaacgtatgctgtatctgttcgttgaccagatcagaaaatctgatggcaccctacaggaacatgacggtatctgcgagatccatgttgctaaatatgctgaaatattcggattgacctctgcggaagccagtaaggatatacggcaggcattgaagagtttcgcggngaaggaaagtgttttttatcgccctgaagaggatgccggcgatgaaaaaagctatgaatcttttccttggtttatcaaacgtgcgcacagtccatccagagggctttacagtgtacatatcaacccatatctcattcccttctttatcgggttacaagacccggttacgcagtttcggcttagtgaaacaaaagaaatcaccaatcctgttggaagttctggccagggaaatcaggcaggagaaggaaataaagggtattcaattaggaaaagaggaagtcaaattgtccctgtttgcagatgacatgattgtatatctagaaaaccccattgtctcagcccaaaatctccttaagctgataagcaactttagcaaagtctcaggatacaaaatcaatgtacaaaaatcacaagcattcttatacaccaacaacagacaaacagagagccaaatcatgagtgaactcccattcacaattgcttcaaagagaataaaatacctaggaatccaacttacaagggatgtgaaggacctcttcaagcagaactacaaaccactgctcaatgaaataaaagaggatacaaacaaatggaagaacattccatgctcatgggtaggaagaatcaatatcgtgaaaatggccatactgcccaaggaacgcagctcctcaccagcaacggaacaaagctggatggagaatgactttgatgagttgagagaagaaggcttcagacgatcaaacttctccgagctaaaggagaaagttcgaacccatcacaaacaagataaaaaccttgaaaaaaatttagaagaatgtataactagaataaccaatacagagaagtgcttaaaggagctgatggagctgaaaaccaaggctcgagaactacatgaagaatgcagaagcctcaggagccgatgtgatcaactggaagaaagggtatcagcaatggaagatgaaatgaatgaaatgaagggagaagggaagtttagagaaaaaagaataaaaagaaacgagcaaagcctccaagaaatatgggactatgtgaaaagaccaaatctacatctgattggtgtacctgaaagtgatggggagaatggaaccaagttggaaaacactctgcaggatattatccaggagaacttccccaatctagcaaggcaggccaacgttcagattcaggaaatacagagaatgccacaaagatactcctcgagaagagcaactccaagacacataattgtcagattcaccaaagttgaaatgaaggaaaaaatattaaaggcagccagagagaaagacagatcaacgagacagaaagtcaacaaggatacccaggaattgaactcagctctgcaccaagcagacctaatagacatctacagaactctccaccccaaatcaacagaatatacatttttttcagcaccacaccacacctattccaaaattgaccacatacttggaagtaaagctctcctcagcaaatgtgaaagaacagagattataacaaactatctctcagaccacagtgcaatcaaactagaactcaggattaagaatctcactcaaaaccgctcaactacatggaaactgaacaacctgctcctgaatgactactgggtacataacgaaatgaaggcagaaataaagatgttctttgaaaccaatgagaacaaagacacaacataccagaatctctgggatgcattcaaagcagtgtgtagagggaaatttatagcactaaatgcccacaagagaaagcaggaaagatccaaaattgacaccctaacatcacaattaaaagaactagaaaagcaagagcaaacacattcaaaagctagcagaaggcaagaaataactaaaatcagagcagaactgaaggaaatagagacacaaaaaacctttcaaaaaattaatgaatccaggagctggttttttgaaaggatcaacaaaattgatagaccgctagcaagactaataaagaaaaaaagagagaagaatcaaatagacacaataaaaaatgataaaggggatatcaccaccaatcccacagaaatacaaactaccatcagagaatattacaaacacctctacgcaaataaactagaaaatctagaagaaatggataaattcctcgacacaaacaccctcccaagactaaaccaggaagaagttgaatctctgaatagaccaataacaggatctgaaattgtggcaataatcaatagtttactaaccaaaaagagtccaggaccagatggattcacagccgaattctaccagaggtacaaggaggaactgctgggcagagacacaaccaaaaaagagaattttagaacaatatccttggtgaacattgatgcaaaaatcctcaataaaatactggcaaaacgaatccagcagcacgtcaaaaagcttatccactatgatcaagtgggcttcatccctgggatgcaaagctggttcaatatacgcaaatcaataaatgtaatccagcatataaagagagccaaagacagaaaccacatgattatctcaatagatgcagaaaaagcctttgacaaaattcaacaacccttcatgctaaaaactctcaataaattaggtattgatgggacgtatttcaaaataataagagttatctatgacaaacccacagccaatatcatactaaatgggcaacaactggaagcattccctttgaaaactggcacaagacagggatgccctccctcaccactcctgttcaacatagtgttggaagttctggccagggcaattaggcaagagaaggaaataaagggtattcaattaggaaaagaggaagtcaaattgtccctgtttgcagaccacatgattgtatatctagaaaaccccattgtctcagcccaaaatctccttaagctgataagcaacttcagcaaagtctcaggatacaaaatcaatgtacaaaaatcacaagcattcttatacaccaacaacagacaaacagagagccaaatcatgagtgaactcccattcacaattgcttcaaagagaataaaatacctaggaatccaacttacaagggatgtgaaggacctcttcaaggagaactacaaaccactgctcaaggaaataaaagaggatacaaacaaatggaagaacattccatgctcatgggtaggaagaatcaatatcgtgaaaatggccatactgcccaaggtaatttatagattcaatgccatccccatcaagttaccaatgcctttcttcacagaattggaaaaaactactttaaggttcatatggaaccaaaaaagagcctgcatcgccaaggcaatcctaagccaaaagaacaaagctggaggcatcacactacctgacttcaaactatactacaaggctacagtaaccaaaacagcatggtactggtaccaaaacagagatatagatcaatgcaacagaacagagccctcagaaataacgctgcatatctgcaactatctgatctttgacaaacctgagaaaaacaagcaatggggaaaggattccctatttaataaatggtgctgggaaaactggctagccatatgtagaaagctgaaactggatcccttccttacaccttatacaaaaatcaattcaagatggattaaagacttaaacgttagacctaaaaccataaaaaccctagaagaaaagctaggcattaccattcaggacataggcattggcaaggacttcatgtctaaaacaccaaaagcaatggcaacaaaagacaaaattgacaaatgggatctaattaaactaaagagcttctgcacagcgaaagaaactaccatcagagtgaacaggcaacctacaaaatgggaggaaattttcgcaacctactcatctgacaaagggctaatatccagaatctacaatgggctcaaacaaatttacaagaaaaaaacaaacaaccccatcaaaaagtgggcgaaggacatgaacagacacttctcaaaagaagacatttatgcagctaaaaaacacgtgaaaaaatgctcatcatcactggccatcagagaaatgcaaatcaaaaccacaatgagataccatctcacaccagttagaatggcaatcattaaaaagtcaggaagcaacagatgctggagaggatgtggagaaataggaacacttttacactgttggtgggactgtaaactagttcaaccattgtggaagtcagtgtggcgattcctcagggatctagaactagaaataccatttgacccagccatcccattactgggtatatacccaaacgactataaatcatgctgctataaagacacatgcacattgagtctaccagaaatccgcaactgcccaacgaaaagtgtcccagtccccttctctgttgatgaaactcagtatcatgttgaagatactagtcctgtaagctggcaagtaaaagttctaggcaagcatatacatcagggaagcagctatgaagatgtttggctgcctcagcgcatgcaaggaaaactaacaaacagaaaggacatccacaccaaaaacccatctgtacatcaccatcatcaaagaccaaaagtagataaaaccacaaagatggggaaaaaacagaacagaaaaactggaaactctaaaaagcagagcgcctctcctcctccaaaggaacgcagttcctcaccagcaatgcaacaaagctggacggagaatgactttgacgagctgagagaagaaggcttcagacgatcaaattactctgagctacgggaggacattcaaaccaaaggcaaagaagttgaaaactttgaaaaaaatttagaagaatgtataactagaataaccaatacagagaagtgcttaaaggagctgatggagctgaaaaccaaggctcgagaactacgtgaagaatgcagaagcctcaggagccgatgcgatcaactggaagaaagggtatcagcaatggaagatgaaatgaatgaaatgaagcgagaagggaagtttagagacaaaagaataaaaagaaatgagcaaagcctccaagaaatatgggactatgtgaaaagaccaaatctacgtctgattggtgtacctgaaagtgatgtggagaatggaaccaagttggaaaacactctgcaggatattatccaggagaacttccccagtctagcaaggcaggccaacgttcagattcaggaaatacagagaacgccacaaagatactcctcgagaagagcaactccaagacacataattgtcagattcaccaaagttgaaatgaaggaaaaaatgttaagggcagccagagagaaaggtcgggttaccctcaaaggaaagcccatcagactaacagcggatctctcggcagaaaccctacaagccagaagagagtgggggccaatattcaacattcttaaagaaaagaattttcaacccagaatttcatatccagccaaactaagcttcataagtgaaggagaaataaaatactttatagacaagcaaatgctgagagattttgtcaccaccaggcctgccctaaaagagctcctgaaggaagcgctaaacatggaaaggaacaaccggagaaagcaggaaagatccaaaattgacaccctaacatcacaattaaaagaactagaaaagcaagagcaaacacattcaaaagctagcagaaggcaagaaataactaaaatcagagcagaactgaaggaaatagagacacaaaaaacccttcaaaaaatcaatgaatccaggagctggttttttgaaaggatcaacaaaattgatagaccgctagcaagactaataaagaaaaaaagagagaagaatcaaatagacacaataaaaaatgataaaggggatatcaccactgatcccacagaaatacaaactaccatcagagaatactacaaacacctctacgcaaataaactagaaaatctagaagaaatggatacattcctcgacacatacactctcccaagactaaaccaggaagaagttgaatctctgaatagaccaataacaggctctgaaattgtggcaataatcaatagtttaccaaccaaaaagagtccaggaccagatggattcacagccgaattctaccagaggtacaaggaggaactggtaccattccttctgaaactattccaatcaatagaaaaagagggaatcctccctaactcattttatgaggccagcatcattctgataccaaagccgggcagagacacaaccaaaaaagagaattttagaccaatatccttgatgaacattgatgcaaaaatcctcaataaaatactggcaaaccgaatccagcagcacatcaaaaagcttatccaccatgatcaagtgggcttcatccctgggatgcaaggctggttcaatatacgcaaatcaataaatgtaatccagcatataaacagagccaaagacaaaaaccacatgattatctcaatagatgcagaaaaagcctttgacaaaattcaacaacccttcatgctaaaaactctcaataaattaggtattgatgggaagtatttcaaaataataagagctatctatgacaaacccacagccaatatcatactgaatgggcaaaaactggaagcattccctttgaaaactggcacaagacagggatgccctctctcaccgctcctattcaacatagtgttggaagttctggccagggcaatcaagcaggagaaggaaataaagggtattcagttaggaaaagaggaagtcaaattgtccgtgtttgcagacgacatgattgtttatctagaaaaccccatcgtctcagcccaaaatctccttaagctgataagcaacttcagcaaagtctcaggatacaaaatcaatgtacaaaaatcacaagcattcttatacaccaacaaccgacaaacagagagccaaatcatgagtgaactcccattcacaattgcttcaaagagaataaaatacctaggaatccaacttacaagggatgtgaaggacctcttcaaggagaactacaaaccactgctcaaggaaataaaagaggacacaaacaaatggaagaacattccatgctcatgggtaggaagaatcaatatcgtgaaaatggccatactgcccaaggtaatttacagattcaatgccatccccatcaagctaccaatgactttcttcacagaattggaaaaaactactttaaagttcatatggaaccaaaaaagagcccgcatcgccaagtcaatcctaagccaaaagaacaaagctggaggcatcacactacctgacttcaaactatactacaaggctacagtaaccaaaacagcatggtactggtaccaaaacagagatatagatcaatggaacagaacagagccctcagaaataatgccgcatatctacaactatctgatctttgacaaacctgagaaaaacaagcaatggggaaaggattccctatttaataaatggtgctgggaaaactggctagccatatgtagaaagctgaaactggatcccttccttacaccttatacaaaaatcaattcaagatggattaaagatttaaacgttagacttaaaaccataaaaaccctagaagaaaacctaggcattaccattcaggacataggcgtaggcaaggacttcatgtccaaaacaccaaaagcaatggcaacaaaagccaaaattgacaaatgggatctaattaaactaaagagcttctgcacagcaaaagaaactaccatcagagtgaacaggcaacctacaacatgggagaaaattttcgcaacctactcatctgacaaagggctaatatccagaatctacaatgaactcaaacaaatttacaagaaaaaaacaaacaaccccatcaaaaagtgggcaaaggacatgaacagacacttctcaaaagaagacatttatgcagccaaaaaacacatgaagaaatgctcatcatcactggccatcagagaaatgcaaatcaaaaccactatgagatatcatctcacaccagttagaatggcaatcattaaaaagtcaggaaacaacagacgcacagcaactttaagtttgctgccagctatacgtcatgaaagggaagcttttcatcaaagggaagaagaaaaggaagggggaagaatcctacttttacaaaacagagtaattctttgctcctgctccctttgcccacatctctcacctgcgtccaaaccaaaacacaggggcctaggtcgctttaagtcacaaagcacctctatgttctcaggtgtgctcagcgttcggaattctctgcatgctcctcaggttgtttcctggttgcagcgctaa

SEQ ID NO: 129089 - DNA, 3259 bp, Homo sapiens
atggaggaagatctaccaagcaaatggaaaacaaaaaaaggcaggggttgcaatcctagtctcgataaaacagactttaaaccaacaaagatcaaaagagacaaagaaggccattacataatggtaaagggatcaattcaacaagaggagctaactatcctaaatatttatgcacccaatacaggagcacccagattcataaagcaagtcctgagtgacctacaaagagacttagactcccacacattaataatgggagactttaacaccccactgtcaacattagacagattaatgagacagaaagtcaacaaggatacccaggaattgaactcagctctgcaccaagtggacctaatagacatctacagaactctccaccccaaatcaacagaatatacatttttttcagcaccacaccacacctattccaaaattgaccacatacttggaagtaaagctctcctcagcaaatgtaaaagaacagaaattataacaaactatctctcagaccacagtgcaatcaaactagaactcaggattaagaatctcactcaaagccgctcaactacatggaaactgaacaacctgctcctgaatgactactgggtacataacgaaatgaaggcagaaataaagatgttctttgaaaccaacgagaacaaagacaccacataccagaatctctgggacgcattcaaagcagtgtgtagagggaaatttatagcactaaatgcctacaagagaaagcaggaaagatccaaaattgacaccctaacatcacaattaaaagaactagaaaagcaagagcaaacacgttcaaaagctagcagaaggcaagaaataactaaaatcagagcagaactgaaggaaatagagacacaaaagacccttcaaaaaatcaatgaatccaggagctggttttttgaaaggatcaacaaaattgatagaccgttagcaagactaataaagaaaaaaagagagaagaatcaaatagacacaataaaaaatgataaaggggatatcaccactgatcccacagaaatacaaactaccatcagagaatactacaaacacctctacgcaaataaactagaaaatctagaagaaatggatacattcctcgacacatacactctcccaagactaaaccaggaagaagttgaatctctgaatagaccaataacaggatctgaaattgtggcaataatcaatagtttaccaaccaaaaagagtccaggaccagatggattcacagccgaattctaccagaggtacaaggaggaactgcatataaacagagccaaagacaaaaaccacatgattatctcaatagatgcagaaaaagcctttgacaaaattcaacaacccttcatgctaaaaactctcaataaattaggtattgatgggacgtatttcaaaataataagagctatttatgacaaacccacagccaatatcatactgaatggggccaaaaactggaagcattcccctttgaaaaactggcacaagaacagggatgcccctctctcacccactccctattcaacatagtgttggaagttctggcccgggcaattaggcaggataaggaaataaagggtattcaattaggaaaagaggaagtcaaattgtccctgtttgcagacgacatgactgtatgtatagaaaaccccattgtctcagcccaaaatctccttaagctgataagcaacttcagcaaagtctcaggatacaaaatcaatgtacaaaaatcacaagcattcttatacaccgataacagacaaacagagagccaaatcatgagtgaactcccattcacaattgcttcaaagagaataaaatacctaggaatccaacttacaagggatgtgaaggacctcttcaaggagaactacaaaccactgctcaaggaaataaaagaggatacaaacaaatggaagaacattccatgctcatgggtaggaagaatcaatattgtgaaaattggccataatgcccaaggtaatttatagattcaatgccatccccatcaagctaccaatgcctttcttcacagaattggaaaaaactactttaaagttcatatggaaccaaaaaagagcccgcatcaccaagtcaatcctaagccaaaagaacaaagctggaggcatcacactacctgacttcaaactatactacaaggctacagtaaccaaaacagcatggtactggtaccaaaacagagatatagatcaatggaacagaacagagccctcagaaataacaccgcatatctacaactatctgatctttgacaaacctgagaaaaacaagcaatggggaaaaggattccctattcaataaatggtgctgggaaaactggctagccatatgtagaaagctgaaactggatcccttccttacaccttatacaaaaatgaattcaagatggattaaagacttaaacgttagacctaaaaccataaaaaccctagaagaaaacctaggcattaccattcaggacataggcatgggcaaggacttcatgtctaaaacaccaaaagcaatggcaacaaaagccaaaattgacaaatgggatctaattaaactaaagagcttctgcacagcaaaagaaactaccatcagagtgaacaggcaacctacaaaatgggagaaaattttcccaacctactcatctgacaaagggctaatatccagaatctacaatgaactccaacaaatttacaagaaaaaaacaaacaaccccatcaaaaagtgggcgaaggacatgaacagacacttctcaaaagaagacatttatgcagccaaaaaacacatgaaaaaatgctcatcatcgctggccatcagagaaatgcaaatcaaaaccgcaatgagataccatctcacaccagttagaatggcaatcattaaaaagtcaggaaacaacaggtgctggagaggatgtggagaaataggaacacttttacactgttggtgggaccgtaaactagttcaaccattgtggaagtcagtgtggcgattcctcagggatctagaactagaaataccatttgacccagccatcccattactgggtatatacccaaatgactataaatcatgctgctataaagacacatgcacacagctttcagctgacgagaattgtgctgatagcatttggaggggaagggatgactgcgaacacctctgcatacccactggaggtcaaggttttggggatgaacaggaagtaccagcagggaatgattag

SEQ ID NO: 129090 - DNA, 3509 bp, Homo sapiens
atggagctgaaaaccaaggctcgagaactacgtgaagaatgcagaagcctcaggagcccatgcaatcaactggaagaaagggtatcagcgatggaagatgaaatgaatgaaatgaagcgagaagggaagtttagagataaaagaataaaaagaaatgagcaaagcctccaagaaatatgggactttgtgaaaagaccaaatctacgtctgattggtgtacctgaaagtgatggggagaatggaaccaagttggaaaacactctgcaggatattatccaggagaacttccccaatctagcaaggcaggccaacattcagattcaggaaatacagagaacgccacaaagatactcctcgagaagagcaactccaagacacataattgtcagattcaccaaagttgaaatgaaggaaaaaatgttaagggcagccagagagaaagcaccacaccacacctattccaaaattgaccacatacttggaagtaaagttctcctcagcaaatgtaaaagaacagaaattataacaaactatctctcagaccacagtgcaatcaaactagaactcaggataaagaatctcactcaaaaccactcaactacatggaaactgaacagcctgctcctgaatgactactgggtacacaacgaaatgaaggcagaaataaagatgttctttgaaaccaacgagaacaaagacacaacataccagaatctctgggacacattcaaagcagtgtgtagagggaagtttatagcactaaatgcccacaagagaaagcaggaaagatccaaaattgacaccctaacatcacaattaaaagaactagaaaagcaagagcaaacacattcaaaagctagcagaaggcaagaaataactaagatcagaggagaactgaaggaaatagaggcacaaaaaacccttcaaaaaatcaatgaatacaggagctggttttttgaaaggatcaacaaaatagatagaccgctagcaagactaataaagaaaaaaagagagaagaatcaaatagacacaataaaaaatgataaaggggatatcaccactgatcccacagaaatacaaattaccatcagagaatactacaaacacctctacgcaaataaactagaaaatctagaagaaatggataaattcctcgacacatacactctcccaagactaaaccaggaagtagttgaatctctgaagagaccaataacaggagctgaaattgtggcaataatcaatagcttaccaaccaaaaagagtccaggaccagatggattcacagccgaattctaccagaggtacaaggaggaactgcatcatcctgataccaaagcctggcagagacacaacaaaaaaaagagaattttagaccaatatccttgatgaacattgatgcaaaaatcctcaataaaatactggcaaaccgaatccagcagcacatcaaaaagcttatccaccatgatcaagtgggcttcatccctgggatgcaaggctggttgaatatatgcaaatcaataaatgtaatccagcatataaacagagccaaagacaaaaaccacatgattatctcaatagatgcagaaaaagcctttgacaaaattcaacaacccttcatgctaaaaactctcaataaattaggtattgatgggatgtatttcaaaataataagagctatctatgacaaacccacagccaatatcatactgaatgggcaaaaactggaagcattccctttggaaactggcacaagacagggatgccctctctcaccactcctattcaacatagtgttggaagttctggccagggcaattaggcaggagaaggaaataaagggtattcaattaggaaaagaggaagtcaaattgtccctgtttgcagatgacatgattgtatatctagaaaaccccattgtctcagcccaaaatctccttaagctgataagcaacttcagcaaagtctcaggatacaaaatcaatgtgcaaaaatcacaagcattcttatacaccaacaacagacaaacagagagacaaatcatgagtgaactcccattcacaattgcttcaaagagaataaaatacctaggaatccaacttacaagggatgtgaaggacctcttcaaggagaactacaaaccactgctcaaggaaataaaagaggatacaaacaaatggaagaacattccatgctcatgggtaggaggaagaatcaatctcgtgaaaatggccatactgcccaaggtaatttacagattcaatgccatccccatcaagctaccaatgactttcttcacagaattggaaaaaactactttaaagttcatatggaaccaaaagagagccctcattgccaagtcatccctaagccaaaagaacaaaactggaggcatcacgctacctgacttcaaactatactacaaggctacagtaaccaaaacatcatggtactggtaccaaaacagagatatagatcaatggaacagaacagagccctcagaaataatgccacatatctacaactatctgatctttgacaaacctgacaaaaacaagcaatggggaaaggattccctatttaataaatggtgctgggaaaactggctagccatatgtacaaagctgaaactggatcccttccttacaccttatacaaaaatcaattcaagatggatcaaagatttaaacgttagacctaaaaccataaaaaccctagaagaaaacctaggcattaccattcaggacataggcgtgggcaaggacttcatgtccaaaacaccaaaagcaatggcaaccaaagccaaaattgacaaatgggatctaattaaactaaagagcttctacacagcaaaagaaactaccatcagagtgaacaggcaacctacagaatgggagaaaatttttgcaacctactcatctgacaaagggctaatatccagaatctacaatgaactcaaacaaatttacaagaaaaaaacaaacaaccccatcaaaaagtgggcgagggacatgaacagacacttctcaaaaaaagacatttatgcagccaaaaaacacatgaaaaaatgctcatcatcactggccatcagagaaatgcaaatcaaaaccactatgagatatcatctcacaccagttagaatggcaatcattaaaaagtcaggaaacaacagaatcagaaggcatttccagccaagatcagccatgttcttctgctgctgccctgggggcgagggctcagggctgcagtgggagctgctgctggcagcatggactgtgctcccctacccctgccctgcagccacagttgggagattcctcaagcaggcacagactgctgaccattccttcctgggccatgtttggagggtgcccagcagcaggagctggactgataaagaaatcctgagcttggtcgtcaacagacagaaccaggaagttgtgcagctcatagggggcctctgtgggacacacaccatctcgcccacacagcacccagccacgggttga

SEQ ID NO: 129091 - DNA, 4787 bp, Homo sapiens
atgtaccaagcaaatggaaaacaaaaaaaggcaggggttgcaatcctagtctctgataaaacagactttaaaccaacaaagatcaaaagagacaaagaaggccattacataatggtaaagggatcaattcaacaagaagagctaactatcctaaatatatatgcacccaatacaggagcacccacattcatacagcaagtcctgagtgatctacaaagagacttagactcccacacattaataataggagactttaacaccccactgtcaacatcagacagatcaacgagacagaaagtcaacaaggatacccaggaattgaactcagctctgcaccaagcagacctaatagacatctacagaaccctccaccccaaatcaacagaatatacatttttttcagcaccacaccacacctattccaaaattgaccacatacttggaagtaaagcactcctcagcaaatgtaaaagaacagaaattataacaaactatctctcagaccacagtgcaatcaaactagaactcatgattaagaatctcactcaaaaccactcaaccatatggaaactgaacaacctgctcctgaatgactactgggtacataaggaaatgaaggcagaaataaagatgttctttgaaaccaacgagaacaaagacacaacataccagaatctctgggacacattcaaagcagtgtgtagagggaaatttatagcactaaatgcccacaagagaaagcaggaaagatccaaaattgacaccctaacatcacaattaaaagaactagaaaagcaagagcaaacactttcaaaagctagcagaaggcaagaaataactaaaatcagagcagaactgaaggaaatagagacacaaaaaacccttcaaaaaattaacgaatccaggagcaggttttttgaaaggatcaacaaaattgatagcctgctagcaagactaataaagaaaaaaagagagaagaatcaaatagatgcaataaaaaatgataaaggggatatcaccaccaatcccacagaaatacaaactaccatcagagaatactacaaacacctctacgcaaataaactagaaaatctagaagaaatggataaattcctcgacacatacactctcccaagactaaaccaggaagaagttgaatctctgaatagaccaataacgggagctgaaattgtggcaataatcaatagcttaccaaccaaaaagagtccaggaccagatggattcacagccgaattctaccagaggtacaaggaggaacaggtaccattccttctgaaactattccaatcaatagaaaaagagggaatcctccctaactcattttatgtgtccagcatcatcctgataccaaagccgggcagagacacaaccaaaagagagaattttagaccaatatccttgatgaacattgatgcaaaaatcctcaataaaatactggcaaaccgaatccagcagcacatcaaaaagcttatccaccatgatcaagtgggcttcatccctgggatgcaaggctggttcaatatatgcaaatcaataaatgtaatccagcatataaacagaaccaaagacaaaaaccacatgattatctcaatagatgcagaaaaggcctttgacaaaattcaacaacctttcatgctaaaaactctcaataaattagatattgatgggttggaagttctggccagggcaatcaggcaggagaaggaaataaagggcattcaatcaggaaaagaggaagtcaaattgtccctgtttgcagatgacatgattgcatatctagaaaaccccatcgtctcagcccaaaatctccttaagctgataagcaacttcaacaaagtctcaggatacaaaatcaatgtgcaaaaatcacaagcattcttatgcaccaataacagacaaacagaaagccaaatcatgagtgaactcccattcacaattgcttcaaagagaataaaatacctaggaatccaacttacaagggatgtgaaggacctccttcaaggagacctacaaaccactgctcaatgaaataaaagaagatacaaacaaatggaacaacattccatgctcatgggtaggaagaatcaatatcatgaaaatggccatactgcccaaggtaatttatagattcagtgccatcgccatcaagctaccaatgactttcttcacagaactggaaaaaactactttaaagttcatatggaaccaaaaaagagcccgcattgccaagtcaatcctaagccaaaagaacaaagccggaggcatcatgctacctgacttcaaactatactacaaggctacagtaaccaaaacagcatggtactggtaccaaaacagagatattgatcaatggagcagaacagagccctcagaaataacaccgcatacctacaactatctgatctttgacaaacctgagaaaaacaagcaatggggaaaggattccctatttaataaatggtgctgggaaaactggctagccatatgtagaaagctgaaactggatcccttccttacaccttatacaaaaatcaattcaagatggattaaagatttaaatgttagacctaaaaccataaaaaccctagaagaaaacctaggcattaccattcaggacataggcatgggcaaggacttcatgtccaaaacaccaaaagcaatggcaacaaaagccaaaattgacaaatgggatctaattaaactaaagagcttctgcacagcaaaagaaactaccatcagagtgaacaggcaacctacaacatgggagaaaattttcacaacctactcatctgacaaagggctaatatccagaatctacaatgaactcaaacaaatttacaagaaaaaaacaaacaaccccatcaaaaagtgggtgaaggacatgaacagacacttctcaaaagaagatatttatgcagccaaaaaacacatgaaaaaatgctcatcatcactggccatcagagaaatgcaaatcaaaagcttccagaggaaggatcaggcagcaatatttgctattctgcagcctccactggtgataaccaggcaaacagggtctggagtggacctgaagcaaactccaacagacctgaagctgagggacctaactgttagaagaaaaatgaacaaacagaaaggacatccacaccaaaaccccatctctagcagaagacaagaaataactaagatcagagcagaactgaagaagatagagacacaaaaacccttcaaaaaaatcaatgaatccaggagctggttttttgaaaagatcaacaaaattgatagactgctagcaagactaataaagaagaaaatagagaagaatcaaatagatgcaataaaaaatgataaagggaatatcaccaccaatcccacagaaatacaaactaccatcagagaatactataaacacctctatgcaaataaactagaacacctagaagaaatggataaattcctggacatatacaccctcccaagactaaaccaggaagaagttgaatctgtgaatagaccaataacaggttctgaaattgaggcaataattaatagtctaccaaccaaaaaaagtccaggaccagacagattcacagctgaactctaccagaggtacaaagaggagctggtaccattccttctgaaactattccaatcaatagaaaaagagggaatcctccctaattcattttatgaggccagcatcatcctgatatcaaagcctggcagagacacaacaaaaaaagagaattttagaccaatatccctgatgaacatcgatgcaaaaatcctcaataaaatactggcaaaccaaatccagcagcacatcaaaaagcttatccaccaccatcaagttggcttcatccctgggatgcaaggctggttcaacatactcaaatcaataaacgtaatccatcatataaacagaaccaaagacaaaaaccacatgattatctcaatagaagcagaaaaggcctttgacaaaattcaacagccctttatgctaaaaactctcaataaactaggtattgatgggacatatctgacatatctcaaaataataagagctatttatgacaaacccacagccaatatcatactgaatgggcaaaaactggaagcattcccttttaagactggcacaagacagggatgtcctctctcaccactcctattcaacatagtgttggaagctctggccagggcaatcaggcaagagaaagaaataaagggtattcaattaggaaaagaggatgtcaaattgtccctgtttgcagatgacatgattgtatatttagaaaaccccatcgtctcagcccaaaatctccttaagctgataagcaacttcagcgaagtctcaggatacaaaatcaatgtgcaaaaatcacaagcattcctatacaccaataacagacagacagagagccaaatcatgagtgaactcccattcacaattgcttcaaagagaataaaatacctaggaatacaacttacaagggatgtgaaggacctcttcaaggagaactacaaaccactgctcaatgaaataaaagaggacacaaacaaatggaagaacattccatgctcatggataggaagaatcaatattgtgaaaatggccatactgcccaagactctcaatcagaaattctcatactggttcagagtcaacaaacactacattcaccagaggacttttcccctcaaagagacagaattcaacaccatagcaacgctttataatggtgcttctccagcacagcaccaaaaag

SEQ ID NO: 129092 - DNA, 6506 bp, Homo sapiens
atggtgaagggatcaattcaacaagaggagctaactatcctaaatatttatgcacccaatacaggagcacccagattcataaagcaagtcctgagtgacctacaaagagacttagactcccacacattaataatgggagactttaacaccccactgtcaacattagacagatcaacgagacagaaagtcaacaaggatacccaggaattgaactcagctctgcaccaagcagacctaatagacatcaacagaactctccaccccaaatcaacagagtatacatttttttcagcaccacaccacacctattccaaaattgaccacatagttggaagtaaagctctcctcagcaaatgtaaaagaacagaaattataacaaactatctctcagaccacagtgcaatcaaactagaactcaggattaagaatctcactcaaagccgctcaactccatggaaactgaacaacctgctcctgaatgactactgggtacataacgaaatgaaggcagaaataaagatgttctttgaaaccaacaagaacaaagacaccacataccagaatctctgggacgcattcaaagcagtgtgtagagggaaatttatagcactaaatgcctacaagagaaagcaggaaagatccaaaattgacaccctaacatcacaattaaaagaactagaaaagcaagagcaaacacattcaaaagctagcagaaggcaagaaataacgaaaatcagagcagaactgaaggaaatagagacacaaaaaacccttcaaaaaatcaatgaatccaggagctggttttttgaaaggatcaacaaaattgatagaccgctagcaagactaataaagaaaaaaagagagaagaatcaaatagacacaataaaaaatgataaaggggatatcaccaccgatcccacagaaatacaaactaccatcagagaatactacaaacacctctacgcaaataaactagaaaatctagaagaaatggatacattcctcgacacatacactctcccaagactaaaccaggaagaagttgaatctctgaatagaccaataacaggctctgaaattgtggcaataatcaatagtttaccaaccaaaaagagtccaggaccagatggattcacagccgaattctaccagaggtacaaggaggaactgcatataaacagagccaaagacaaaaaccacatgattatctcaatagatgcagaaaaggcctttgacaaaattcaacaacgcttcatgctaaaaactctcaataaattagtgttggaagttctggccagggcaattaggcaggagaaggaaataaagggtattcaattaggaaaagaggaagtcaaattttccctgtttgcagacgacatgattgtatatctagaaaaccccattgtctcagcccaaaatctccttaagctgataagcaacttcagcaaagtctcaggatacaaaatcaatgtacaaaaatcacaagcattcttatacaccaacaacagacaaacagagagccaaatcatgagtgaactcccattcataattgcttcaaagagaataaaatacctaggaatccaacttacaagggatgtgaaggacctcttcaaggagaactacaaaccactgctcaaggaaataaaagaggatacaaacaaatgcaagaacattccatgctcatgggtaggaagaatcaatatcgtgaaaatggccatactgcccaaggtaatttacagattcaatgccatccccatcaagctaccaatgcctttcttcacagaattggaaaaaactactttaaagttcatatggaaccaaaaaagagcccgcatcgccaagtcaatcctaagccaaaagaacaaagctggaggcatcatgctacctgacttcaaaccatactacaaggctacagtaaccaaaacagcatggtactggtaccaaaagagagatatagatcagtggaacagaacagagccctcagaaataacgccgcatatctacaactatctgatctttgacaaacctgagaaaaacaagcaatggggaaaggattccctatttaataaatggtgctgggaaaactggctggccatatgtagaaagctgaaactggatcccttccttacaccttatacaaaaatcaattcaagatggattaaagacttaaacgttagacctaaaaccataaaaaccctagaagaaaacctaggcaataccattcaggacataggcatgggcaaggacttcatgtctaaaacaccaaaagcaatggcaacaaaagacaaaattgacaaatgggatctaattaaacttaagagcttctgtacagcaaaagaaactaccatcagagtgaacaggcaacctacaaaatgggagaaaattttcacaacatactcatctgacaaagggctaatatccagaatctacaatgaactcaaacaaatttacaagaaaaaaacaaacaaccccatcaaaaagtgggcaaaggatatgaacagacacttctcaaaagaagacatttatacagccaaaagacacatgaaaaaatgctcatcatcactagccatcagagaaattcaaatcaaacccacaatgagatactatctcacaccagttagaatggcgatcattaaaaagtcaggaaacaacaggtcacagcttcaaaatattgttcagagaacttgcagtgaaagcaacataaaaaggagagcagggatagaaaaaggaatccagtgggcaaaagatgccaactgttcccaagagagtccagtgcgaccatcgcaacaggtgggtgcccctctgggacgaagcttccagaggaaggatcaggcagcaatatttgctgttctgcagcctctgctggtgatacccaggcaaacaaggtctggagtggacctccagcacattccagcaggcctgcagcagaggggcctgactgttagaagaaaaactaacaaacagaaaggaatagcatcaacatcaacaaaagccacatccacacagaaaccccatccaaaagtcaccaacatcaaagaccaaagtattggaagttctggccagggcaatcaggcaagagaaagaaataaagggtattcaattaggaaatgaggaagtcaaattgtccctgcttgcagatgacatgattgtatatttagaaaaccccatcatctcagcccaaaatctccttaagctgataagcaagttcagcaaagtctcaggatacaaaatcaatgcgcaaaaatcacaagcattcctatacaccaataacagacaaacagagagccaaatcatgagtgaactcccattcacaattgctacaaggagaataaaatacctaggaatccaacttaacaagggatgtgaaggacctcttcaaggagaactacaaactactcactgatcaaggaaataagagaggacacaaacaaatggaaaaacattccatgctcatggataggaagaatgaatatcatgaaaatggccatactgcccaaagtaatttacagattcaagtttccattgacaacagatcaagaaaatgtggtcagattaacgagacagaaagttaacaagggtatccaggaattgaactcagctctgccccgagtggacctaatagacatctacagaactctccagcccaaatcaacagaatatacattcttttcagtaccacaccacaactattccaaaattgaccacatagttggaagtaaagcactcctcagcaaatgtaaaagaacagaaattataacaaactgtctctcagaccacagtgcaatcaaactagaactcaggattaagaagcacactcaaaaccgctcaactacatggaaactgaacaacctgctcctgaatgactactgggtacataacaaaatgaaggcagaaataaagatgttctttgaaaccaatgagaacaaagacacaacataccaaaatctctgggacacattcaaagcagtatgtagagggaaatttatagcactaaatgcccacaagagaaagcaggaaagatctaaaattgacaccctaacatcacaattaaaagaactagaaaagcaagagcaaacacattcaaaagctagcagaaggcaacaaataactaagatcagagcagaactgaaggaaatagagacacaaaaaaacccttcaaaaaatcaatgaatccaggagctggttttttgaaaggatcaacaaaattgatagaccgctagcaagactaataaagaagaaaagagagaagaatcaaatagacgcaataaaaaatgataaaggggatatcactaccagtcccacagaaatacaaacaaccatcagagaatactacaaacacctctacgcaaataaactagaagatctagaagaactggataaattcctcgaaacatacaccctcccaagactaaaccaggaagaaggtgactctctgaatagaccaataacaggatctgaaattgtggcaataatcaatagcttgccaaccaaaaagagtccaggaccagatggattcacagccgaattctaccagaggtacaaggaggaactggtaccattccttctgaaacgattccaatcaatagaaaaagagggaatcctccctaactcattttatgaggccaacatcatcctgataccaaagtcggccagagacacaaccaaaaaagataattttaggccaatatccttgatgaaccttgatgcaaaaatcctcaataaaatactggcaaaacgaatccagcagcacatcaaaaagcttatccaccatgatcaagtgggcttcatccctgggatgcaaggctgtgttggaagttctggccagggcaattaggcaggagaaggaaataaagggtattcaattaggaaaagaggaagtcaaattgtccctgtttgcagatgacatgattgtatatctagaaaaccccattgtctcagcccaaaatctccttaagctgataagcaacttcagcaaagtctcaggatacaaaatcaatgtacagaaatcacaagcattcttatacaccaataacagacaaacagagagccaaatcatgagtgaactcccattcacaattgcttcaaagagaataaaatacctaggaatccaacttacaagggatgtgaaggacctcttcaaggagaactacaaaccactgctcaatgaaataaaagaggatacaaacaaatggaagaacattccatgctcatgggtaggaagaatcaatatcgtgaaaatggccatactgcccaaggtaatttatagattcaatgccatccccatcaagctaccaatgactttcttcacagaattggaaaaaactactttaaagttcatatggaaccaaaaaagatcctgcatcgccaagtcaatcctaagccaaaagaacaaagctggaggcatcacactacctgacttcaaactatactacaaggctacagtaaccaaaacagcatggtactggtaccaaaacggagatatagatcaatggaacagaacagagccctcagaaataacgccgcacatctacaactatctgatctttgacaaacctgagaaaaacaagcaatggggaaaggattccctatttaataaatggtgctgtgaaaactggctagccatatatagaaagctgaaactggatcccttctttacaccttatacaaaaatcaattcaagatggactaaagacttaaatgttagacctaaaaccataaaaaccctagaagaaaacctaggcattaccattcaggacataggcatgggcaaggacttcatgtctaaaacaccaaaagcaacggcagcaaaagcccaaattgacaaatgggatctaattaaactaaagagcttctgcacagcaaaagaaactaccatcagagtgaataggcaacctacaaaatgggaggaaattttcgcaacctactcatctgacaaagggctgatatccagaatctacaatgaactcaaacaaatttacaagaaaaaaacaaacaaccccatcaaaaaaataaaagctggagagtgcagttttttagctgctgaagattctgagctgtgctgtagattagctagacattacaaaaagcccctcctgagtcagctaaacagtgaaatgaagttcctcaaagttggtttagcactgttaacgtggacccagaataaagttgagaaaagtcagctaccaattgaagaaaattctcagctttatggggcttatgtggttagatcccagaatggtacatccatcgacagcttgcactgtgcacctggagaagccacagatactcaatgccagcctgtgaaagcagccaggaaggaggctgtaccctgcaaagccacaggggtggagctgcccaagaccatgggaacccgcctcttgcatcagcatgacccagatgtgagacctggcgtcaaaggagatcattttggagctttaaggtttgactgccctgatggatttcggacttgcgtgtggctggtacatgctaaagatgcagacttttag

SEQ ID NO: 129093 - DNA, 7643 bp, Homo sapiens
atggagctgaaaaccaaggctcgagaactacgtgaagaatgcagaagcctcaggagccgacgcaatcaactggaagaaagggtatcagcaatggaagatgaaatgaatgaaatgaagcgagaagggaagtttagagaaaaaagaataaaaagaaatgagcaaagcctccaagaaatatgggactatgtgaaaagaccaaatctacgtctgattggtgtacctgaaagtgatgcggagaatggaaccaagttggaaaacactctgcaggatattatccaggaggacttccccaatctagcaaggcaggccaacgttcagattcaggaaatacagagaacgccacaaagatactcctcgagaagagcaactccaagacacataattgtcagattcaccaaagttgaaatgaagcaaaaaatgttaagggcagccagagagaaagactttaaaccaacaaagatcaaaagagacaaagaaggccattacataatggtaaagggatcaattcaacaagaggagctaactatcctaaatatatatgcacccaatacaggagcacccagattcataaagcaagtcctgagtgacctacaaagagacttagactcccacacattaataatgggagactttaacaccccactgtcaacattagacagatcaacaagacagaaagtcaacaaggatacccaggaattgaactcagctctgcaccaagcagacctaatagacatctacagaactctccaccccaaatcaacagaatatacatttttttcagcaccacaccacacctattccaaaattgaccacatagttggaagtaaagctctcctcagcaaatgtaaaagaacacaaattataacaaactatctctcagaccacagtgcaatcaaactagaactcaggattaagaatctcactcaaagccgctcaactacatggaaactgaacaacctgctcctgaatgactacttgggtacataacgaaatgaaggcagaaataaagatgttctttgaaaccaacgagaacaaagacacgacataccagaatctctgggacgcattcaaagcagtgtgtagagggaaatttctagcactaaatgcccacaagagaaagcaggaaagatccaaaattgacaccctaacatcacaattaaaagaacaagaaaagcaagagcaaacacattcaaaagctagcagaaggcaagaaataactaaaatcagagcagaactgaaggaaatagagacacaaaaaaacctttcaaaaaatcaatgaatccaggagctggttttttgaaaggatcaacaaaattgatagaccgctagcaagactaataaagaaaaaaagagagaagaatcaaatagacacaataaaaaatgataaaggggatatcaccaaccgatcccacagaaatacacactaccatcagagaatactataaaaacctctacgcaaagaaactagaaaatctagaagaaatggataaattcctggagacatacaccctcccaagaccaaaccaggaagaagttgaatctctgaatagaccaataacaggatctgaaattgtggcaataatcaatagcttaccaaccaaaaagagtccaggaccagatggattcacagccgaattctaccagaggtacaaggaggaactggtaccattccttctgaaactattccaatcaatagaaaaagaaggaatcctccctaactcatttgatgaggccagcatcatcctgataccaaagctgggcagagacacaaccaaaaaagagaattttagaccaatacccttgatgaacactgatgcaaaaatcctcaataaaatactggcaaaccgaatccagcagcacatcaaaaagcttatccaccatgatcaagtgggcttcatccctgggatgcaaggctggttcaatgtacgcaaatcgataaatgtaatccagcatataaacagaaccaacgacaaaaaccacatgattatctcaatagatggagaaaaggcctttgacaaaattcaacaacccttcatgctaaaaactctcaataaattcggtattgatgggatgtatctcaaaataataagagctatctatgacaaactcacagccaatatcatactgaatgggcaaaaatgggaagcattccctttgaaaactggcacaagacagggatgccctctctcaccactcctattcaacatagtgttggaagttctggccagggcaattaggcaggagaaggaaaccaagggtattcaattaggaaaagaggaagtcaaattgtccctgtttgcagatgacatgattgtatatctagaaaaccccattgtctcagcccaaaatctccttaagctgataagcaacttcagcaaagtctcaggatacaaaatcaatgtacaaaaatcacaagcattcttatacaccaataacagacaaacagagagccaaatcatgagtgaactcccagttcacaattgcttcaaagagaataaaatacctaggaatccaacttacaagggatgtgaaggacctcttcaaggagaactacaaaccactgctcaaggaaataaaagaggatacaaacaaatggaagaacattccatgctcatgggtaggaagaatcaatatcgtgaaaatggccatactgcccaaggtaatttacagattcaatgccatccccatcaagctaccaatgactttcttcacagaattggaaaaaaactactttaaagttcatatggaaccaaaaaagagccctggcaaaaaattgccaagtcaatcctaagccaaaagaacaaagctagaggcatcacgctacctgacttcaaactatactacaaggctacagtaaccaaaacagcatggcactggtaccaaaacagcatggtactggtaccaaaacagagatatagatcaatggaacagaacagagccctcagaaataatgccgcatatctacactattctgatcctttggacaaacctttgcttgagaaaaacaagcaatggggaaaggattccctaatttataaaatggctgctggggaaaactggctagcccatatgtaggaagctgaacctggcatcccttcccttaccccttatacaaaaatcaattcaagatggattaaagatttaaacgttagacctaaaaccataaaaaccctagaagaaaacctaggcattaccattcaggacataggcgtgggcaaggacttcatgtccaaaacaccaaaagcaatggcaacaaaagccaaagttgacaaatgggatctaattaaactaaagagcttctgcacatctgcacagcaaaagaaactaccatcagagtgaacaggcaacctacaacatgggagaaaatttttgcaacctactcatctgacaaagggctaatatccagaatctacaatgaactcaaacaaatttacaagaaaaaaacaaacaaccccatcaaaaagtgggcgaaggacatgaacagacacttctcaaaagaagacatttatgcagccaaaaaacacatgaaaaaaatgctcatcatcactggccatcagagaaatgcaaatcaaaaccactatgagatatcatctcacaccagttagaatggcaatcattaaaaagtcaggaaacaacagagatcagagagctgggaagatcagtgaaagacttgtgattacctcagaaatgattgaaaatatccaatctgttaaggcatactgctgggaagaagcaatggaaaaaatgattgaaaacttaagacaaacagaactgaaactgactcggaaggcagcctatgtgagatacttcaatagctcagccttcttcttctcagggttctttgtggtgtttttatctgtgcttccctatgcactaatcaaaggaatcatcctccggaaaatattcaccaccatctcattctgcattgttctgcgcatggcggtcactcggcaatttccctgggctgtacaaacatggtatgactctcttggagcaataaacaaaatacaggatttcttacaaaagcaagaatataagacattggaatataacttaacgactacagaagtagtgatggagaatgtaacagccttctgggaggagggatttggggaattatttgagaaagcaaaacaaaacaataacaatagaaaaacttctaatggtgatgacagcctcttcttcagtaatttctcacttcttggtactcctgtcctgaaagatattaatttcaagatagaaagaggacagttgttggcggttgctggatccactggagcaggcaagacttcacttctaatggtgattatgggagaactggagccttcagagggtaaaattaagcacagtggaagaatttcattctgttctcagttttcctggattatgcctggcaccattaaagaaaatatcatctttggtgtttcctatgatgaatatagatacagaagcgtcatcaaagcatgccaactagaagaggacatctccaagtttgcagagaaagacaatatagttcttggagaaggtggaatcacactgagtggaggtcaacgagcaagaatttctttagcaagagcagtatacaaagatgctgatttgtatttattagactctccttttggatacctagatgttttaacagaaaaagaaatatttgaaagctgtgtctgtaaactgatggctaacaaaactaggattttggtcacttctaaaatggaacatttaaagaaagctgacaaaatattaattttgcatgaaggtagcagctatttttatgggacattttcagaactccaaaatctacagccagactttagctcaaaactcatgggatgtgattctttcgaccaatttagtgcagaaagaagaaattcaatcctaactgagaccttacaccgtttctcattagaaggagatgctcctgtctcctggacagaaacaaaaaaacaatcttttaaacagactggagagtttggggaaaaaaggaagaattctattctcaatccaatcaactctatacgaaaattttccattgtgcaaaagactcccttacaaatgaatggcatcgaagaggattctgatgagcctttagagagaaggctgtccttagtaccagattctgagcagggagaggcgatactgcctcgcatcagcgtgatcagcactggccccacgcttcaggcacgaaggaggcagtctgtcctgaacctgatgacacactcagttaaccaaggtcagaacattcaccgaaagacaacagcatccacacgaaaagtgtcactggcccctcaggcaaacttgactgaactggatatatattcaagaaggttatctcaagaaactggcttggaaataagtgaagaaattaacgaagaagacttaaaggagtgcttttttgatgatatggagagcataccagcagtgactacatggaacacataccttcgatatattactgtccacaagagcttaatttttgtgctaatttggtgcttagtaatttttctggcagagtgggctcctgtgcggcccgagcctccccgatgagcaccaccccctgctccacggcacccagtcccatcgaccacccaagggctgaggaatgtgagcgcacggcgcaggactggcaggcagctccacctgcagccccggtgtgggatccactaggtgaagccagctgggctcctgagtctggaactaacatttccattacacctggaaatgccacatttgtgacccgggtgcagggacaggcttggtttgcctcatgtatcactggtcatgatatgtctagtttaaaaacttccagtgtcgtggtattaaggagacaatctgaggcacttctaccagccaatttgacatgcaattggcaagattcttctgcccttgccaccttagaaagtgccctgtcccaggtcagacacaaaagattcacatttacacttatggtctttacaggctcagccatagtcattatggcaactgttagcattgctgttgtatctattactgaatcagtacaaacaactgcttttgtagataatctggccaaaaatatatgtgatgaacttctcctacaggacatggatgaagctggaaaccaacattctcagcaaaataacacaagaacagaaaaccaaacaccacatgttctcactcataagtgggagttgaacaatgagaacatacggatacagggaggggaacattacatactggggcctgttggtggcaggttgccaacatccaaactcgctgttgattgccagctcctgctccttgcagcagcccagcatgctctctgctggtgccaaaatacccttccaccaaaccccgctaacttctggaactgtcctagagggtttcctaccctagcaagtgagcttgcctatgtcagccctaaccttgctcttgtcattcagctgagccagaggaaaaaatttgagctattctggggtggtctacagagaaccatcttctttcccttcagtgttctcagaatattgactgttgatgaacaagccaatgatgtgagtgtggctgcagcaaggacccttcaaattttcagagatgacatgattgtatatctagaaaaccccattgtctcagcccaaaatctccttaagctgataagcaacttcagcaaaatctcaggatacaaaatcaatgtacaaaaatcacaagcattcttatacaccaacaacagacaaacagagagccaaatcatgagtgaactcccattcacaactgcttcaaagagaataaaatacctaggaatccaacttacaagggatgtgaaggacctcttcaaggagaactacaaatcactgctcaaggaaataaaagaggatacaaacaaatggaagaacattccatgctcatgggtaggaaaaatcaatatcgtgaaaatggccatactgcccaaggtaatttacagattcagtgccatccccatcaagctaccaatgactttcttcacagaattggaaaaaactactttaaagttcatatggaaccaaaaaagagcccacactgccaagtcaatcctaagtcaaaagaacaaagctggaggcatcacactacctgacttcaaactatactacaaggctacagtaaccaaaacagcatggtactggtaccaaaacagagatatagatcaatggaacagaacagagccctcagaaataacgctgcttatctacaactatctgatctttgacaaacctgagaaaaacaagcaatggggaaaggattccctatttaataaatggtgctgggaaaactggctagccatatgtaggaagctgaaactggatcccttccttataccttatacaaaaatcaattcaagatggattaaagacttaaatgttagacctaaaaccataaaaaccctagaagaaaacctaggcattaccattcaggacataggcatgggcaaggacttcttgtctaaaacaccaaaagcaatggcaacaaaagacaaaattgacaaatgggatctgattaaactaaagagcttctgcacagccaaagaaactaccatcagagtgaacaggcaacctacaaaatgggaaaaaattttcgcaacctactcatgtgaaaaagggctaatatccagaatctacaatgaactcaaataa

SEQ ID NO: 129094 - DNA, 4557 bp, Homo sapiens
atggggaaaaaacagaacagaaaaactggaaactctaaaaagcagagcgcctctcctcctccaaaggaacgcagttcctcaccagcaacggaacaaagctggatggagaatgactttgacgagatgagagaagaaggcttcagacgatcaaattactctgagctacgggaggacattcaaaccaaaggcaaagaagttgaaaactttgaaaaaaatttagaagaatgtataactagaataaccaatacagagaagtgcttaaaggagctgatggagctgaaaaccaaggctcgagaactacgtgaagaatgcagaagcctcaggagccgatgcgatcaactggaagaaagggtatcagtgatggaagatgaaatgaatgaaatgaatgatggggagaatggaaccaagttggaaaacactctgcaggatattatccaggagaacttccccaatctagcaaggcaggccaacgttcagattcaggaaatacagagaacgccacaaagatactcctcgagaagagcaactccaagacacataattgtcagattcaccaaagtggaaatgaaggaaaaaatgttaagggcagccagagagaaagactttaaaccaacaaagatcaaaagagaaaaagaaggccattacataatggtaaagggatcaattcaacaagaagagctaactatcctaaaaatatatgcacccaatacaggagcaccaagattcacaaagcaagtcctgagtgacctacaaagagacttagactcccacacattaataatgggagactttaacaccccactgtcaacattagacacatcaacgagacagaaagtcaagaaggatacccaggaattgaactcagctctgcaccaagcggacctaatagacatctacagagctctccaccccaaatcaacagaatatacatttttttcagcaccacaccacacctattccaaaattgaccacatagttggaagtaaagctctcctcagcaaatgtaaaagaacagaaattataacaaactatctctcagaccacagtgcaatcaaactagaactcaggattaagaatctcactcaaaaccactcaactacatggaaactgaacaacctgctcctgaatgactactgggtacataacgaagtgaaggcagaaataaaggtgttctttgaaacgaaggagaacaaagacacaacataccagaatctctgggacgcattcaaagcagtgtgtagagggaaatttatagcactaaatgcccacaagagaaagcaggaaagatccaaaattgacaccctaacatcacaattaaaagaactagaaaagcaagagcaaacacattcaaaagctagcagaaggcaagaaataactaatatcagagcagaactgaaggaaatagagacacaaaaaacccttcaaaaaattaatgaatccaggagctgaaatacaaactaccatcagggaatactacaaacacctctatgcaaataaactagaaaatctagaagaaatggataaattcctggacacatacactctcccaagactaaaccaggaagaagttgaatccctgaatagaccaataacaggctctgaaattgtggcaataatcaatagcttaccaaccaaaaagattccaggaccagatggattcacagccgaattctaccagaggtacaaggaggaactggtaccattccttctgaaactattccaatcaatagaaaaagagggaatcctccctaactcattttatgaggccagcatcattctgataccaaagccaggcagagacacaacaaaaaaagagaattttagaccaatatccttgatgaacattgatgcaaaaatcctcaataaaatactagcaaaacgaatccagcagcacatcaaaaagcttatcccccatgatcaagtgggcttcatccctgggaatgcaaggctggttcaatatatgcaaatcaataaatgtaatccagcatataaacagaaccaaaggcaaaaaccacatgattatctcaatagatgcagaaaaggcctttgacaaaattcaacaacccttcctgctaaaaactctcaataaattaggtattgatgggacgtatctcaaaataataagagctatctatgacaaacccatagccaatatcatactgaatgggcaaaaactggaagcattccctttgaaaactggcacaagacagggatgccctctctcccccactcctattcaacatagtgttggaagttctggccagggcaattaggcaggagaaggaaataaagggtattcaattaggaaaagaggaagtcaaatttgtccctgttggcagatgacatgatggtatatcttagaaaatcccaatgtctcagccccaaaatcttctttaaggctggttaagcaacttcagcaaaagtcttcaggttacaaaatcaatgtgcaaaaatcaccaagcattcctatacaccaacaacagacaaacagagagccaaatcatgagtgaactcccatttcacaattgcttccaagagaattaaatacctaggaatccaccttacaagggacgtgaaggacctcttcaaggagaactacaaaccactgctcaacgaaataaaaagaggacacaaacaaatggaagaacattccatgctcatgggtaggaagaatcaatattgtgaaaaatggccatacttgcccaaggtaaatttatagattcaatgccatccccatcaagctaccaatgactgttttcacagaattggaaaaaaactactttaaagttcatacggaaccaaaaaaagagcccgtattgccaagtcaatcctaagccaaaagaataaagctggaggaggcatcgtggctacctgacctcaaactataccacaaggttacagtaaccaaaacagcatggtactggtaccaaagacagagataatagatcaatggaacagaacagagccctcagaaataagacaccatacatctacaaccatctgatctttgacaaacctgagaaaaacaagcaatgggggaaaggattccctatttaataaatggtgctgggaaaactggctagccatatgtaggagaaagctgaaactggatcccttccttacaccttatacaaaaattaattcaagatggattaaagacttaaatgttagacctaaaaccataaaaaccctagaagaaaacctaggcaataccattcaggacataggcatgggcaaggacttcatgtctacaacaccaaaagcaatggcaacaaaagccaaaattgacaaatgggatctaattaaactaaagagcttctgcacagcaaaagaaactaccatcacagtgaacaggcaacctacagaatgggagaaaatttttacaatctacccatctgacaaagggctaatatccagaatctacaaagaactcaaacaaatttacaagaaaaaaaaaaaaacaaccccatcaaaaagtggacgaaggcacatgaacagacacttctcaaaagaagacatttatgcagccaaaaaaacacatgaaaaaaatgctcatcatcactggccatcagagaaatgcaaatcaaaaccacagtgagataccatctcacaccagttagaatggcaatcatgaaaaaagtcaggaaacaacagaaccaatgacaaaaaccaagtgattatctcaatagatgcagcaaaggccttcgagaaaattcaacaccccttcatgctaaaaactctcaaatgaattaggtattgatgggacatattcttcaaaataataagagctatctatgacaaacccaccagccagtatcagacttgaatgggcaaaaactaggaaggattccctttgaaaaccggcacaagacaaggatgctctttctcaccactcctactcaacatagtattggaagttctggtcagggcaaacaggcaagagaaagaaagaaagcatattcaaataggaaaagaggaagtcaaattgtctctgtttgcagatgacatgattgtatatttagaaaaccccatcatctcagcccaaaatctccttactctgataagcaacttcggcaaagtttcaggatacaaaatcaatgtgcaaaaatcacaagcattcttatacaccaataacagacaaacagagagccaaatgatgagtgaactcccattcacaattgcttcaaagagaataaaatacctaggaatccaacttacaagggatgtgaaggacctcttcaaggagaactacaaaccactgctcaaggaaataaaagaggatacaaacaaatggaagaacattccacgctcatgggtaggaagaatcaatatcgtgaaaatggccatactgcccaagcaatcactggtgacacctccaggtaaaggagggactgaggcaaataaggtctgcagtggtcccccagcaaactgcagcagcccaattgaagaggggcttgactgtgtcaaagaaaaacaaacaaaaagaaagaaacaacatcaacaacaaaagaccccacaaaaatcccatccgaaggtcagcagcctcaaagatcccag

SEQ ID NO: 129095 - DNA, 1898 bp, Homo sapiens
atgtatagccgctttgatattgtggtcgccgagccgatttgcactttaaccactttcggtaaagaaaccgttgttagtgacagccaaacacgcacaacgaccactgatgacccgctacaggtgctccagcaggtgctggatcgcgcagacattcgcccaacgcataacgaagatttgccatttcagggcggcgcactggggttgtttggctacgatctgggccgccgttttgagtcactgccagacattgcggaacaagatatcgttctgccggatatggcagtgggtatctacgattgggcgctcattgtcgaccaccagcgtcatacagtttctttgctgagtcataatgatgtcaatgcccgtcgggcctggctggaaagccagcaattctcgccgcaggaagatttcacgctcacttccgactggcaatccaatatgacccgcgagcagtacggcgaaaaatttcgccaggtacaggaatatctgcacagcggtgattgctatcaggtgaatctcgcccaacgttttcatgcgacctattctggcgatgaatgccaggcattccttcagcttaatcacggcaaccgcgcgccatttagcgcttttttacgtcttgaacagggtgcaattttaaagctttcgccagagcggtttattctttgtgataatagtgaaatccagacccgcccgattaaaggcacgctaccacgcctgcccgatcctcaggaagatagcaaacaagcagtaaaactggcgaactcagcgaaagatcgtgccgaaaatctgatgattgtcgatttaatgcgtaatgatatcggtcgtgttgccgtagcaggttcggtaaaagtaccagagctgttcgtggtggaacccttccctgccgtgcatcatctggtcagcaccataacggcgcaactaccagaacagttacacgccagcgatctgctgcgcgcagcttttcctggtggctcaataaccggggctccgaaagtacgggctatggaaattatcgacgaactggaaccgcagcgacgcaatgcctggtgcggcacattggctatttgagcttttgcggcaacatggataccagtattactatccgcacgctgactgccattaacggacaaattttctgctctgcgggcggtggaattgtcgccgatagccaggaagaagcggaatatcaggaaacttttgataaagttaatcgtatcctgaagcaactggagaactatcgccgcgcgctgcgcgacctgaaagaagaggtcgctatacggctttcgccgtttgagttatcggcgttctgcagcccgtcgatagcgtccatggctaccaggtaccccaatggtcggcatattccgccggatctgcgtctccccaaggaacgcggtattatcatcgtctttaccggcaatggaaaaggcaaaaccaccgcggcatttggtacggcaacacgcgcagttggtcacggaaaaaaagtaggcgtcgtgcagtttattaaaggcacctggcctaatggcgaacgcaatctgctggagccacatggcgttgagtttcaggtgatggcaacgggctttacctgggatacacaaaaccgcgagtctgataccgccgcctgccgcgaagtctggcaacatgcaaagcggatgcttgctgattcctcactggatatggttttgcttgatgaactgacgtatatggtggcgtatgactatttgccactggaagaagtggtgcaggcgttaaatgaacgtccacatcaacagacggtgattatcacgggtcgtggttgtcatcgggatattcttgaactggcagatacggtaagtgaattacgccccgtcaaacatgcgtttgatgccggtgtaaaagcgcagatagggatcgattattaa

SEQ ID NO: 129096 - DNA, 1626 bp, Homo sapiens
atggggcggctggcgggcggggggctgacccccccacctccctcccggacggaagatagcaaacaagcagtaaaactggcgaactcagcgaaagatcgtgccgaaaatctgatgattgtcgatttaatgcgtaatgatatcggtcgtgttgccgtagcaggttcggtaaaagtaccagagctgttcgtggtggaaccttccctgccgtgcatcatctgctgcaggcccatgggggacctgcaagggaagcaccctggaagtggtcccaagcacacgggcagctatgcatgcctcgacactagccacctcccctgtcatgcagagcttcagctgactccactgtgggccttaggggaaggaaacaccaagatctttgagaccctgaccttagaacagtactgtcacctccctcagtacgtgaccatcgtggtcagactgatgatatggagctctgactctggtgatgacaatgggaagaaggccaacaaccccaaccactgcaactgcatcatagaccagatcttcacaggcgggttgcagtcagacgtcacctgccaagtctgccaagactacacggctctcgtcaaaccaagacttatccaagctgtgagcatgaagatgctgcaccgaggtgacgtggatgcgtcagacagaaatctccccatgagtcgtgaggacagtgatgctcacgctgtggaagcacctgcatcagagtacacctgtgtactgaggccatctggcgtgcgcctcgttctctcaacgtgtgtcctgaatcgacctaggaataggagcgggatctgcagcaatatgaatgtggtctatgacgagcagatcgtgaaggccccttgctccacatgtaaacagtctcaaaacttttcttttgagctactgacagcttttaacaattcagcatactcctatgaacaaaatttggaacatatttgtttctctctacctgattactccagaatctggaaactatttatgagtattcttatggcaatacagttatttgcatcagtgctaactgctggaactggcattgatgttttcactaccgtcaacgttcagcatctggaaagtctgaatgatgtggtcagcggcgtcaccggaattcaggtacgggaaaccgtgcccgatccttttttcgatgccgccgacgacgtggtgctggtggacttgcccccggacgatctgcgccaggctagaaagaaggcaaagtctatattgccgggcagcggacgcgccattgaacattttttccgcaaaggtaatctgatcgccctgcgcgaactggcactgcgccgtactgccgatcgcgttgatgagcaaatgcgcgcctggcgggggcatcctggcgaagagaaagtgtggcacacgcgcgacgcatccttttatgcatcggccataacaccggcagcgaaaaactggtccgcgcagcgcggctggcgtcacggctgggtctttgtggcagatggtgttttccaaaatggccacagtgatatctcccatcccacatcctctttcctgcaaggtgactttgacacttctgttgagaggaagtgtagccccagacttgctgttggaacccagctgctgtgctatcaggaagtccgggctacatga

SEQ ID NO: 129097 - DNA, 1215 bp, Homo sapiens
atgttctgcgtgtccagagcgtcacccagtctcttcaatcgtgtatccaggaatccagcggtcaatgttggtcccgcacggaagcgcataggcgatgtaccagatacaatctgcgcctgcgtctttcagttcgcgacggatttttggttaacagcttccgggtcataccaggctcactcttctgggtcgaatccagtcgcaccgacttccaggccgcgcatcagcttacggcatgcccagaaactgaaattcaaagcattacaggagcgggcaaaagaaaaaattgccgacattgccgagagccgcgaactcacggtggcggagcttgaagatcggttcaccgtcagctttgatgaaaccttaaaaccgtttgtgcgtgatgtttccggcagccgcctgaaagacctgcccaaaccgaacaaaagcgatgatgaaacgcgggcgaacgatgcggttaaccgctacaaattgctgaaaaaagatgcgcgtaccatcgccgcccagcaggtagcaaggctggaatccgccatgtgcctgcgccgccgctggtcgctggaaaacttccagctcttcctggttgagcatccgctggttcgtcacttaacccgccgtctgatttggggcgtttatagcgccgaaaaccagctactggcttgctttcgcgtagcagaagataacagctccagcaccgctgacgatgatcttttcaccctgccggaaggcgatatctctatcggcactcctcacgttctggaaatatcaccaacggatgctgccgccttgctttttgccgactacgaactgctaccaccgttccgccagctcgaccgtaacagctacgccctgacagaagccgagcgcaatgccagtgaactgacccgctgggcaggcagaaaatgcccgagtggtcgggtcatggggctggcgaataaaggctggataaagggcgaaccacaggatggaggctggatcggatggatgatcaaacctttgggtcgctggtcgttaatcatggaaatcgatgaaggctttgcggtaggcatgtcgccagccgaactcagcgctgagcagctcttaagcaagctgtggctatgggaaggcaaagcagaaagatatggctgggggagtaattcaacacaggaagcgcagttctccgtaatcgatgccatcaccgccagcgagctaattaacgatattgaagccctgtttgaataa

SEQ ID NO: 129098 - DNA, 1791 bp, Homo sapiens
atgttccgcccgttccgtgccggagaatatgttgacctgggcggcgtagccggtactgtgctgagtgtgcagattttctccaccaccatgcgtactgcagacggtaaaattatcgttattccgaacggtaaaattattgccggaaatattattaacttctcccgcgagccagttcgccgtaacgaatttattattggcgtggcgtatgattccgatatcgatcaggttaagcagatcctgaccaatattatccagtctgaagatcgcattttgaaagatcgcgaaatgactgtgcgcctgaacgaacttggtgcatcgtcgattaatttcgtggtccgcgtctggagcaacagcggcgatctgcaaaacgtgtactgggatgtgctggagcgtattaaacgtgaatttgatgccgccggtatcagcttcccgtacccgcaaatggatgtgactttaagcggttatggttggcgagaaacgccaaacgtagaagaagttttccaccgctgcggtctggaaggattaagttgccggatgatggaaacctccttctttatgtcgcatgagtcgttgatcctcggcaaacgcccgtggtatttgcgtctgcgcggcaagctgtacttgctgctgcaacgtaatgcgctgcgtgcaccagatcaatttgaaatcccgccaaacagggttatcgaactgggtactcagattaaggttaagaattttcgtctgcgcgaattagccggacctcacgtcttaaatataccaacggatgctgccgcctttggtcagctttttgccgactacgaactgctaccaccgttccgccagctcgaccgtaacagctacgccctgacagaagccgagcgcaatgccagtgaactgacccgctgggcaggcagaaaatgcccgagtggtcgggtcatggggctggcgaataaaggctggataaagggcgaaccacaggatggaggctggatcggatggatgatcaaacctttgggtcgctggtcgttaatcatggaaatcgatgaaggctttgcggttacagttatgatcatcgttaccggcggcgcgggctttatcggcagcaacatcgttaaagccctgaatgataaaggcatcaccgatattctggtggtggacaacctgaaagacggcaccaagtttgtgaacctggtggatctgaatatcgcagactatatggataaggaagacttcctgatccagattatggctggcgaagagttcggcgatgtcgaagcgattttccacgaaggcgcgtgctcttccaccaccgagtgggacggcaagtatatgatggataacaactatcaatactccaaggagctgctgcactactgcctggagcgtgaaatcccgttcctgtacgcttcttccgcagccacctacggcggacgcacctccgactttattgaatcccgcgagtacgaaaaaccgttgaacgtctacggttactcaaaattcctgtttgatgaatatgttcgtcaaatcctgcctgaagcgaactcgcagattgttggcttccgttatttcaacgtttatggaccgcgtgaaggccataaaggcagcatggcgagcgtcgctttccatctcaacacccagcttaacaacggtgaatcaccgaagctgtttgaaggtagcgagaacttcaaacgcgacttcgtctatgtgggcgacgtggctgatgtgaatctgtggttcctggaacatcggcgtttccggcatcttcaatctcggtactggtcgtgcggaatccttccaggcggtagctga

SEQ ID NO: 129099 - DNA, 3051 bp, Homo sapiens
atgagacggcaagataccgggagaaggggccgtaaacggcgtgacgctggccgctggcagtggcgctactggggaaaagggagttttacaccgatgaatgccacctgggatgtcgcaggaaaaggtgagtggcatgacagcacgattacgctgaccgatctctccaccggtttcgaccagttacaatacggtacgatgacggtagaaaagccgcgattaattctcgacaagcccatcgtctgggtacgtgacgcacagcatccctcctttagcggcgcgctgtcactggacgccgggcaaacgctgttcactggcggcagtgtgttaccgccatcaaccttaaaatttagcgtcgatgggcgcgatcctacctatttcctctttaaaggcgatttacatgctggtgagattggcccggttcgggtaaatggtcgctgggacggtattcgtctgcgcggtaacgcctggtggcctaaacaatcactgaccgtattccagccgctggtgccacccgactggaagatgaacttacgcgatggtgaactgtatgctcaggttgcattttctgctgcgcctgaacaaggattccgcgcgggaggacacggcgtgttgaaaggcggtagtgcctggatgccagataatcaggttaacggtgtcgattttgtcctgcctttccgttttgccgatggagcctggcatctggggactcgcggccccgttacgttgcgaattgcgaaacagaggaaggaaatgcgtaataacaacctgcgtcagttcaaactgctggggccggatgtaggctttgactccatcaacgaccgtccgatggcggaagagctgtctaagttgctgagcaagcagaatgaagaaaacctgctgccgaaaaccattctgtactgcctgaacccgcgcgataacgaagtgctgggcaccatgatcgagaacggagcttcatttgctgctaacccgctctactttgacccgaaaaacattgttgaactggcgatcgaagcgggctgtaactgtgtggcgtcaacttacggcgtgctggcgtcggtatcgcggcgttatgcgcatcgcattccattcctcgtcaaacttaatcacaacgagacgctaagttacccgaatacctacgatcaaacgctgtatgccagcgtggagcaggcgttcaacatgggcgcggttgcggttggtgcgactatctattttggctcggaagagtcacgtcgccagattgaagaaatttctgcggcttttgaacgtgcgcacgagctgggtatggatggaggctggatcggattgatgatcaaacctttgggtcgctggtcgttaatcatggaaatcgatgaaggctttgcggtaggcatgtcgccagccgaactcagcgctgagcagctcttaagcaagctgtggctatgggaaggcaaagcagaaagatatggctgggggagaaagagcatggacaaggaattaccgcggctggcggataacgcccaactggaactgaaatataaaaaaggcaaaacgccgctcagtcatcgtcgctggccgggcgaaccagtgtccgttatcactggaagtctcatccagacattgggtgatgaattgctacaaaaagctgagaagaaaaaaaacattgtctggcgttatgagaatttttcactggagtggcagtccgccatcacgcaggccatcaacttgatcggcgaacacaaaccctcaatcccggcccggacaatggcggcgctagcctgtatcgcgcaaaatgacagccaacagttgctcgacgaaatcgtccaacaagaggggctggaatatgcgactgaggtggtgattgcacgccagtttattgcgcggtgttatgagagtgatcctctggtagtgacattgcagtatcaggacgaggattatggctatggttatcgctcagaaacctataacgaattcgatctccgactgcgtaagcatctctctctggcagaggaaagctgctggcagcgttgcgccgacaaactcattgccgcactaccaggaataaacaaagttcgccgcccttttattgcgctgatcctcccggaaaaaccagaaatagccaatgagttggtaggccttgaatgcccgcgaactcattttcattctaaggagtggttaaaagttgttgctaatgaccccacagcggtgagaaaactcgaacactactggagccaggatatatttagcgatcgagaagcagctacatgtcgcatgaaacactcggctacgcgctggccgcctttgccgaacaggctggggcatccgcctcgaagttgcatagaagtgggggctccggcaactcatcgatatcgccttctgggggttaaccccctgtcgtttctctcctccctttcccccgtgttttcaatcagcgtggcaaccgtcatcgggccaacgccgccgggaacaggcgtaatgtatgaggcgcgtttagccgcgtcttcaaaatatttgatttcaccgtccacgacgtgcatacgtagcgggcagcgactaccacagttaactgtacaggcgctccagataaccttttcgtctgattttgttggaatggcgctatcgacagcatatcgccacgaaaatcagcaggatgttttgaccgaaaaaggtcaccagcaaaatttttccgtaaacggtttttacggtgaatggctggcgaagtttgatatcaaagtcacctatacatggctggggattgcggtggctatggcctttaccagcattccgtttgtggtgcgtaccgtgcagccggtgctggaagagttaggcccggaatatgaagaagcggcggaaacgcttggtgcaacgcgctggcagagtttctgcaaagtggtgctgccggagctttctccggcgctggtggcgggcgtggcgctgtcgtttacccgtagtcttggtgaatttggcgcggtgatttttatcgccggaaatatcgcgtggaagacggaagtgacgtcgctgatgatttttgtgcgcttacaggagtttgattacccggcagcgagcgcgatgtga

SEQ ID NO: 129100 - DNA, 3549 bp, Homo sapiens
atgggctttcatctttccgtggcgacgggcactggctttatcgccctcgccggggtcgccgccgaatttggcgtggtgatgctgatgtatttacgtcacgccatagaggccgtgccgtcgttgaataatccacaaacattcagcgagcagaagctggatgaggcgttatatcacggcgcggtcctgcgcgtgcgcccgaaagcgatgacggtggcggtgattatcgccggtctgctgccgattctgtggggaacgggggctggttcagaggtgatgagccggattgccgcgccgatgattggcggcatgatcaccgcacctttgctgtcgctgtttattatcccggcggcgtataagctgatgtggctgcaccgacatcgggtgcccctcaacaaaaaagacacacaggggaaaggcgtgaaaaacgcgtcaaccgtatcggaagatactgcgtcgaatcaagagccgacgcttcatcgcggattacataaccgtcatattcaactgattgcgttgggtggcgcaattggtactggtctgtttcttggcattggcccggcgattcagatggcgggtccggctgtattgctgggctacggcgtcgccgggatcatcgctttcctgattatgcgccagcttggcgaaatggtggttgaggagccggtatccggttcatttgcccactttgcctataaatactggggaccgtttgcgggcttcctctctggctggaactactgggtaatgttcgtgctggtgggaatggcagagctgaccgctgcgggcatctatatgcagtactggttcccggatgttccaacgtggatttgggctgccgccttctttattatcatcaacgccgttaacctggtgaacgtgcgcttatatggcgaaaccgagttctggtttgcgttgattaaagtgctggcaatcatcggtatgatcggctttggcctgtggctgctgttttctggtcacggcggcgagaaagccagtatcgacaacctctggcgctacggtggtttcttcgccaccggctggaatgggctgattttgtcgctggcggtaattatgttctccttcggcggtctggagctgattgggattactgccgctgaagcgcgcgatccggaaaacagcattccaaaagcggtaaatcaggtggtgtatcgcatcctgctgttttacatcggttcactggtggttttactggcgctctatccgaacatccccattgactcgataaacacgatgattaacacggcagtcatggtcagaatggaaacgggatcgaaaatcggcataccaaacgacatcggcgtaacaatcgcaaaccatgaagcatcatgtagcccggataaattgacttcattcatcatccacgaaagaggtcagatgggtatcatagctcaaaataaaatcagttcattgggcatgctgttcggtgccatcgcttggatgatggggattatccacttttcattcggccctttctccgcaccaccgccaacgtttgaaagcatcgtggcggacaaaacggctgaaattaaaagaggtcttctcgccggaataaaaggcgaaaaaattaccaccgtggagaaaaaagaggacgtagatgtcgataaaatcctcaatcaaagcggtatcgcactggccattgctgcgctcctttgcgcatttattggcggtatgcgtaaggaaaatcgctggggcattcgcggcgcgctggtttttggcggcgggacgctggctttccataccttgctttttggtatcggcatccattttgctgatattccttatcttttccttcctgaccggcggttcactggtttaagcagcctgaataatgcccgccgggtgatcatcagcgggcattatcgtcagaacttctgttttttctcctccaccttcaccccttgtgtcggccggtgtcatagtcgcgtacaactggcgaatagccatcttgtggacgtggacgaaacgcccccatccagcgcggccgtgcatctttacgccacggacgcagactccattggtaactgcggaacggatcgcgaattttgtccatgtaatccaataaggcgtcatgcattttgctgcgaacgtctgcaaaacggatatcatcgatcagggtatgcatttcatttgggtcattacggcgatcgtaaagttcatcactgctgtgagcgtttttctgagatctaccgccgttcacgcggcgtgtttatctcttaccagaaccggcacaatatggacgatattctgcaaaacgtgccgaaccataatattaaagtgattgtggtgactgacggtgaacgcattctggggcttggtgaccaggccatcggcgggatgggcattccgatcggtaaactgtcgctctataccgcctgtggcggcatcagcccggcgtatacccttccggtggtgctggatgtcggaacgaacaaccaacagctgcttaacgatccgctgtatatgggctggcgtaatccgcgtatcactgacgacgaatactatgaattcgttgatgaatttatccaggctgtgaaacaacgctggccagacgtgctgttgcagtttgaagactttgctcaaaaaaatgcgatgccgttacttaaccgctatcgcaatgaaatttgttcttttaacgatgacattcagggcactgcggcggtaacagtcggcacactgatcgcagcaagccgcgcggcaggtggtcagttaagcgagaaaaaaatcgtcttccttggcgcaggttcagcgggatgcggcattgccgaaatgatcatctcccagacccagcgcgaaggattaagcgaggaagcggcgcggcagaaagtctttatggtcgatcgctttggcttgctgactgacaagatgccgaacctgctgcctttccagaccaaactggtgcagaagcgcgaaaacctcagtgactgggataccgacagcgatgtgctgtcactgctggatgtggtgcgcaatgtaaaaccagatattctgattggcgtctcaggacagaccgggctgtttacggaagagatcatccgtgagatgcataaacactgtccgcgtccgatcgtgatgccgctgtctaacccgacgtcacgcgtggaagccacaccgcaggacattatcgcctggaccgaaggtaacgcgctggtcgccacgggcagcccgtttaatccagtggtatggaaagataaaatctaccctatcgcccagtgtaacaacgcctttattttcccgggcatcggactgggtgttattgcttccggcgcgtcacgtatcaccgatgagatgctgatgtcggcaagtgaaacgctggcgcagtattcaccattggtgctgaacggcgaaggtatggtactgccggaactgaaagatattcagaaagtctcccgcgcaattgcgtttgcggttggcaaaatggcgcagcagcaaggcgtggcggtgaaaacctctgccgaagccctgcaacaggccattgacgataatttctggcaagccgaataccgcgactaccgccgtacctccatctaa

SEQ ID NO: 129101 - DNA, 3393 bp, Homo sapiens
tcaaaaatcggctttcaacaccacgcggtaacgcgccttaccgtcgcgcacatgctggatggcgtcgttaattttcgacatcgggaacagttcggtggtcggcgcaaccttgctgcgggcggcaaaacgcatcagcttacgcagctcataaggcgtgccggtagcagaaccagagacgctgcgatcgcccgcaattaacgtaaaggccggaacagacagcggcgtgagaaccgcaccgaccgtatggaaattaccgccataggtcagcgcctcaaaatagggctgccagtcgaggctgacgttgacggtgttgataatgagatcaaactgccccgccagtgctttcagtgcctgcggatcgcggctattcaccactttatcggcacccatcgccagcacttcctgctctttcgccggattagaactaaaggctgtcacctcgcatcccattgcgtgcagaagttttatagcgatatgccccagcccgccaataccaattaccacaacgcggctggtagcagtgatatggtgcatcactccattttgatgtaaatcccggaaggtcccaatcgtcaacacataggaccggtaatagccgcttagtgcacatcggtaaagacgtagcatcgccagcatacagccgactttcatctccgggttaatgcgacgcgcagctttcaccgccagggcgctggcgacaaactggtgatgcagcacctgatacatcgtctcttccgggttttcatgctcggtatacaccacgccggagcagcagtaaccgaacagcggtgcacgccagttacgctggttgttaatttcgttgaaggtcatccagtatttgactttgtgcttatagcgttcaaataccacttccgcgaaacgtacaaagaaatcaaccactttacggttggtccagctaccgtattgctgcaccagatgcagcggcatttcaaagtgggagagggtgatcaccggttcgatgttgtatttcagcagttcatcgaacatatcatcgtagaacttcagcccttcttcgtttggctgagcttcatcgccttttggaaaaatgcgcgtccaggcaatggatgtacgaaaacatttgaagcccatttcggcaaatagcttgatgtcttccttatagtgaccataaaaatcaacggcttcatggtttggatagtattttcctggcaagacttctttggtgatttcgcgcggcacgccgtgtgcgccaccggtcagaacgtcacaaatgctcggcccttttccgcctttgttccagccgccttcgacctgatgagcggcaactgcgccgccccataagaaatctttcggtaaggtgagttttttcactatcataggctccagatgagtcaattccggtttggtatcaaggtatacgccattagcggcaacgaaacgtcggcgaatctgatggggatatccactcgcagcaccactattcgcatctatatgctctccaccggactggcaacgctggcggggattgtcttctcgatttatacccaggccggatatgcgctggcgggcgtaggtgtggaactggatgtatcgcctcagtggtaattggcggtacgcttttgagcggtggcgttggaacggtattagggacggcgtccgggaactcacggataaagcgttcgacatcttcaaccatatggtcgttgccgacaaagaatgaacggcgctggtgcagggtttccgggatgatatccagaatacgctctttgccatcgctcgctttaccgcccgcttgttccgccaggaatgccatcgggtgcactcatacagcaaacgcagtttgccgtccgggtggctggcggtgcttgggtagagataaataccgcctttcagcaggttaccatggaaatccgcccccagtgaaccgatataacgtgaggtataagggcggttggtggatttatcttcttccgtcgtcggtgcctgcagcacacagtcctgtgcgtcgaccagacgccgaaccagtaccgagaaacggacggcgtttatcccatttgatggcttcctgctgaccaacaacggcgcggcaacgcccggcacgctgagaccggcagccgccgcagcggccgcaacggcgttagcttgctcttcctgctggtgataaaccagcgacaccgccagcacgccctctacgttgcgtactgactcaatggtttggatcagcgtttcgctgtcttctgcttccaccaccacaatcaacgtcggcgcgtcgctgacagcaacttcacagccgggaaaggcgttcagttgggtgctgatgtctgaaattcgttcgcttttggccgcttcgctttccatcgccgccatcaccagcgcatggtttgccaccaccacttccgcttcctgaatctcccgacgagcgacaaaaaacgggcattcacgatagtagtaacaattgcggttgaggcagctggctttgtcggtacttaaacgacgccagagatcgtcatctatagcgatatcagtatgatcgcgcagaccatcccatttataagtatcgagatcgcccttcagcttcgcacaacgtttttgctcttcctgattgttcggcgtcagttcgtcgtcaagaaacgccagcagatcctgttgcgtgggttcagtactggcgagcgccgtcagattacgcggacaaacgtagcgcccacgcccaaaagcggcagtgaatttaagatcgggaatgatctttttcagcagcggtaaatctttgctgtaaatctgatcctgcaatgccacgttggcggtactcaccaccagcgttttttgctcttcgcgggcaatggcgatgccgggaatcaaataagagagcgttttcccaacgccggtgggggcttcaatcgccagatgtcgcccttcttctccggccagcgttttggcgacgtccgcaatcatctgccgctgcggcgcacggggaataaagtcggggatctgttcctgaagcgccttataccaggcggcaatttgcgctaccagcgccgccaataaaatgtgcaccgttgccggaacgccaaaggccgtcagtgccatcccgacacctgcgcctgccagcgtgcccaggctataaaaaccgtgcatcatcggcaaaaccgtcttattcatttctcgctcaacggcagcaccttcaacgtttatcgccacttccgcagaaccaaaacttgccccaaagacgccgagaccaacggcaaagagcaggggcgatgtcagccagagtgccagacttaatatcatcatcccgatcaatgcgcaggacatcgtgaccaggatgacattacgtgtcccaaagcgtttcactaaccacgccgagcagagaataccgctcatcgaaccgatcgacagaccaaagagaacaccgcccat

SEQ ID NO: 129102 - DNA, 1248 bp, Homo sapiens
ttaaaccagtgaaccgccggtcaggaaggaaaagataagaatatcagcaaaatgctgcacacgatgccgataccaaaaagcaaggtaggaaagccagcgtcccgccgccaaaaaccagcgcgccgcgaatgccccacgattttccttacgcatacgccaataatgcgcaaagtagcgcagccatgcagtgcgataccaggttgattgaggatttatcgactctcgtctcttttccacggggtattctcgctttatccggggagactcttttttagcgttgtcgcgagcttcacttgcgtggtggtaaggcggtaagtgtacccctttacggtcacctgcccgatcttttgggtgaccgctacgaccgggaacatccgcgctggcgcagctgctgacacaggcggttaagaacgttccgcggccaacgtcaaagggagcgccatcttcatcgaccatggtcaggagcatctgccgataaactctggatcggcggcagaaggagttaaggaaccgagaacagaacacaggtacgatccggctcgcccatttcctgacccagacctgcttctctactacgttgcccagaatatccattgcaaataccgaggccgggaaatacaccctttctcgagcttcttcaggcgcgacaaataacacaacgcggacaacaggataggaaataatcgagagaaagcacgcgaggcagcagcttctcttcagtgactctataggatccccctgacaagccgctgcctcaaccgcaattgttactactatccgtgaatgcccgtttttgtgctcgtcgggagattcaggaagcggaagtggtggtggcaaaccatgcgcgtctgatggactggtggctgctgtgactaatggccactcaccgtgccgtactgtggcgtcgggtatgcgtcttgagcatgagtcgccgataatcaccgcgccgttggttatctgagccgctgggcaggcagaaaatgcccgagtggtcgggtcatggggcggcgaataaaggctggataaagggcgaaccacaggatggaggctggatcgatggatgatcaaacctttgggtcgctggtcgttaatcatggaaatcgagaaggctttgcggtaggcatgtcgccagccgaactcagcgctgagcagccttaagcaagctgtggctatgggaaggcaaagcagaaagatatggctggggagtaattcaacacaggaagcgcagttctccgtaatcgatgccat

SEQ ID NO: 129103 - DNA, 1313 bp, Homo sapiens
ctctgacgggtgtctctcgcgcctgcctccgctatcccgtcagcgctcgtcactgacccgtacgtcatcgctggtgcgtgattctccatgtcacgcccacctcggctccattatctggtccacgtgtcgagatgcggcatagcggtccccagttgcgggaacagcacccccagtccccttttttccgggcctgttgtaccgctgctgctgctgtgcgcagggtaaacggcaaagaaaatccggcctccagccagcgccagagaccctatcccggtagatttaacgagtgttctgcggctgatgccccccattcgttcatttttggacataactcactccctgttctttatcgttatataaaagtttatatattgaatatttagcgcgctaacaatagagggagtctacccattttgggttaagaattattaatccatatcaatagaagggtatgagtaataaggtgggattatgttgtatgttcaaatcgccggatttgtcatatccggcgttcagtcgataatgtgttattgcggttcggcaggcgcgccatcctggttagactgcgcgggagcagagacgttaccgctggtggtgcgggtatagagaattttatgcgtatcattagcgcaataaccgacgacctgggaatcaagctgatcaacctggtcattgggaaaaacatgatctctcgcctcaaacgacctcagggccaattaatacctgacgcagcacctgatactgctggtgcccgctttccatggcgcaagaacagggagcctgtattttctttaacacccctttacgcctgtcacgtggggcaagtaccattacttggcataccgcggtctgagatcacggcgttgcgagtgcagccacgtgcgtgtatacgaatgagggacaccggcagtcgtatgttcgtgtgtgtgagtacgcctcacgtacgcgcgtatcgcaccactgttctgtgtagcgggtcttgcgctgtgaagcgatacgcatcgtctcgcccgacaggtcgtgttagagagatcccgagttcagctatttgtgcactccctgaaaattataaccgcttgtttttaccaaattcaactaatcaaacaaataatcgcatcaaaacgcttaacagcatagctattggcaagctactagctgctggtggcgtatacaacgggaacattgaaggattcagagatactgcggaaaaactggatggacgaacaatagatggctatgatcaaattctaaatgaaaaaacagcggtcatagcgaaagcaacagcagtctattcttttaacaaagcgttctaa

SEQ ID NO: 129104 - DNA, 1836 bp, Homo sapiens
atgacgcaaccagttggcagcggcggctttatcgccggtcatttgccagtaaatcacccggactttgttggcgttagagatccagtcgctgtgatatttgccattccccagcaggaaagagccaatttctaccgcacggataccggcgactttatacagctcgcaggccagcgcctgtgccgggaactggtctgccgggatatgcggcaacagtttaccggcatcaacgaatgcggcgtgaccgcccgcctgctggcagacaacgccaatctcttccagaccatcgaccagatactgtacctgcgcgtagagataagccagccagtcgagattcatgccgtcatacagacctaccgccagaaaatccatcgcgcttccttccaggccgccatatgtcgggaagccttcctgcaccacgcaaagggttctgcactcggtgtacacatcaaagaagctgtcgtctttcatgcacagcaggccgcccatcggcaccatcgcatctttcttggcggacatggccagcatatcgatgcacagagagcagacactgattcagagcgcaaacctgagggagccccgaaggtttcagagcctccgtttaaaccgccgccccccgtgcttgtccggggtaaaggccgccagttgtgtagcgcgctgagctcgtgcgcacatagcagcccagcgatccggttcgataacgtgatagagcgcataatccttgtcgttgctccgggccaaaaggttcgcaaattcgcatatgacgcagaggaacgcctgcctgatacattaggttatacagtgggttgcagagactttgatgatttgcataccaggtccagatatcagccactttccagtcgtaaatggggtaaatgtaccagctatgaccgcctgtccagggtttatcgtcggcaaaacgttgtttatttaaactggcgatggcgacaaaacggttgtaggactcatccgcacggatgccgatcatcatcgccgccggacgtttttgtgaaaaccattcggcaaactcacgtacaaattgttcgaaggtcatgcctggctggtaaaagcagaaaaagtcagggtcggttatcgcatcttggggaggttgacgtacccattcgacatcaggttcccagcactgccattcgggttggtattgtgaaagggggcgcacttcaccgtacccagaatatgggcgggacacgcctgctgattgatgccgatggcgttgccgatgttccggtggaaggtaacggggctgctgtttataccaatatgtttggtaaagccgtcgtttctgacgttaacaattattatcgcaatcaggcgtatatcgacctcaacaaattgccggaaaacgccgaagcaacccagtcggtggtgcaagccacgctaactgaaggagccattggctaccgcaaatttgccgtcatcagtggtcaaaaagcgatggcggtgctgcgtttacaagatggcagccatccaccgtttggcgcagaagtaaaaaatgataacgagcagacagtgggccttgtcgatgatgacggtagtgtctatctggctggggtgaaacctgtcgaacatatgaatgtgttctggatttgtgttgcgcactgcgatatcaacctgccggacccgctgcctgccgatctgtttaacggcttgttactgccatgccagcataaaggcaacgtcgcgccggttgttcctgatgacataaagcctgtcattcaggagcagacgcaacaggtgacagcacccgtatatataataccacatctatacagggatgtaacagcatttaataagcagcattttttgtatctcgaacattaa

SEQ ID NO: 129105 - DNA, 2124 bp, Homo sapiens
tcactgcccgctttccagtcgggaaacctgtcgtgccagctgcattaatgaatcggccaacgcgcggggagaggcggtttgcgtattgggcgccagggtggtttttcttttcaccagtgagacgggcaacagctgattgcccttcaccgcctggccctgagagagttgcagcaagcggtccacgctggtttgccccagcaggcgaaaatcctgtttgatggtggttccgaaatcggcaaaatcctgcccgctttccagtcgggaaacctgtcgtgccagctgcattaatgaatcggccaacgcgcggggagaggcggtttgcgtattgggcgccagggtggtttttcttttcaccagtgagacgggcaacagctgattgcccttcaccgcctggccctgagagagttgcagcaagcggtccacgctggtttgccccagcaggcgaaaatcctgtttgatggtggttccgaaatcggcaaaatcccttctgaaatctacttctgtcaactcgtcaagctcattctctgtccagttttgttcccttgctggagaagggttgcgatcctttggaggagaagagatgttctcttttttggaagtttcagcttttctgctctggtttctccccatctttgtggttttatctacctttcgtctttgatgttggtgacaggctttgactatctgtcggatggtccagaggagatttggccctgtaaatagggatttggccatttgatgagtgttctcaatacccctatgaaaagtttggtggagggttttaagcattttccactggctggcttcgggtatgagtacctttccttcttctgtcgttaaccaccctgagggaagaaaactatgaccctgtgaaagtccccattctgtttcagtcagggaatactggggcttaatctcttggaggggattgttccataccaagggtctttccacgggtattgctaatgggaggttccacctggcagcaattttggcctcagcatctgcctgacagtttccttctgccttctcttcttcacctttttgatggctttggcagtgtaagactgccacctccttggggttttgcactgcatgcaataattccatgatttccttgtggtatttaatgggggttcccccgaggttaggagctctttttatttctatattgccgcctgggccggaatagtcagtgtagaataaacggatttttccgtcagatgtaaaggttgcagaaccggaccattcttgcgtctgatctttcaggatcggatcgttggcgtcgaacttatcgctgtctttaaagacacggcccgcgtttttccagctgtcgattgagttgtcgccgaccttttgataaaacatgtagattgatgtgtcatcagcgtctttcgggcttcccgcaagagcaaacacaacgtgatagccgttgtattcagctactgttccgtcagcgttttgcagcggccagctgtcccacacatcaagtccttttgcagactcaatatttttaatcgttgattgatcgaattgaggcacttggtatttttcgttttgctgctgtttagggatctgcagcatatcatggcgtgtaatatgagagacgccgtacgtttctttgtatgctttttggttattttctttcgcgaaggcttgagtcgctcctcccaatctggataatgcagccatctgctcatcatccagctcgccaaccagaacacgataatcactttcggtaagtgcagcagctttacgacggcgactcccatcggcaatttctatgacaccagatactcttcgaccgaacgccggtgtctgttgaccagtcagtagaaaagaagggatgagatcatccagtgcgtcctcagtaagcagctcctggtcacgttcattacctgaccatacccgagaggtcttctcaacactatcaccccggagcacttcaagagtaaacttcacatcccgaccacatacaggcaaagtaatggcattaccgcgagccattactcctacgcgcgcaattaacgaatccaccatcggggcagctggtgtcgataacgaagtatcttcaaccggttgagtattgagcgtatgttttggaataacaggcgcacgcttcat

SEQ ID NO: 129106 - DNA, 2268 bp, Homo sapiens
ttaatcgttgttgcatagtatcccccattcctgacgttttccttttatccgttcgttataacgctgatagttcttcgattttgtggggctaaatgataatgcccgacaccagtaatcgttattgagtaaaactttgcatatccgccgccaggaggggatatctttcgcgccaatgtccccttgctgggtttgtggaacctcgatgccttttttctgataccagtgcaaataaatggcgattttattgcggtaatgctcagctgttttttccggcatgctattgagcagcaataatgcatattcttgccagtctaaatgttctggcttgaggattttccgatgcccatagaaatgattgtcatgtccggcgtaaatgccgccactttttaccccgctgactcgtgcgcacatagcagcccagcgatccggttcgataacgtgatagagccataatccttgtcgttgctccgggccaaaaggttcgcaaattcgcatatgacgcagaggaacgcctgcctgatacattaggttatacagtgggttgcagagactttgatgatttgcataccaggtccagatatcagccactttccaatcgtaaatggggtaaatgtaccagctatgaccgcctggtgcggccgtagtccagggtttatcgtcggcaaaacgttgtttatttaaactggcgatggcgacaaaacggttgtaggactcatccgcacggatgccgatcatcatcgccgccggacgtttttgtgaaaaccattcggcaaactcacgtacaaattgttcgaaggtcatgcctggctggtaaaagcagaaaaagtcagggtcggttatcgcatcttggggaggttgacgtacccattcgacatcaggttcccagcactgccattcgggttggtattgtgaaagggaattttgcgtcgtaagcgggagcgcaacccagtaaaactcttcgatgacatcggtgtacaactcgcgcagggactgaacatagttaatggtgcaagagaattgcgcctcccagtcgataaacaaaacgcagatttttttgcccatttgtcgggcaagttcggctgtcagatgcagcattaaaccagagtctttgccgccagaaaatgagacacaaacgcggggtagggtgttgagtgtccaggtaatacgctctcgtgcagcttccagaatattgagcggaagaggaattttataaatagacatctgaagacgctctctgaacgttacagggtgatcagtgagataagtcagatcggctttgcggtgaaccaacagttcttcagcattctctgctgacatgaggatatcatggcactcaatctcgacagaggaatcttgccgtaggcagcggatcagcatactattattagagcaagaaatgagctgagggccgtagataataaagtttttctttagttcggacttattgactatattaattgtttgttcaaggcctctgagatttttctcaagatggtgatgcagatttaaccctgttgtcgtcggcgcgataccttttctcatgtaatagatagccggcgtgacatttgcccccagatcgtccatcagtttctcattgtcacttaacactttcatttgctctgtacttacgtttgcaggcacgtttagcttaagcttgccaccagaggcttcatattgttgccaggtttttgcgggatctttggaggcaagaattgccgctgctgtcgccgggctttctggcttgataaccccaaccaacaatgttcttaattgcactttgccagaatctacccacgggcgcgcctgctgccagaactgtttacaatatgggcagaacggatcggcgaagacgtagacaatgaccggcgcatcttttttaccgtcgaggagccagtgggattgttccatccgttgccacatttcgcgtccggctggtgcgtaaatttctttttcgataagtgtgttactcaggttttcacctttctcgttgtacatgtaaccagagatagcgtgcttaccatctggagtcaggtagatggtgacgcccatatcctgatactttccgagataacctttcattcctccgggggcatcgaatgttttgatgattgtaatgccctgtttttcaatcgcttttactggagcaggaagttcctctgcgaaggcgattgcaggaagcagagccagtaaaagtatcttttttaacattaatttgtccttttcagtcagtgcaaaagtcgagtaaaaggcataacctatcactgtcat

SEQ ID NO: 129107 - DNA, 3099 bp, Homo sapiens
atggatagccaggataagtattttgaagcaacccaaacagtgtatgaatggtgtggtgttgcgacgcaattgctcgcagcgtatattttgctatttgatgagtacaatgagaagaaagcatccgcccagaaagacattctcattaaggtactggatgacggcatcacgaagctgaatgaagcgcaaaaatccctgctggtaagctcacaaagtttcaacaacgcttccgggaaactgctggcgttagatagccagttaaccaatgatttttcagaaaaaagcagctatttccagtcacaggtagataaaatcaggaaggaagcatatgccggtgccgcagccggtgtcgtcgccggtccatttggattaatcatttcctattctattgctgcgggcgtagttgaaggaaaactgattccagaattgaagaacaagttaaaatctgtgcagaatttctttaccaccctgtctaacacggttaaacaagcgaataaagatatcgatgccgccaaattgaaattaaccaccgaaatagccgccatcggtgagataaaaacggaaactgaaacaaccagattctacgttgattatgatgatttaatgctttctttgctaaaagaagcggccaaaaaaatgattaacacctgtaatgagtatcagaaaagacacggtaaaaagacactctttgagacttatctcactgatcaccctgtaacgttcagagagcgtcttcagatgtctatttataaaattcctcttccgctcaatattctggaagctgcacgagagcgtattacctggacactcaacaccctaccccgcgtttgtgtctcattttctggcggcaaagactctggtttaatgctgcatctgacagccgaacttgcccgacaaatgggcaaaaaaatctgcgttttgtttatcgactgggaggcgcaattctcttgcaccattaactatgttcagtccctgcgcgagttgtacaccgatgtcatcgaagagttttactgggttgcgctcccgcttacgacgcaaaattccctttcacaataccaacccgaatggcagtgctgggaacctgatgtcgaatgggtacgtcaacctccccaagatgcgataaccgaccctgactttttctgcttttaccagccaggcatgaccttcgaacaatttgtacgtgagtttgccgaatggttttcacaaaaacgtccggcggcgatgatgatcggcatccgtgcggatgagtcctacaaccgttttgtcgccatcgccagtttaaataaacaacgttttgccgacgataaaccctggactacggccgcaccaggcggtcatagctggtacatttaccccatttacgactggaaagtggctgatatctggacctggtatgcaaatcatcaaagtctctgcaacccactgtataacctaatgtatcaggcaggcgttcctctgcgtcatatgcgaatttgcgaaccttttggcccggagcaacgacaaggattatggctctatcacgttatcgaaccggatcgctgggctgctatgtgcgcacgagtcagcggggtaaaaagtggcggcatttacgccggacatgacaatcatttctatgggcatcggaaaatcctcaagccagaacatttagactggcaagaatatgcattattgctgctcaatagcatgccggaaaaaacagctgagcattaccgcaataaaatcgccatttatttgcactggtatcagaaaaaaggcatcgaggttccacaaacccagcaaggggacattggcgcgaaagatatcccctcctggcggcggatatgcaaagttttactcaataacgattactggaatgtaccaatcgacatggtgatgccgctgaccaccccgagaatgaacatcgccgccgagaacagcgccaggctgtggctgaacatcaaaccggcaaccgccagcaccatcaggagaaagccaaaacgtaactgcgttttcaacgggacgatttccatcagccaggcgttgaggaagatagagattaaaatgccggcgttgaggaaggtgaagcaatggcagcgaagggggactgcacgtattgttgacaactcagctgcgctctgcagggtgcagcaaatggtgatgaatctggggctggagcagatccagaaaaatgcaccaacgctggaaaagcagctcaataatgcggtgaaaattctgcaacgtcggcaaatacgcattgaagatccgggtgttcgtgcgcaggtcgcaacaacgttaactaccgttagccaatatagcgatttgctggcgctgtatcagcaggacagtgaaatcagcaatcacctacaaactctcgcacaaaataacatcgcccagttcgcgcagtttagtagcgaagtcagtcagctggtcgacaccattgagctgcgtaatcagcacggactggcgcatctggaaaaagcgagtgcacgcgggcaatacagcctgttattgctggggatggtttcactttgcgcactgattctgatcctctggcgcgtggtttatcgctcagtcacgcgtccacttgccgaacaaacgcaggcgctgcaacggctgctggacggtgatattgactcccctttcccggaaaccgctggcctggcggcgcaggtcaaagcgcgtacagctgaattgcaggaactggtgatagaacaccgacaggcacgggcggaagcagaaaaagccagccaggcaaaatcggcgtttctggcggcgatgagccatgagatccgcacaccgctgtacggtattctcggcactgctcaactgctggcagataaccccgcacttaacgcccagcgtgatgatttgcgggcaattactgactctggtgaatcgttgctgaccatcctcaacgatattctcgattattccgctatcgaagcaggtggcaagaatgtttcggtcagcgatgagccctttgaaccgcgcccgctgctggaaagtaccctgcaattaatgagcggacgggtgaaaggtcgcccgattcgcctggcaacggcaattgccgatgatatgccgtgcgcgttaatgggcgatcacgacgtattcgtcaggttataa

SEQ ID NO: 129108 - DNA, 2415 bp, Homo sapiens
  misc_feature (1)...(2415): n = a,t,c or g
atgcttgcgcagtcgttacaggcgttagaacaggatggttttcttaaccgtatcgcgtatccggtggtgccgccgcatgtggaatatagcctcactccgctgggcgagcaggtgagcgaaaaggttgctgcactggcggactggattgagttgaatttgcccgaggtgttggcggtgcgggatgaacgcacccgctatgacattgcggttcccaggaaacggtatggccatgccgtttcgaggaacacgtttgccttgcgttcccaggaacggtatggccatagcgtcctggaaacggttggcaatagcggatccagtaaacagttttccatggatatcctggacccgtgtgcacgcggtccgggacagatatcgttgattacggtgaatcataaactgcacgtacgctgtgaaagtatcgcttactccgtgcagactatggtggtgaagggcggttcagcctttgcggcttttttcattgcggttgtgttatggatgattggctatgtaccgaatgttgaacagtctacgcaagccctattaggtatgcagtttattatgattgctctaccaactctgtttttcatggtaacgctgattctctacttccgtttctatcgcctcaatggtgacacgctgcgcaggatccagatccatctgctggataaatatcgcaaagtaccgcccgagcctgttcatgctgatattccggtcggtgcaaggttgtcatttgcggagcgggtgatggaaggactgagtgatggagggcagtcccttcagagcccatcagctttattctcaaagcagacactgaaaaatatgtctatttataaaattcctcttccgctcaatattctggaagctgcacgagagcgtattacctggacactcaacaccctaccccgcgtttgtgtctcattttctggcggcaaagactctggtttaatgctgcatctgacagccgaacttgcccgacaaatgggcaaaaaaatctgcgttttgtttatcgactgggaagcgcaattctcttgcaccattaactatgttcagtccctgcgcgagttgtacaccgatgtcatcgaagagttttactgggatgcgctcccgcttacgacgcaaaattccctttcacaataccaacccgaatggcagtgctgggaacctgatgtcgaatgggtacgtcaacctccccaagatgcgataaccgaccctgactttttctgcttttaccagccaggcatgaccttcgaacaatttgtacgtgagtttgccgaatggttttcacaaaaacgtccggcggcgatgatgatcggcatccgtgcggatgagtcctacaaccgttttgtcgccatcgccagtttaaataaacaacgttttgccgacgataaaccctggactacggccgcaccaggcggtcatagctggtacatttaccccatttacgactggaaagtggctgatatctggacctggtatgcaaatcatcaaagtctctgcaacccactgtataacctaatgtatcaggcaggcgttcctctgcgtcatatgcgaatttgcgaaccttttggcccggagcaacgacaaggattatggctctatcacgttatcgaaccggatcgctgggctgctataggatcccctgcggatcgagaagaggatgcagaggaatatctggaagcaatcatggaggctcgtgttaccgttgctggcatggggctggtgatggaggtgcaggattacttcgatggcgaggccgatagactggcgaaggcgtggctggccgagtacacaccgcaaatcaagtcgttgaaagatgagcgtaaagaggcctatcgtcaaatcgtcgaaatgagtaccgaaccgcaggatgtggatctggtcaggccggcgaacaagtttgaaatgaccagggtgcgtgaaggtgaaaaggaagctgaccttccagtctggaaacaccatttgttgtgtgacgaaagcgggaactatccggctctgttgaaccattgggaaaccaaggtttttgagatcgaaaccaaacgtgaaggatttgctttctggtatcgtaatccacagtacacagggcagtcgtcactgggaatcgcttatgttgaagctgaacagtacaagattgttcgtcccgatttcctgttctttgccgaacaggatggcaaaatggttgtggacntggtagatccacatagcctacatctggctgatgctttgcccaaactggaaggacttgcgctatatgccgaacatcattctgatgcttacaggcgaatcgaatctgtcgccgaagtaaagggtaaattacgagtgttagatttgaaacggcaggatgtgcaggatgctgttgctaccgctgaaaatgcagaaacgttatttagtagcggacttgctgatgactatcagtaa

SEQ ID NO: 129109 - DNA, 3963 bp, Homo sapiens
ctacgtgatcgctgtcccacgaaccggacggctgacgtgcagcagcaactgcggcacatacagcatggcggcggaaatcttgtcggaaatcacttcagtcgggtggaagtgcccggcgtccaggcacagcgcagtctggcggctggtggcataccccatgtaaaactcattggagccaaccgtgtagctctctgcgccaatgccaaacaatttgctctcaacggcgtcgatatggtgcgcagggtttagcttctcgctgatcacctcatccagtgctgccagcagacgctgacgcggggcgagacggtcaacggtgatatctttcataccatccgggatccagatgttcatcaccgatggtgtgccgagttgctcgccaaaataggccgaaacgcgacggctggctttgcagtgatcaatccagaactggcgaatgctgtcgtcggcatgggaaagcgtaaagccatcggcgcttagcggatgcgaaaagcaggaggggttaaaatccagaccgagctgattggctttcgcccattcaacccagtttttgaagtgctctggtttgatctggtcgcgcgagactggcgtatctgattccagatagatggcatgtaaattaagccgtttcggccccggaatcagccgcatagcctgttccagatcggcacgtagctcactggcattacgcgctttgcccggataattgcctgtggcctgaatccccccggtcagcgaaccttccgggttttcaaaaccggaaacatcatcgccctgccagcagtgcattgaaacgggtaaacgatcaagttggcgcacgccatcctcgacatcaatccccaccgccgcgaaacgctgtttcgctagctcccaggcctgttccagttgagtggtcatgcgcaaagctcctttgtctgtcgtgtagagtgaattgtcaggattaggggtaaaggtggtcagattcgcggtggtgctgacgacctgacggaaatcatccacattgttgagttcatccagcgtcattaactggatgccgatattgccgagcgtcgaagcgcacacaatcaggcccacaatggttattgcggaagacatgcgtacatggtcaatggctagttttgaaagtggctggcgatgttcttttttcgtcagcgagttgattgctatgtcgagcagaaacgtcccgacaaaccataatgcgtatatctttaagcccaactccaaatcactcataaatcctcttggcccgtcagttaattcaaatggagcataactttcccggcgctcagcgaacccaagctcaacagacagagcgtgcagctcatgccgacgcttaatctgttccatcgcaatccagtcagcatcggcattgcgcttttgagcttgcttcggcgacaggtctaaactgtttatttcacttagtttctgctgacgcttgatgtccttctgtaactggaagttggtgatgtatatcggcccggctttcttctcagatataaacgggtatttgatgttaatttccttcgctttaatccccgtccactgggagaaaaagcctaagaagtcattggctgagcggcgggctttaatcacacgatgcgctttatcgtcgctggaaatgaccataaaaggcacctggaaattttgctgatatttatcatcatgggcaaggtattgcacgtctttaccgcgctctttaaaggccagaccgtggtcagaaaagtaaaccagcgagaagctgctgccgctgttgcgtaactgatcgtacagcttgcgcagtaaatcgtccgtttgcgtcatggtatagagatagcacgacgtttctttcgattgcacaaaggtttcgtattttccttgtgtcctgtcgcaggcctgcggatgtgagcccatcagatgtagaacaatcagctgcggttgcgagtgctcttgcgccagcacttgagcggtcatatccagtaacgcttcgtctttggtgtttttatctgcttcaaaattaccttctttcaggaagtacacttcatctgctcgtttggcgatgctggcgatagcggtatcgtattcgccgatttgaccctggttggaaaatctgccggtcggtatttgctggtcagcggtgaaaaaaatgggcggcacgcgatccttggtatcgtgcttggcgtgacactggtttctccacagctgatgaacgcttatctgctcgggcagcagctgccggaagtgtgggactttggcatgttcagcatcgccaaagtaggctatcaggcgcaggtgatcccggcactctatctggtggtggtacccgtctgttcgctgatcctcgcggtgttcctcgcccatgcgctgattggtccgtttggtcgcatgattggcgatggcgttgcctttgcggtacgtcacctgatgaccggcagctttgctccgattggcgcagcattgtttggcttcctgtacgccccgctggtgatcaccggtgtacaccagaccacgcttgctattgatttgcagatgattcaaagcattggttgtacgccagttttgccggtgaatgcgctgtcgaatatcgatctttggcacataagtatactcgtataggccctgcccggcgctgtcagacagcggcttataagttacggccatgttgccctgcgaacgggtgctgtcggtcactttcatgcccactttttccagcgccgctggcagacgttgccaaaccacattgaacggcccgcgtacgaccagcattggtaaaccggtgtcatcagctgcactttgtacgtccatagtggtggaggcacgattttgcgcacgattcgcggcgtcagtggcagatttatccagaccggcggaaataacgttcatcatctccgtgctgtaacgctgcatggaagccgcgtctgcaaccggtttgcccgcctgttccaggttcagcagtttaaccgtaaccgcctgctgataaccctgcggcttaacagagatttgataacgaccacgatactgctcgtcttcgtccagacggttccattgtacccaatcggtggtcagtgtctgaccagcatcatcacgttgggtgatggtgtagtttttcgcctgcagcacgctaaccacctgcggccacagagtattgccacgaccattttccaccagcaatgaagcggtatcgccgtgaactgggtacgcgcgccagaaaccagtgccagcggctgggcgggattgcataatcaccggagtcaccggcaaaatcattccagccggggcatgaagctccgcaagcggtgccgcttccaggtaggcttcatcaccactgacctgacgcttatagcgtgacgttactacctggatgagccattcagccgtcttgatgtggctctgcgcgataattttcgccagtgggtgttcagcgaagttcgcgccctggcgatccccgtcgttcaggtaacgcacgatctccaggatgttcctgctgatagttctgttctctctgccagctggcttgacaaaatgagcaccgaacagctcaacgcgtggatcaagcaacataacctgaaaaccgatgctccggtggcgctgtacggtaatgacaaagatgtcgacgccgtcaaaacgcgatgatgttaacagcgccaacaactcgtcagcagattccgcgacgataactggcgcgtcgggttccgttacgggttgcttcggctggcggttaaagccagtaaccagccactgggtgtcatcgtctggccgaccgatctccttgcggctgatgacacgcccggtacgcatcgcggcagcacaacctgcgtccagcgccgcacgacacgccgccagatcgccttccaccaccagcgttaagcgaccagggtcaagcacttcgtgactgagcagacgaacgttagctgctttgagcatggcatccgctgcatctatcgcggcgaccatgccgtccacttccagcaatcccagtgcattgatcat

SEQ ID NO: 129110 - DNA, 1274 bp, Homo sapiens
tcaaatggccaaatccctatttacaggccaaatctcctccggaccatccgacaagtagtcaaagcctgtgatgtggccaaaggcataatcccttggcccatcgtaaggcccctcacttagaaaataataattctttccgtacgaggagtccaagcccatgtagatacgcatccctgtgacagtgacttccaggatcccacacccaagggcctgcgaggattgcccacactgcatccgagcctcagctctctgcctcttccttgcattccctgaccctgacactctagaaagagggcccagccatgtggatgggatttctccttcattgatctgatggtggtcgtggaatgtataagcaccagccagcatgaccttcgaacaatttgtacgtgagtttgccgaatggttttcacaaaacgtccggcggcgatgatgatcggcatccgtgcggatgagtcctacaccgttttgtcgccatcgccagtttaaataaacaacgttttgccgacgataacctggaccttcccgcaaacgatctacgattttctgtggttgatcggtgaagcgatcttcttcacctgccggtcggtatttgctggtcagcggtgaaaaaaatgggcggcacccgatccttggtatcgtgcttggcgtgacactggtttctccacagctgagaacgcttatctgctcgggcagcagctgccggaagtgtgggactttggccgtctgttcgctgatcctccggtgttcctcgcccatgcgctgattggtccgtttggtcgcatgattgggatggcgttgcctttgcggtacgtcacctgatgaccggcagctttgctcgattggcgcagcattgtttggcttcctgtacgccccgctggtgatcaccgtgtacaccagaccacgctggctattgatttgctgatgatgcaaagcatgggtggtacgccagtgtggccgctgattgcgctgtcgaatatcgctcagggctccgccgtgataggcattatcatttccagccgcaagcacaatgaacgcgagatcccaggtgaggtcttccccagaactggggttgggaagggaaagagtctgggctaaccactccattagctgcagccctaccgccagcacctgggggcagggagttacagtcaaactcttaaaaaacaaatagccgaaagtgcagtgaggttaagcatcccctgaggactggacgagcagacctgcctgctttgcagaagacggggaggggaaggagagcagggccatctcct

SEQ ID NO: 129111 - DNA, 465 bp, Homo sapiens
atgaacccgtcagtatcaggcaatgggcgtctggcgctgaaagtagctaacctggcggaacgcaaccggatcgtgaaatcgaaaaacgcggcccggcgattgcccaggcgttcgacgctgaaggcaaaccgagcaaagcgtcagaaggttgggcgcgtggttgcggtattaccggcgaaacaccgaagcactgctgccgaatatggttgcgacttctctggcgaaactgccgatcccgaaactgatgcgttggggcgcaacgacgtgcacttcgtgcgtccggtgcacaccgtgaccctgctgctgggcgacaaagtcattccggcaaccattctgggcattcagtccgatcgcgtgattcgcggccaccgctttatgggcgagccggaattcaccatcgataacgccgatcagtatccggaaattctgcgtgacgtgggaaagtcatcgccgattacgaagaac

SEQ ID NO: 129112 - DNA, 1788 bp, Homo sapiens
atggctgctgtatcgcgcccatgtgaagggcgaaacaccgaagcactgctgccgaatatggttgcgacttctctggcgaaactgccgatcccgaaactgatgcgttggggcgcaacgtacgtgcacttcgtgcgtccggtgcacaccgtgaccctgctgctgggcgacaaagtcattccggcaaccattctgggcattcagtccgatcgcgtgattcgcggccaccgctttatgggcgagccggaattcaccatcgataacgccgatcagtatccggaaattctgcgtgacagtgggaaagtcatcgccgattacgaagaacgtaaggcgaagattaaagccgatgccgaagaagcagcgcgtaagattggcggtaacgctgacttaagcgaaacgctgctggaagaagtggcttcgctggtggagtggccggtcgttctgacgcaaaattcgagagaaattcctgcgattagccggaccgcactggtaccctacagcgcggacaatatgtatcagttagtgaatgacgttcagtcttatcctcagtttttgccgggttgtaccggaagtcggattctggagtccactcctgggcagatgactgcggcggtagatgtctctaaggctgggatcagcaaaacgtttactacccgcaaccagttgaccagtaaccaaagtattcttatgaatctggtggatgggccgttcaagaaattgattggtggatggaagtttacgccgctgagccaggaggcgtgtcgtatcgagtttcatctcgactttgagtttaccaataagttgattgaactcgcctttggtcgcgtgtttaaagagctggcggctaatatggtccaggcttttacggttcgtgcgaaagaggtttacagtgccagcatgaggtacatctatgtcatcgtgtacatctcctatagaccacctaatctgctcgatagtcacatcataggattttcgtccattactacccactgtgccgtcactagtcatcactacaactcgtgtgatatgacgatgacgatacactcttacgtcacaccctacatctctgtacgagtatcactcacgcagacatatgcgccatctccatctcgtaatctacgtatcacagatctaactatctatcgtgctatatcgagcgagaagtcgatcgatgatacccgtcatatccacaccatcgaatctcgttgtcgagtatgtggcgcccacgacagcagagacgctgaacggctggaccgatttgcgcaaacggcagacgagatacgcattgctgaccggggattcagttcgcgtcccgaatgtatccgctcacttgcttttggagaagctgattatatcgtccgggttcactggcgaggattgcgctggttaactgcagaaggaatgcgctttgacatgatgggttttctgcgcgggctggattgcgcattaatcagtaaaacccgactgctcagcgagaatcgtcgaaaaggacgagtagttcaggcggaaacgctggaagcagcgggccatgtgctattgctaacatcattaccggaagatgaatattcagcagagcaagtggctgattgttaccgtctgcgatggcaaattgaactggcttttaagcggctcaaaagtttgctgcacctggatgctttgcgtgcaaaggaacctgaactcgcgaaagttggtatatttgctaatctactcgccgcatttttaattgacgacataatccagccatcgctggatttcccccccagaagtgccggatccgaaaagaagaactaa

SEQ ID NO: 129113 - DNA, 1965 bp, Homo sapiens
atgtcgtctccgttacaccttttccacattcacaaggaaggacttaaactccggcgtctgcgtgttcgcatcaccaacgaatggcgttacagtattggcaataaagccttttttagctacgccttcatagccccagtgaatcggaataccgatggtatcgatatctttgccgttcgctttcagcgtgcgaatacgtttggtcaccaccgctttggctttgatatagccacggttggaggagactttcacggtatcgccctgggcaatgccaagtttattcgccagcgactccccgatttccacaaactgctctggctgcaaaatcgcgttcaacagcgcgtgtttggtccagtagtggaagtgctcggtcagacgataggtggttccgacatacgggaacttatcggctttacccaatgcttcggcgtcgtctttaaagatacgtgcagccgggttcgagataacgtttggatgcagcgggttagttcccagcggcgtttcaaacggctcgtagtgttccgggaacggaccttccgccatcttatcgagggcaaacagacgccccatgccttcctgctgcatgataaacggcccgacgccgctacccggaggcgctgcgctgtagtccggaatatcccagccggtccacttagtgccgtcccatttcagcaactgacgcttcggatcccacgggttaccctgcggatctgcggaggcgcggttatacagaatgcggcggttaagcggccatgcccatgcccagcccagcgtgttaccgaggccagacggatcggcgttatcacggcgtgccatctggttgccttccggcgtccagctaccggcgaaaatccagcagccacaggaggttgtaccgtcatcgcgcaattgggcgaacgaactaagttgttggcctttcttgacgattaccgcaccggttgccggatcggtaatatcggccagcgccttaccgttgctctccatcgccacttcttctgaagatggctcatgcggaatggcgtagttccatgtcatgttcagcacctggtccgggttcgcgccaccctgttcggcatacatcttgcgcaagcgcaggaagataccggagaggatctcgccgtcagtcagcgcaatccccggggcgtccgcacctttccagtgccactgtaaccagcgacctgagttaacgatagaaccgttctcttccgcgaagcaggtcgatggcagacggaacacttcggtctggatcttcgacgagtcaacttcgttcagctcaccgtggttctgccagaagttagaggtttcagtgttcagtgggtcgatggtgacgaggaacttcagtttcgacagacaaccgatcactttgtttttgttcgggaatgaggcaacagggttaaagccctggcagatatagccattgaccttggcctctttcatcatttctgtactttctgtgctctcttgtttcatattgtctttactgcgttccgtactgccgcctactggaacacggttataatatctggctaccgcttgtgttgcagaccaccgcgtaacctgccacggccgttccttcgttcgaagagtcgatgaacggtgctgcaccatgctgacaagccaaatctgtatcatggcttgccggagaacccggaaatcagcgaaaccgtgaaattctggaaaggcatctggaaaccgctcgcggctgttggctttgcggctacctttgcggccagtatcttccactacgtgggtgtcggtccgaaccgtgcggatgaggaagagaataatcactggatcaccgccttctgcttcatcctggcggcggtgagcgggctgggctttttgttcccgtccttcaactggttgatgcaaatcatgggcacaccgcagctggcgcgaattctgcacccgtttgtcggcgtggttatgtttgcctcgttcatcatcatgtttttccgttactggcat

SEQ ID NO: 129114 - DNA, 5623 bp, Homo sapiens
atgtctgagaaaacttttctggtggaaatcggcactgaagagctgccaccaaaagcactgcgcagcctggctgagtcctttgctgcgaactttactgcggagctggataacgctggcctcgcacacggcaccgttcaatggtttgctgctccgcgtcgtctggcgctgaaagtagctaacctggcggaagcgcaaccggatcgtgaaatcgaaaaacgcggcccggcgattgcccaggcgttcgacgctgaaggcaaaccgagcaaagcggcagaaggttgggcgcgtggttgcggtattaccgttgaccaggctgagcgtctgactaccgataaaggcgaatggctgctgtatcgcgcccatgtgaagggtagaaggcaccgaagcactgctgccgaatatggttgcgagttctgtggcgaaactgccgatcccgaaactgatgcgttggggcgcaagcgacgtgcacttcgtgcgtccggtgcacaccgtgaccctgctgctgggcgacaaagtcattccggcaaccattctgggcattcagtccgatcgcgtgattcgcggccaccgctttatgggcgagccggaattcaccatcgataacgccgatcagtatccggaaattctgcgtgagcgtgggaaagtcatcgccgattacgaagaacgtaaggcgaagattaaagccgatgccgaagaagcagcgcgtaagattggcgcgaaagcgtggggtacgaacgtcgagttccatgttcagaatcagccattcccgtgctgcacgggtggaggtgaaggccacgccgggttcatgaagatggcggtccagggttttcaggtggtggaagccattaacggtgccaccacggaggaaggggcctttgtccaggggaacaggctgcaggccggtgcctttaactactccctcaaccgggacagtgatgagagctggtatctgcgcagtgaaaatgcttatcgtgcagaagtccccctgtatgcctccatgctgacacaggcaagggactatgaccggattgtggcaggctcccgcagccatcagaccggtgtaaatggtgaaaacaacagcgtccgtctcagcattcaggggggtcatctcggtcacgataacaatggcggtattgcccgtggggccacgccggaaagcagcggcagctatggattcgtccgtctggagggtgacctgatgagaacagaggttgccgaactgctgggcggtagcccggaacaggtttgcgtggcggcggaaattggcatggaacacaaccttggtttaacctgcgacccggttgcagggcaggttcaggtgccgtgcattgagcgtaatgccattgcctctgtgaaggcgattaacgccgcgcggatggctctgcgccgcaccagtgcaccgcgcgtctcgctggataaggtcatcgaaacgatgtacgaaaccggtaaggacatgaacgccaaataccgcgaaacctcacgcggtggtctggcaatcaaagtccaggtggcccgcatgcaaaaagcacaacggatcattaaaacctatcgtcgtaatcgaatgattgtttgtacgatttgcgcactcgttacgctcgcttcgaccctgagcgtgcgatttattatattcatcgcaccgacaatagcgcccgttaccatagagcccagcacaaacgaaccaataacccgcagcggatcttcaatcgccatcgggatcgccccttcggtaatacctgccagccctaacagccaggcgcggtgcgagcatcgtggaagcggttacggtaaatgccgaaaccattttgacggaggcgaaaatggcatacgggccgtaaacgccgttcgccattgcgcccaggcagaatgcataagcggctttattcactggccctccaagaccgaccgggtgcagtttgcgatgccggagtctgatgcggaggaaaacccgtctaaacagatggaccagcagcagtgtcttgaaattgagaaaacactacctatcccggcggcgaatgtgctggagacggtgcgcggcctgttgcagcatcgctcatttaccatgagcaacccgaaccgtattcgttcgttgattggcgcgtttgcgggcagcaatccggcagcgttccatgccgaagatggcagcggttacctgttcctggtggaaatgcttaccgacctcaacagccgtaacccgcaggtggcttcacgtctgattgaaccgctgattcgcctgaaacgttacgatgccaaacgtcaggagaaaatgcgcgcggcgctggaacagttgaaagggctggaaaatctctctggcgatctcgccgccaacgaagtccagattctggccttctttcagggtgacgtaagcttttttccagtcgctacgacgaccgatacgctgtccgtgacgagcaaagacgcgcgtttcattgtaaacctcctgtatttgccggagactcacgctgaaacgtcggatggcgcttatgttcacctgaaaccaaaacactcctgtgcagaggatcccgtagacgtatacgcagtatctaccgatactcacttcacccacaaagcatggcacagcagctctgaaaccatcgctaaaatcaaatatgcgatgatcggcgacccgactggcgccctgacccgtaacttcgacaacatgcgtgaagatgaaggtctggctgaccgtgcgaccttcgttgttgacccgcagggtatcatccaggcaatcgaagttaccgctgaaggcattggccgtgacgcgtctgacctgctgcgtaaaatcaaagcagcacagtacgtagcttctcacccagcccgtcatcatctacgcagacgcgtgtacctctgccagctgacgttgcagactccggcggacgacacctacgctcggcacttccacgctctcatcttttccaacgatggaacccagcgcacaacccgtgtgcgaactttaatcgcttcggcgtcgcttggcggcgtgccaaaggccccacaacgttcaaccgctttgacgatgtttttccgccaattacttccggttggtcgacatgtgatcaggtgcacttttgccctgcatccgcacgcccgaaagtcctaccggattcttgatcccttcctgatagtcaatcgccatactcttggcggggatcacattgcagcacacgatgctcatcgcgcaataccaacatcaattacgtggacgttagcgcccgcttgttctgccagcacacacacgccggttgttccacgggtcatattttcagcctgtatggctggtcaccttactttatggagaaataagcgaccccttcctactaacacgatgcaatccacggtgcctctgcacagcagacaaaaggcatttgttagtgccactgctcctacgcttacttctttcagaggccaacttggtcttctgcttaaccagtggggatgtattctagaggatcccgtgaacccggcgattgatagcgatgcgctggcaaatcaaatcactatggcgggcctggaagttgacggtgtagaaccggttgccggcagcttccacggcgtggtcgttggtgaagtggttgagtgtgcgcagcatccgaacgctgacaaactgcgtgtgacaaaagtgaatgtcggcggcgatcgcctgctggacatcgtctgcggtgcgccaaactgccgtcagggcctgcgtgtagcggtagcgaccattggtgctgttctgccgggtgatttcaaaattaaagcggcgaaactgcgtggcgaaccgtctgaagggatgctgtgctccttctctgaactgggcatttctgacgatcacagcggcattatcgaactgcctgcggatgcgccgattggcaccgatatccgtgaatacctgaaacttgatgacaacaccatcgaaatcagcgtgacgccaaaccgtgccgactgcttaggcatcattggtgttgcgcgtgacgttgccgtgctgaaccagctgccgctggttcaaccggaaatcgttccggttggtgcgaccatcgacgacacgctgccgattacagtcgaagcgccggaagcctgcccgcgttatcttggccgtgtggcattaacggttaaggcgccaactccgctgtggatgaaagaaaaattgcgtcgttgcgggatccgttctatcgatgcagttgttgacgtcaccaactatgtgctgctcgaactgggccagccgatgcacgctttcgataaagatcgcattgaaggcggcattgtggtgcggatggcgaaagagggcgaaacgctggtgctgctcgacggtactgaagcgaagctgaatgctgacactctggtcatcgccgaccacaacaaggcgctggcgatgggcggcatcttcggtggcgaacactctggcgtgaatgacgaaacacaaaacgtgctgctggaatgcgcgttctttagcccgctgtctatcaccggtcgtgctcgtcgtcatggcctgcataccgatgcgtctcaccgttatgagcgtggcgttgatccggcactgcagcacaaagcgatggaacgtgcgacccgtctgctgatcgacatctgcggtggtgaggctggcccggtaattgatatcaccaacgaagcaacgctgccgaagcgtgcaaccatcactctacgtcgtagcaaactggatcgcctgatcggccatcatattgcggatgagcaggtaactgacattctgcgtcgtctcggctgcgaagtgaccgaaggcaaagacgaatggcaggcagttgcgccgagctggcgtttcgatatggagattgaagaaatctgcctaccgtatgtgaacgggagctgtgtgtgtttgcttttcaaaccctgggagccacttagaattccacattacaaagtcaggaaacaacaggtgcatggagaggatgtgactcaacaggaacactttcacactgttgtgcccactgttgatgtctttcagatttccacaaaagagcgatttggattgggacatcagctgaaaaatggctcacacattgaaaactggcactccatcctgaggaatggtctggttgttgcttctaatacacgattgcaggaatcaagacagaatagtacagtggaggaagattctgaaggtgacaatgattccgaagaattttattacggaggacagagaataaaatacctaggaatccaacttacaagggatgtgaaggacctcttcaaggagaactacaaaccactgctcaacgaaataaaagaggatacaaacaaatggaagaatattccatggtcatggataggaagaatcaatttcgtgaaaatagccatactgcccaaggtggtagatctactagtatccatgtgtaggtctgcgttggaatctcctagaaaagttgtgattttcgagccatatccttctgtggtagatcctaatgatcctcagatgttggccttcaaccccaggctatctgaagtccaaccagcgcttccattagtcaaacctaaccggaaggtagttggcaagggacctgtggaaatgcagcctaaaggtggaagaatgaggaatggacttgagagcaaacaaaacacaatggcctatgtgtatatccttgtcaaatgcatagtgctgttagacattttttga

SEQ ID NO: 129115 - DNA, 846 bp, Homo sapiens
ttagcgtagaagagggaatgatttaaacaagcgttcgatggcgtcgagggagtcctgtgttgaaatgccgtgtaaatctgacggataaggtacgtgatacaccgaaccagggaacgggccgaagccgattttgtacggcgcaacttttccggtcagcgccatggtcatatacgtacgaccgtgaaagccgccgctaaacgcaatcacgccagggcgtccggtatgggcgcgagcaattttcaccgcgttttccaccgcttccgcaccggtggtgaagaacgcggttttggcctgcccgctcaccggggcaagggcgttgattttctccgccagggtgacgtagctttcatacggcacaatctgatacgcggtgtgggtaaactgttgcagttgctgctccaccgccgcgaccagatcagggtggcgatgtccggtattcagcaccgcaatgcctctgttattcgttctttgtgtagtcccctcattaagtttgggggtaacgcaaaattcgaagagaaattcctcgcggtgccggctgaagcgctggtttacaccatgaaaggtgaccagaaatacttcccggtgtatgcgaacgacggcaaactgctgccgaactttatcttcgttgccaacatcgaatcgaaagatccgcagcagattatctccggtaacgagaaagtcgttcgtccgcgtctggcggatgccgagttcttcttccccagcaaacagaaataatccccacagaaagaaaaacaaccaccgaagtttaactccaccccaaagtgcgtatgtccagtcctgctgcctaggctggaaggtcctcatgagccggtgctgtgtctccat

SEQ ID NO: 129116 - DNA, 3852 bp, Homo sapiens
atggatcttggggccaatggctggcaaaccttccgctacgtagtgttgccgaatctcagttcggcgttactggcaggaggaatgctggcgtttgccttgtcgttcgatgaaatcatcgttacgacctttacggcagagcaggtcgatgctgctgtgcgcgcggcagatgcagcatttgccgaatgggggcaaaccacgccgaaagtgcgtgcggaatgtctgctgaaactggctgatgttatcgaagaaaatggtcaggtttttgccgaactggagtccagtaataacacggcgtttgcgcgggcgtcatcgaatggtgatctgccgacaaaagcggacctgcaggcgcaacttgactcactaaataaacaaaaagatctttctgctcaggacaaactggtgcagcaggatctgacagatacattagccaccctcgataaaatcgatcgcataaaagaagagacagttcagctacggcaaaaagtcgctgaagcgccggaaaaaatgcgccaggcgaccgcggcgttgacagcacttagcgatgtcgataacgacgaagaaacgcgcaaaattctgagcacgctgtcgttgcgccagctggaaactcgcgttgcccaggcgctggacgatttgcaaaacgcacaaaacgatctggcgtcttataacagccagctggtttcgttacagacgcagcccgaacgcgtgcaaaatgcgatgtataacgcttcgcagcagctgcaacaaattcgcagtcgtctggatgggactgatgtcggcgagacaggcttacgtcccaggcagaaagtgttaatgcaggcgcagcaagcgttgctgaatgcggagatgaccagcagcgcgctggaagcgaaaatcgcccaactggaagcggaacaggcgcgtaagctgaagaaaaccgaaaaagattcgctgaaagacgaagtgctgcactctctgctgccgcgtgctttcagccgttttagccagacaatgatgtggatcgacacggttaacggtttgattatggtggactgcgccagtgccaaaaaagcggaagatacgctggcattactgcgtaaaagcctggggtcgttaccggttgtaccattgagcatggaaaacccgattgaactgacgctgaccgaatgggttcgctccggtagtgcggcacagggcttccagctgcttgatgaagccgagctgaaatcgttgctggaagatggcggcgtgatccgcgcgaagaaacaagatctgaccagcgaagagatcaccaatcacattgaagccggaaaagtggtgactaaactggcgctcgactggcagcagcgcattcagtttgtgatgtgcgacgatggttcgctcaagcgtctgaagttctgcgacgagctgcgcgatcaaaacgaagatatcgaccgtgaagatttcgcccagcgttttgatgccgatttcatcctgatgactggtgactggcagcgtaattcaaaagagatgacagacacacagtatattggccgcttcgccccctctccttccggcgagcttcattttggctctctgatcgccgcgctcggcagctatttgcaggctcgcgcccggcaaggtcgctggctggtacgcatagaagatatcgacccgcctcgtgaagttcccggtgccgcagaaactatcctgcgccagctggaacattacggtctgcactgggacggcgatgttctctggcaatcgcaacgtcacgacgcctatcgtgaagcactcgcctggttacatgaacaaggactaagttattactgcacctgtacgcgtgcgcgtattcaaagcattggcggtatttacgacggtcattgccgggtgttgcatcatggaccagacaacgccgcagtgcgtatccgccagcagcatccggtcacgcaatttactgaccagctgcgcggcattattcacgccgacgaaaaactggcacgggaagattttatcattcatcgccgtgatgggttgttcgcctacaacctggctgttgtggttgatgatcatttccagggcgttacagaaatagtgcgtggggctgatctgattgaaccaacaattaattcccaagggtgtgggtatttccgttgggtgttgtcgaaagtcgaataccagacgtattcgccaggcgtggcacaaccggtcatcgcacccgtattcggccagtgtagcgtaaattcgcgaccatcggccgtaattgaaaattttggggaatgcctaaggacgccccaaagcatgccaccggtagatccttgctggaatttatcgggactggataacgtggctcgcaacaggcaaccgttcaatggtttgcttgctccgcgtcgtctggcgctgaaagtagctaacctggcggaagcgcaaccggatcgtgaaatcgaaaaacgcggcccggcgattgcccaggcgttcgacgctgaaggcaaaccgagcaaagcggcagaaggttgggcgcgtggttgcggtattaccgttgaccaggctgagcgtctgactaccgataaaggcgaatggctgctgtatcgcgcccatgtgaagggcgaaagcaccgaagcactgctgccgaatatggttgcgacttctctggcgaaactgccgatcccgaaactgatgcgttggggcgcaagcgacgtgcacttcgtgcgtccggtgcacaccgtgaccctgctgctgggcgacaaagtcattccggcaaccattctgggcattcagtccgatcgcgtgattcgcggccaccgctttatgggcgagccggaattcaccatcgataacgccgatcagtatccggaaattctgcgtgagcgtgggaaagtcatcgccgattacgaagaacgtaaggcgaagattaaagccgatgccgaagaagcagcgcgtaagattggcggtaacgctgacttaagcgaaagcctgctggaagaagtggcttcgctggtggagtggccggtcgttctgaccgcaaaattcgaagagaaattcctcgcggtgccggctgaagcgctggtttacaccatgaaaggtgaccagaaatacttcccgggtattggtgccgggttactgttcggtaagttgctgtcggtgtcatttggtccggcggggcttgggctggcggcaaatttccgccagttgattaccgtgctcggcgtgcttgccggggctggcatctttaacggtgtaaccaaatacgttgcccagtaccatgataatccgcaacagctgcgccgcgtggtcggcacttcatcagcgatggtacttggtttctctacgctgatggcgctggtttttgtgctggcagctgcgccaatcagccagggattgtttggtaataccgactatcaggggctggtgcgtttagtggcgctggtgcaaatggggatcgcctggggcaacctgttactggcgctgatgaaaggctttcgcgatgccgcaggtaatgcgttatcgctgattgtcggcagcttgattggcgttctcgcgtactacgtcagttaccgtttgggcggttatgaaggggcgttgctgggtctggcgctgattcccgcgctggtggtaattcctgccgccatcatgttgatcaaacgtggtgtcatcccgttaagctatctgaaacccagctgggataacggtctggcagggcagttgagcaaatttacgctcatggcgttgattacgtcggtgaccttgcctgcggcgcggctgcgttggctgaactcagccagcgtggtaccaaatatcgcctgcgcgatttccggtttgcttaactgcaccagttgcagcacctcttcttcgctgacggtttaccgccggattttgcaacactggtaccggagctga

SEQ ID NO: 129117 - DNA, 1186 bp, Homo sapiens
tcacatggccaccagatctatatcccacttattccagccacaatcatccatcgtgcacaggccattcgaaccgtcccggataaacagggtggtattcggccattccatttcggtggccagcaaacacatttccgcccaatttccagggccttgccgccaaaactgtttggggaaaaggggccgaatcgggttgccggggcccttctttcggctattaaccgcccaagcttgggcgaaaaagggggatatttttgccctcccattccaacccgaataccaaccggatttgcccaaactgctgcatgaacggcgtctcgaccgcgaacactacatcgaagagttcgttggtcatctgcgcgtggaccaaacacgcgctgttgaacgcgattttgcagccagagcagttgtggaaatcggggagtcgctggcgaataaacttggcattgcccaggggataccgtgaaagtctcctccaaccgtggcaggctgagcgtctgactaccgataaaggcgaatggctgctgtatcggcccatgtgaagggcgaaagcaccgaagcactgctgccgaatatggttggacttctctggcgaaactgccgatcccgaaactgatgcgttggggcgcagcgacgtgcacttcgtgcgtccggtgcacaccgtgaccctgctgctggggacaaagtcattccggcaaccattctgggcattcagtccgatcgcgtgatcgcggccaccggtaaggcgaagattaaagccgatgccgaagaagcagcgcgtagattggcggtaacgctgacttaagcgaaagcctgctggaagaagtggctcgctggtggagtggccggtcgttctgaacgcaaaattcgacgagaaattctcgcggtgccggctgaagcgctggtttacaccatgaaaggtgaccagaatacttcccggtgtatgcgaacgacggcaaacgctgccgaactttatctcgtgccaacatcgaatcgaaagatccgcaagattatctccggtaacgagaagtcgttcgtccggttggcggatgccgagttcttcttcaaacgacgtaaaaacgtctttttttaccgcaccaaaagttgccgccgagccaaatacttcaccagcagacgagaaattacgccagtttttgccatcgacatcgtgataattggacatcggcat

SEQ ID NO: 129118 - DNA, 2344 bp, Homo sapiens
tcagggggctgtgctgggctccacggtggcctctgcagcaaggagccgtttcaggcgtctgtccagcagggagtcgctggtcatgcctgtgccccggcggcactccaggtcccggtctgtggaaccctcagtgactgtggcagcagagcagcctctctttgcgaaaacccttcttttatatctctgtacggtcgcctggttgcgacttctctggcgaaactgccgatcccgaaactgatgcgttggggcgcaagcgacgtgcacttcgtgcgtccggtgcacaccgtgaccctgctgcatgggcgacaaagtcattccggcaaccattctgggcattcagtccgatcgcgtgattcgcggccaccgctttatgggcgagccggaattcaccatcgataacgccgatcagtatccggaaattctgcgtgagcgtgggaaagtcatcgccgattacgaagaacgtaaggcgaagattaaagccgatgccgaagaagcagcgcgtaagattggcggtaacgctgacgcaaaattcgaagagaaattcctcgcggtgccggctgaagcgctggtttacaccatgaaaggtgaccagaaatacttcccggtgtatgcgaacgacggcaaactgctgccgaactttatcttcgttgccaacatcgaatcgaaagatccgcagcagattatcgcatccaggcgctggctggctggattgctgaacaagattggcgctgacgttaaccacgctacccgtgcgggtctgctgtctaagtgcgacctgatgaccaacatggtcttcgagttcaccgacacccagggcgttatggggatgcactatgcgcgtcacgatggcgaagcggaagatgtcgcggtggcgctgaatgagcagtatcagccgcgttttgctggtgatgacctgccgtccaacccagtagcttgtgcgctggcgattgctgacaagatggataccctggcgggtatcttcggtatcggtcagcatccgaaaggcgacaaagacccgtttgcgctgcgtcgtgccgcgcttggcgtgctgcgaattatcgttgagaagaacctcaaccttgatctgcaaacgctgaccgaagaagcggtgcgtctgtatggcgataagctgactaatgccaacgtagttgatgatgttatcgactttatgctcggtcgcttccgcgcctggtatcaggacgaaggttataccgttgacaccatccaggcggtactggcgcgtcgtccgactcgtccggctgatttcgatgattggcacgccctcgggcgggctggcacaggtgatgttgttgtaggtgtacgcgggcggctggcaatcgtccccctcacagatggcctggacgaagcggggcacagcactggggttctgcagggcgaagtcccgcagcgccttgagagggcagccacagtcccaggggttaccctccagccacaggcgctccaggcccgggggctgcggcgtgaaggtccgcagtgagttgttcctgaggctgaggtagcgcagccgccccagtggtgccaagaggctgttgggcaatgcctccaggcggttgtgcgagacgtccagccagaaggcccgctgcagggggcccagggcgtccgccggcagctctgccaggcggttgcgggagagcagcaggtactccagcttgcccaggccctggaagaggcggtggggcaggtgcgtgagctggttggaggtcaggtcgagctccagcagctccgccagcccccacaggctctgctcctcaatgcccacgaggccgttgtccttgaggaagagtcggcggaacccccgcggcgggagagccaggtgcggcaactggcgtggatcggcgatggcgtatgggtgtccatccgcctggacttcaccctgaagctctttctttctggctgcccttaacatttttttcttcatttcaaccttggtgaatctgacgactatatgtcttggggttgctcttctcaagaagtgtctttgtgatgttctccgaattttctgaatttgaatgttggcctgtcttgctatgttggggaagttctcctggataatatcctgaattgtgttttccaaattggttccattctcccagtcactttcaggtacaccagtcaaatgtaggtttggtcttttcacatagtcccgtatttcttggaggctttgttcattccttttcattctttcttctctaatcttctcttcacgctttatttcattaagttgatcttcaatctctgatattttttcttctgcttgatcaattcggctatcgatacttgtgtatgcttcacgaagttctcgtgctgtgtttttcagctccat

SEQ ID NO: 129119 - DNA, 384 bp, Homo sapiens
  misc_feature (1)...(384): n = a,t,c or g
ctgctcggtgcgtttatctacaacagtatcggtattccggtcgccgccggtattttgtggccgttcactggaacactgcttaacccggtagttgccggagcggcaatggcgctctcgtcgattaccgtagtgagtaacgccaaccggttggcgtaagcgtcgcatcaggcaatggtgctcggatgccggatgcggcgtaaacgccttatccggcctacggttcagccacagcctggcgctgttctcggcggcgatgttcattctcggggtggtcagcggcatcaccatgtcgatcggnccctgaattctttcttgtgtgagatccaagaaccccctcttggtgtctggatctggacccctttcttgtaacagcaccatccacat

SEQ ID NO: 129120 - DNA, 723 bp, Homo sapiens
acaaaatcacctaaaatcgcccgctcgcggcatatcccgctatgccattttatttttgaacgcaggccaatcatgactaacagcaatcgcatcaagctcacatggattagctttctctcctacgcactgactggtgcgttggttattgtccccgggatggtgatggaaaatatcgccgattatttcaatctgcctgtttccagtatgagtaataccttcaccttcctcaacgccggcattttaatctctatcttcctcaacgcctggctgatggaaatcgtcccgttgaaaacgcagttacgttttggctttctcctgatggtgctgccggtagccggtttgatgttcagccacagcctggcgctgttctcggcggcgatgttcattctcggggtggtcagcggcatcaccatgtcgattggtacattcctggtaacacaaatgtatgaagggcgtcagcgcggttaccgcctgtttttggccgcctccttattcagtatggctggagatgattttcccaatgatcgccgcgtttttactggcgcccagcagttagtggtagtgggtttatgcctgcctcgggctggcgtatgtcactatttttattatgaccttcggctgtgagttcccggcgttgggcaaacatgcgccaaaatcgtatgctccggtagagaaagtaaagtgggggatcctcgggggcgcgagcagctttcgtgcagtcga

SEQ ID NO: 129121 - DNA, 1046 bp, Homo sapiens
tgtgtgttgattttgtactctgcaactatgccaaaactatttgttagctcatagatgttttgtggattatatgctaaataatgttatctgcaaatagagtagttttacttctgcctttcaatttgaatgtcttttattttttttttcttgcctatttgctctggctagaacttttaatacagtgttgaattgcagtggtgtgaaagcactatcattgcctgttcatgatcttagggggggatctttcagtctttcactatggagtatgttacctatgagttttttgtatatgtgctttattatgtggaggaacaggcagcagtctttgctgtttggcagcctccactggtgataccgaggcaaacagggtctggagtggacctccagcaaactccagcagacctgcagcagaggggcctgactattagaaggaaaactaacaaacagaaagcaataacatcaacattaacaaaaagcacgcccatgcaaaaaacctatccaaagtgcacaaaactgaacagagaagagtatgacgaattgacagaagtaggcagaaggtgggtaataataacaaactcctttgagctaaaggagcatgttctaacccaatggaaggaagctaagaaccttgataaaaggttacaggaagggctaactagaataaccagtttagagaagaagataaatgacctgatggtgctgaaaaacacagcacgagaacttcatgaagcatacacaagtatcaatagtcgaattgatcaagcggaagaaaggatatcagagattgaagatcaacttaatgaaataaagcttgaagacaagattagaggaaaaagaataaaaaacaaacaaacaaacaaagcctctaaaaaatgtgggactatgtgaaaagaccaaacctacgattgattggtgtacctgaaagtgatgaggagaatgtaaccgagctggaaaacactcttcaggatatcatccaggagaacttccccaatctagcaagacaggccaacattcaaattcaggaaatacaaacactactaagataa

SEQ ID NO: 129122 - DNA, 1134 bp, Homo sapiens
atggcgaccggctttctccctgaacgatcggccactttaccggcaaataacatcgcagctgccatccccgccagatatacggagaacgcaatatgcaactgcgcttcgctggcattgagatcggcggcgatgcgcgcacaaaatcacggttataccaaagagaatgacaatcgccggaataagattgccgccccagaccgtgaacatctgattgggaaacttcttgcgagctttgattgcaagcactgcgggaataatgaccgcccagatggtggcgcacagcccggcaccgccgattccgtaaataaagccgttcgggaagatcagatacaacccgtctgggacagcaacggataccgaggcgcggggccgggggttggtttattaaaaaaaaccagcgcccgggtggttacgttactggggagcctgcgcaaaggctcatttaatggcatggttgcacggaccctgccgaaaattgctccggcgagcatggaagtcaatgcgttaccatccattgccgacattcccttgtatgacgctgacgtacagcaggaagaaggttttccagcaacggttgaagctctggcggaacagatccgtcaggctgacggtgtggtgatcgtcacgccggaatataactactcggtaccgggtgatgcgtgcatacatgacagcttttttgttgaggaagggcccgaagaactggatacttcggcacgtaatgccggggctctaacccgccgccgcgaaattcgtgatgctgcaactctgctacgtctggggctggcttacggccccggggggatgtcattacgtgaagtcactgcatgggctcagctccatgacgttgcaacattatctgacgtggctctcctgaagcggctgcggaatgccgccgactggtttggcatacttgccgcacaaacacttgctgtacgcgccgcagttacgggttgtacaagcggaaagagattgcgtcttgtcgatggaacagcaatcagtgcgcccgggggcggcagcgctgaatggcgactacatatgggatatgatcctcatacctgtcagttcactgattttgagctaaccgacagcagagacgctgaacggctggaccggcccgttacactctattag

SEQ ID NO: 129123 - DNA, 756 bp, Homo sapiens
ttaaccggcggcgtgtttaacttcaccggtggtgtggtcggcataaccgttccggtggtgagaaagtacctggcacacggttacggtttcgcacctgcactggtttatatctccgccatctagttgattggcgcgctctcttatatcctgctggtgggcgatgagaagcgcgttggctaatccttcaactgtggaatatgtgccacaccactgcgcataatccactttcttaaagccggtgcggtcaagacattggctttttactatcttgccgaagagttttaaacgcatttgcgggtggcacacaaataaatcggtattgagcttctctggctgcttcagtaacaccgaacgcagaatagttgtgctatccaccgcatagctaaatccctccaacaagctggcgcttattaatcccgccgcttcaccaatcataaaaggcgttgatcttaccgcaaaccaaatacatgcattgccgacattcccttgtatgacgctgacgtacagcaggaataatgttttccagcaacggttgaagctctgggggaacagatccgtcaggctgacggtgtggtgatcgtcacgccggaatataactactctgtaccgggtgggctgaaaaatgccatctactggctttcccgcctgcgccagattctggttttcctcgatgcaatggtgatgaacaagccggaatttatgggcggcgtgattcaaaacaaagttgatccgcaaaccggaaaagtgattgatcat

SEQ ID NO: 129124 - DNA, 1320 bp, Homo sapiens
tacgaagcgcgggcgcagctcatcacgctgcgccgaagcgtgctaaaactaaccggtgatgttttgaatgacgatccgcgcgatctgcagttgctgcccattgccggacgcctgaaatgtgctcatgtaaatcatgtagaagcgttatgcgacgcggaagacgtgctggtgtggtccgtggcggtcacgcccacgattgaaaagctcagtgtctgggagttagatggcaaacacggctggaaaagcctgccggatattcacagccgcgccaacaatcctaccagccggatgatgcgttttgcccaactctctaccgtgaaggctttttcgccaaattgatagacaaccacaggagtcatcatgtctgaaaaattgcaggtggttacgttactggggagcctgcgcaaaggctcatttaatggcatggttgcacgtaccctgccgaaaattgctccggcgagcatggaagtcaatgcgttaccatccattgccgacattcccttgtatgacgctgacgtacagcaggaagaaggttttccagcaacggttgaagctctggcggaacagatccgtcaggctgacggtgtggtgatcgtcacgccggaatataactactttgtaccgggtgggctgaaaaatgccatggactggctttcccgcctgccggatcaaccgctggccggtaaaccggtattgattcaaaccagctcaatgggcgtgattggcggcgcgcgctgtcagtatcacctgcgccagattctggttttcctcgatgcaatggtgatgaacaagccggaatttatgggcggcgtgattcagaacaaagttgatccgcaaaccggagaagtgattgatcagggtacgctggaccacctgaccgggcaattgaccgcatttggtgagtttattcagcgagttaagatctaaataaaaaacccgccagcaatcatgcatggcgggtttttaacgcgctatcgattttaatgagcgtcgataaagacaatcttcaggataaacagcagcgcaacgatgattacgcacgggcttagatcacgcagaccggcggtaccgatttttatcacgccagtagagataaaggccagcgcggattcctttgggaattcaaaaaagctgaaacggggttattacggggggaaataaaacccccgaaacagaaattcggaagataccttttagaaggggaacctgggggggatttgcaaactttggcacttggcccggggaatttaaccaacggcggtggaccttggaaaaaaccccgggggggttaccccaactttaataggcgcttggcagaca

SEQ ID NO: 129125 - DNA, 641 bp, Homo sapiens
  misc_feature (1)...(641): n = a,t,c or g
gagcaagatgaacagaaactgaggttttgtaaacgccacctttatgggcagcaaccccgatcaccggtggaaatacgtcttcagcacgtcgcaatcgcgtaccaaacacatcacgcatatgattaatttgttcaattgtataaccaacacgttgctcaacccgtcctcgaatttccatatccgggtgcggtagtcgccctgctttctcggcatctctgatagcctgagaagaaaccccaactaaatccgctgcttcacctattctccagcgccgggttattttcctcgcttccgggctgtcatcattaaactgtgcaatggcgatagccttcgtcatttcatgaccagcgtttatgcactgggtaaggggttccatgaggttcattctgaacataccttaatcaatggtttgcgggtttttatataancttgcgaattaatgtggagggaccaccaaatcgcagagtttcaaaaacccgagggtgtgttaatataagacaactctccaaagggagtatagaggagcacacccttagncactaatatcattgcgctccccgacccgggacccgacctagggagggacttgcngagacccaaagaaaacgtgtttggaaatacttttaccttagcgcagagan

SEQ ID NO: 129126 - DNA, 6021 bp, Homo sapiens
tattttggcagccttatccaagtctggtacaacatagcaaagagaacaggctatgaaataagatggcaagaaagaaatttagtggattggaaatctctctgattgtcctttttgtcatagttactataatagctattgccttaattgttgttttagcaactaagacacctgctgttgatgaaattagtgattctacttcaactccagctactactcgtgtgactacaaatccttctgattcaggaaaatgtccaaatgtgttaaatgatcctgtcaatgtgagaataaactgcattccagaacaattcccaacagagggaatttgtgcacagagaggctgctgctggaggccgtggaatgactctcttattccttggtgcttcttcgttgataatcatggttataacgttcaagacatgacaacaacaagtattggagttgaagccaaattaaacaggataccttcacctacactatttggaaatgacatcaacagtgttctcttcacaactcaaaatcagacacccaatcgtttccggttcaagattactgatccaaataatagaagatatgaagttcctcatcagtatgtaaaagagtttactggacccacagtttctgatacgttgtatgatgtgaaggttgcccaaaacccatttagcatccaagttattaggaaaagcaacggtaaaactttgtttgacaccagcattggtcccttagtgtactctgaccagtacttacagatctcagcccgtcttccaagtgattatatttatggtattggagaacaagttcataagagatttcgtcatgatttatcctggaaaacatggccaatttttactcgagaccaacttcctggtgataataataataatttatacggccatcaaacattctttatgtgtattgaagatacatctggaaagtcattcggtgtttttttaatgaatagcaatgcaatggagatttttatccagcctactccaatagtaacatatagagttaccggtggcattctggatttttacatccttctaggagatacaccagaacaagtagttcaacagtatcaacagcttgttggactaccagcaatgccagcatattggaatcttggattccaactaagtcgctggaattataagtcactagatgtagtgaaagaagtggtaaggagaaaccgggaagctggcataccatttgatacacaggtcactgatattgactacatggaagacaagaaagactttacttatgatcaagttgcgtttaacggactccctcaatttgtgcaagatttgcatgaccatggacagaaatatgtcatcatcttggaccctgcaatttccataggtcgacgtgccaatggaacaacatatgcaacctatgagaggggaaacacacaacatgtgtggataaatgagtcagatggaagtacaccaattattggagaggtatggccaggattaacagtataccctgatttcactaatccaaactgcattgattggtgggcaaatgaatgcagtattttccatcaagaagtgcaatatgatggactttggattgacatgaatgaagtttccagctttattcaaggttcaacaaaaggatgtaatgtaaacaaattgaattatccaccgtttactcctgatattcttgacaaactcatgtattccaaaacaatttgcatggatgctgtgcagaactggggtaaacagtatgatgttcatagcctctatggatacagcatggctatagccacagagcaagctgtacaaaaagtttttcctaataagagaagcttcattcttacccgctcaacatttgctggatctggaagacatgctgctcattggttaggagacaatactgcttcatgggaacaaatggaatggtctataactggaatgctggagttcagtttgtttggaatacctttggttggagcagacatctgtggatttgtggctgaaaccacagaagaactttgcagaagatggatgcaacttggggcattttatccattttccagaaaccataattctgacggatatgaacatcaggatcctgcattttttgggcagaattcacttttggttaaatcatcaaggcagtatttaactattcgctacaccttattacccttcctctacactctgttttataaagcccatgtgtttggagaaacagtagcaagaccagttcttcatgagttttatgaggatacgaacagctggattgaggacactgagtttttgtggggccctgcattacttattactcctgttctaaaacagggagcagatactgtgagtgcctacatccctgatgctatttggtatgattatgaatctggtgcaaaaaggccatggaggaaacaacgggttgatatgtatcttccagcagacaaaataggattacatcttagaggaggttatatcatccccattcaagaaccagatgtaacaacaacagcaagccgtaagaatcctctaggacttatagtcgcattaggtgaaaacaacacagccaaaggagactttttctgggatgatggagaaactaaagatacaatacaaaatggcaactacatattatatacattttcagtttctaataacacattagatattgtgtgcacacattcatcatatcaggaaggaactaccttagcatttcagactgtaaaaatccttgggttgacagacagtgttacagaagttagagtggcggaaaataatcaaccaatgaacgctcattccaatttcacttatgatgcttctaaccaggttctcctaattgcagatctcaaacttaatcttggaagaaactttagtgttcaatggaatcaaattttctcagaaaatgaaagatttaattgttatccagatgcagatttggcaactgaacaaaagtgcacacaacgtggctgtgtatggagaacgggttcttctctatccaaagcacctgagtgttactttcccagacaagataactcttattcagtcaactcagctcgctattcatccatgggtataacagctgacctccaactaaatactgcaaatgccagaataaagttaccttctgaccccatctcaactcttcgtgtggaggtgaaatatcacaaaaatgatatgttgcagtttaagatttatgatccccaaaagaagagatatgaagtaccagtaccgttaaacattccaaccaccccaataagtacttatgaagacagactttatgatgtggaaatcaaggaaaatccttttggcatccagattcgacggagaagcagtggaagagtcatttgggattcttggctgcctggatttgcttttaatgaccagttcattcaaatatcgactcgcctgccatcagaatatatatatggttttggggaagtggaacatacagcatttaagcgagatctgaactggaatacttggggaatgttcacaagagaccaaccccctggttacaaacttaattcctatggatttcatccctattacatggctctggaagaggagggcaatgctcatggtgttttcttactcaacagcaatgcaatggatgttacattccagccaactcctgctctaacttaccgtacagttggagggatcttggatttttatatgtttttgggcccaactccacaagttgcaacaaagcaataccatgaagtaattggccatccagtcatgccagcttattgggctttgggattccaattatgtcgttatggatatgcaaatacttcagaggttcgggaattatatgacgctatggtggctgctaacatcccctatgatgttcagtacacagacattgactacatggaaaggcagctagactttacaattggtgaagcattccaggaccttcctcagtttgttgacaaaataagaggagaaggaatgagatacattattatcctggatccagcaatttcaggaaatgaaacaaagacttaccctgcatttgaaagaggacagcagaatgatgtctttgtcaaatggccaaacaccaatgacatttgttgggcaaaggtttggccagatttgcccaacataacaatagataaaactctaacggaagatgaagctgttaatgcttccagagctcatgtagctttcccagatttcttcaggacttccacagcagagtggtgggccagagaaattgtggacttttacaatgaaaagatgaagtttgatggtttgtggattgatatgaatgagccatcaagttttgtaaatggaacaactactaatcaatgcagaaatgacgaactaaattatccaccttatttcccagaactcacaaaaagaactgatggattacatttcagaacaatttgcatggaagctgagcagattcttagtgatggaacatcagttttgcattacgatgttcacaatctctatggatggtcacagatgaaacctactcatgatgcattgcaaaagacaactggaaaaagagggattgtaatttctcgttccacgtatcctactagtggacgatggggaggacactggcttggagacaactatgcacgatgggacaacatggacaaatcaatcattggtatgatggaatttagtctgtttggaatatcatatactggagcagacatctgtggttttttcaacaactcagaatatcatctctgtacccgctggatgcaacttggagcattttatccatactcaaggaatcacaacattgcaaatactagaagacaagatcccgcttcctggaatgaaacttttgctgaaatgtcaaggaatattctaaatattagatacaccttattgccctatttttacacacaaatgcatgaaattcatgctaatggtggcactgttatccgaccccttttgcatgagttctttgatgaaaaaccaacctgggatatattcaagcagttcttatggggtccagcatttatggttaccccagtactggaaccttatgttcaaactgtaaatgcctacgtccccaatgctcggtggtttgactaccatacaggcaaagatattggcgtcagaggacaatttcaaacatttaatgcttcttatgacacaataaacctacatgtccgtggtggtcacatcctaccatgtcaagagccagctcaaaacacattttacagtcgacaaaaacacatgaagctcattgttgctgcagatgataatcagatggcacagggttctctgttttgggatgatggagagagtatagacacctatgaaagagacctatatttatctgtacaatttaatttaaaccagaccaccttaacaagcactatattgaagagaggttacataaataaaagtgaaacgaggcttggatcccttcatgtatgggggaaaggaactactcctgtcaatgcagttactctaacgtataacggaaataaaaattcgcttccttttaatgaagacactaccaacatgatattacgtattgatctgaccacacacaatgttactctagaagaaccaatagaaatcaactggtcatgaagatcaccatcaattttagttgtcaatgggaaaaaacaccaggatttaagtttcacagcacttacaattttccctcttcacttggttcttgtactctacaaaatatagctttcataacatcgaaaagttattttgtagcgtacatcaatgataatgctaattttattatagtaatgtgacttggattcaattttaaggcatatttaacaaaatttgaatagccctatttatccttgttaagtatcagctacaattgtaaactagttactaaacatgtatgtaaatagctaagatataatttaaacgtgatttttaaattaaataaaatttttatgtaattatatatactatatttttctcaatgtttagcagatttaagatatgtaacaacaattatttgaagatttaattacttcttagtatgtgcatttaattagaaaaagagaataaaaaatgtaagtgtaaaaaaaaaaaa

SEQ ID NO: 129127 - DNA, 1818 bp, Homo sapiens
atggagtattacgtagccgtaaaggacaacgagatcctgtcatttgagtcaacatgggtgggactgaatttcattatttccagtgtgctacaccaggcacagagggacatgacttcacatattttcacttatttcggggagctgataatgtcaacgatttgcactgccgcggactcgagagaggacccctggtttccacagactctggaaggcaacaccgatcaccggtggaaatacgtcttcagcacgtcgcaatcgcgtaccagacacatcacgcacatgattaatctgttcaattgtataacctacacgttgctcaacccgtcctcggattttcatatgcgggtgagaggcgataaaagagctcacccccagcgcagaggcaataatgtgtcagagacctttggtggaagaccgacaatggacctgacacacgggaaacagcccttccagaacacactgatcgtgctgatcgtgaacgatgaccgactgacgtacctaatccatcgactatctgacgtcagtgtcgactcgacccacgagacctaccgacgctcgcgattactgactgtcgtaactcctagcgagctagcagctggagtgacaagcgatttgctatctgaacgcgacgagcgtgctgatcatcaacgagtcgacgaacgtacgaccgacgacgctgacgcactaacagatcacgatgaggacgatcattctgccgagcgacgtaacgagcgatgtcgagtgactctacctactacgctgactagcgtctctgatcgcatgtctacgcgctacgagccgcagcttgacagtgcctcggcgagcactagctactacgatgccgatatatccgacatgagcatgaccgatccatgtgctgagacgatgccgactgctactaacagtgttacagaagttagagtggcggaaaataatcaaccaatgaacgctcattccaatttcacttatgatgcttctaaccaggtggcacccaggaagtatcaccacgggtatcgcgctcgccacgccagccctgacgcaccgagttacggctgcttaccggcttgcgtcaatcaaaatcagcgtgttttccggacccataccgcgaatatcaatctgtcggttattcccacgctgaccactggtggagttaccggtcaggttaacgcctggcatggtacggatgatcttcgacacatcgcgggcaaccgggttttttcggatttcatctgcggtgatggtcgaaacgccaagcgcctgttagttctgctcggcggcgctgactacgtctatcgagtactgcaggctagctgtggctgcgacgtggtgacggagtactctgactgcggaccacgtactacgaatatcgacgaactgccacagactgctgacatgatacgacgtgcctgcttacctactatcggctgtgctctgctagcgtctgctgccgtcggtaactacggccgccgaatcagcatacgccgacgaacgtacacgacttcgacgtacgagtgcaaccgacctacgacactgcaatatatcagagctcgactgccatgtacgtccgaccgacgcgacgtgaacgtgcgatatcgactgcgaacgagcagcggctgcctgatcacgatgctacatcgagacagctacggagcgacatcccgagagtacgtggattgtccaggtccgcggctcgcattcgatctcatgcccctaggtgcttccctgcgcgcgacttctctccgctcctcgtggcagacaaccttcgatgccggtctcccctcccttcaacccccggccggcgccccccggccgccctag

SEQ ID NO: 129128 - DNA, 936 bp, Homo sapiens
ggtgggcagtttaccttcatcaaatttgcccattaactcagtttcaatacggggcagagccagacaggaaggaataatgtcaagccccggccagcaagtgggctttattgcataagtgacatcgtccttttccccaagatagaaaggcaggagagtgtcttctgcatgaatatgaagatctggtacccatccgtgatacattgaggctgttccctgggggtcgttaccttccacgagcaaaacacgtagccccttcagagccagatcctgagcaagatgaacagaaactgaggttttgtaaacgccacctttatggggcagcaaccccgatcaccggtggaaatacgtcttcagcacgtcgcaatcgcgtaccaaacacatcacgcatatgattaatttgttcaattgtataaccaacacgttgctcaacccgtcctcgaatttccatatccgggtgcggtagtcgccctgctttctcggcatctctgatagcctgagaagaaaccccaactaaatccgctgcttcacctattctccagcgccgggttattttcctcgcttccgggctgtcatcattaaactgtgcaatggcgatagccttcgtcatttcatgaccagcgtttatgcactgggtaaagggtttccatgagtttcattctgaacatcctttaatcatttgctttgcggtttttttattaaatcttgcaatttactgcaaagcaacaacaaaatccgcaaggtcctcaaaaaacccgcaaagttgtttaaaataagagcgaccctctccaagggagattaagaagagcgcatacctcagtcacttattatcactagcgctcgccgcagccgtgtaacgcgagcatagcgagcgaactggcgaggaagcaaagagaactgtttgcaatactttacctcaccgagaagaaatatcccggg

SEQ ID NO: 129129 - DNA, 498 bp, Homo sapiens
tttcaggtcttttaccagagtttttagagtaacttcttttccaaaaacagaaagatcaaggatggcatttacagagctgaagatcttgtcaccaaaatgagagactctgagagagactgtgagttcagcatgtctagtcttccttgctagccagtgtttcttttgtctgatgacattctctgcaacttttttttctttgaatattacatatgcaactcccttggttcttgtcggatatatcacatcttcaacatctccgccctcattcttaatgtcttggaagtggctcttcactaatacggccaataattgatcactaaaaaggtcaactggaagaccagcaactacaaccgttctttcaggagctttggattccttgacattcaaaactgatgccatggcggaggggagacgcgccctcagcggccacaggaagcccacaaccagcggaacgcaggcgatggggagaggagcgagcaggcaggttttggtttcgtt

SEQ ID NO: 129130 - DNA, 514 bp, Homo sapiens
ctttaaaactttgtacagccgaggaagttttttctcaatttctgtaattacttcttttccttcttctccagtcatacgactggtcagagtcaggtaagcgtcagtctgccctccatgggaggcagaagggtcttccaaagtctccaacagcggcgcgagggggctctgacccctggccgtcatgtcggcacccctgaggcccgaaccggaagaggagaaaatccagtgaccgatggaaacagccccgcgtcgtcccagtgtgagtccggccctcacacccgcacgcccgcccgggctcacagccacgccgcgtctgcaccccaggcctccgaatcaccaaaccccagcgcgaacctcctccggcgcccgacaccagacacctgagcccacgccacattcgggcctgggcgttcccgccaccactttcccgggcagctttcaacagagggaggagatcggcggagggcgggagaagccggcggaacgaggcatctcgccgcgaggggggggaggg

SEQ ID NO: 129131 - DNA, 1116 bp, Homo sapiens
atggcccaggcttactttgggaggccaagagcgccccactctccgctacgccccgtggcggacctcacctggtcagagtcaggtaagcgtcagtctgccctccatgggaggcagaagggtcttccaaagtctccaacagcggcgcgagggggctctgacccctgccgtcatgtcggccaccctgaggcccgaaccggaagaggagaaaatccagtgaccgatggaaacagccccgcggcggcccagtgcctccgaatcaccaaaccccagcgcgaacctcctccggcgcccgacaccagacacctgagcccacgccacattcgggcctgggcccgtcccgccaccactttcccgggcagctttcaacagagggaggagatcggcggagggcgggagaagcccggggaacgaggcatctcgccgcgagggggcggaggcacccagacgctgccagagctcgactttcccagctccggctgtttactcacgcgtgcggcgcgctccctcctagaccaagatggcggctgggcgggcccaggagtgcgcgggagtaggttaggcctggcgggagaagttcgagccaatccaacagtcagcggcacaccggagttatcgatcgcctcccttcccatcccttcccatcccttccctgcccagctgccgcgtcacgcccctctgccctgcaccctggcccgtcgcgcccggttccgcgcccttctaggggaccatggcgacggtacaggcacggacctgcaccgcaaaacccaaagcaaaagcaacttgccatggcggaggggagacgcgccctcagcggccgcagaaagcccacaaccagcggaacgcaggcgatggggagaggagcgagcaggcaggttttggtttcgttttttgttccagctcccttggaggctacgaagaaaagggcggtccttccacccgatccggctgttctgcgacctcgtggcctctgagtgggagctcggactcaggagtgctgttgccagcgcctgcccagacgccctccgtagttttgcaacttgtggaagcactctggagagaggccgagaggattcctcgacaggaaatttgggaattctctgggtgatgcatcagtga

SEQ ID NO: 129132 - DNA, 478 bp, Homo sapiens
aacagtactcaggaatcaagagtggccaaacgctgccaatgggagataggaaactcgttgatcattggtagagaaactcggcacaacgccgagtcacggtacacggtgtcttcggcctcgcccagggacacttggtgacccgaggtcgagttccaagtcggagacagattttgcgagtggataagacggtaagccgggatcccagggccttctccagctgcactgggtgtcaagcgccacggggtttgatggggactccttctggttccaccctcgcccactcacttctcgggctggccataatgctgcacagagccccggccagccattaatatcaggcgcaggagaaaacccagtaaaatcacttaccagtcttccacctccggtgctgatctagcaagagcctgacccgctggccagactcaagctctgcaccaggtattaccaccctggcgacggctccggagcgccaacgaaa

SEQ ID NO: 129133 - DNA, 1329 bp, Homo sapiens
atgcttgactattctcaggtgtctccagtaatgcaaaaggcaagtatgagtagtgagggccagatactggaagatctgaggcaactagggactggagcagatgcccagcaaactgcagcagcgctatgggaaagtggtcagactcttaaaaaagaaaacagcaacaacgaaaaaaccccaaaccccatccaaaggctgtacaagcacagtgccagcatctgctcagcttctggtgaggcctcaggaggcttacagtcatggcagagggcaaagcaagaacctgtgtatcacatgcaagacaggggtcaagaaacaggaggagtccagtcttctttgcaggacagcacattgccttttatgaatgagtgtggagtggacactgtatttcaggggcaaggcacggcaccccagaactacggaaacagtactcaggaatcaagagtggccaaacgctgccaatgggagataggaaactcgttgatcattggtagagaaactcggcacaacgccgagtcacggtacacgggacacttggtgacccgaggtcgagttccaagtcggagacagattttgcgagtgggtaagacgcaagagcctgacccgctggccagactcaagctctgcaccaggtattaccaccctggcgacggctccggagcgtcactgacaaccacccggaaatggtactatcgcttccggggctgcctagcgcgcggcgggaaattgtttcccagagcccggattcgtgaagcagttgagtgctgcagcggcagtcgtcgcccctgccgccgctgccaccgaaggaagcatcccagacaccgggaagtctccttccagtatctcccattggccaaatccccaaaagaatgtgatttgcaagagaagaggaagagtggagcaggagcaagcttgggaaaagggcagatgaagagttgtgtttgggctgtgaaaaagtatgaggtgcccagtggatcttttacctcagtcttgtttgtgccaaagattcctgcatcaagaaagtggatactaaccaaggactatataattcatagtgccaaaagtggcagatggcttgatgcaacaacttatgaatggggatataaaattgaaaaagattcccgttattcacctcaaatgcaatctgcacctaaaagatggcgtgaagaactgaaacgcactggtgctccaggagccttccacagatggaaagttgtcctccttgttagaactgataagcgaagtgattctcttataaggttttctgataactttggagactgtgacatcagaatggaggaaaaaactttcaggactctcatggagagctga

SEQ ID NO: 129134 - DNA, 1260 bp, Homo sapiens
atggagctgcctgagtctgaggcagagaaacaggagttcgacaacctggagaagagtataaggcagcccaaacctgctggagggtgctttgtgagagggcctttgacccacaggccaggttccaggactgatccgacagaaacgcaccctcaagagcaccacaaggccgggccagggctgctgctgctactgccactgtctgaactggaaatatttgagccatctccaggggacatgctgggtccaccccacccccggacggttactaggaaggacactgtctacacgaacccatgggcatggaagctgggcaccaacagagtgcagaaacaaactgcaggatgctgtgtggcggagcccgctgtgccccacaaatacatgagaggaggacacaatgatgttgcaaaggctggcgggaggatcaccgaaggagaatccggtttggtatctcacactcccttcacccaggaagcacaggctgtggaaagagtgtcaaggtgggagcaggtaaacccttggcccctgtccgtcactcagtgtgactcagaagaagaagggactccagagatccctcttggctcaaatgcaaaggtgaggataatttgggaaaagaggcaggacaattactttgtgcattttggcagtgggaatgctgtgctgcagaaaggggcacacaaagcccagacgcagacccggggcatctcccatctccacccatctccactcatctccacccatctccacacatctccacacatctccacctccccacagaagggaggaggccaggaggtggacaatgaagacaatcgtgtggagcagctgctgcgcggtgaccgtggtggtggaattgtgatggctggggaccgaagtgccagcgtttctccaagcactaggacatcgcacagccagacgaagtttcttggggccaatagccctgggctgtgggagccctggctgggccacaccccacctcaggcatctgaggggccccttggctgcacccctgcaagcatctgcggcagcaccaggaagccaagcaaacctctcagcaaaaagccgccccaagcggccaggacctcctcatcaaggattgtcattttcaccccaatttctacccgacctccaactcagggtcaaccagagaaagccaaatctgctaccccaaccaatgacttagaaggccccagtgctaaagtcaaatttgtgaacttcctcatggatgaaacattcccggagccatctttcttcttcatctga

SEQ ID NO: 129135 - DNA, 258 bp, Homo sapiens
  misc_feature (1)...(258): n = a,t,c or g
ccacaggctcttgagtggctctctggatctntgctggggagctgtggctgtntgaaaaccctttagtttgaagacagtcagtggttttgctagtggtgttatcaggcactttgctntctgtttctatttcttcataagtatggcttattacacttgtggttttttccttcactgagagttctccacttgttcccagaaaacttttgtagatagctagattgtcatatgcatttggattgataacaatgggaactttga

SEQ ID NO: 129136 - DNA, 3426 bp, Homo sapiens
tcactcactatcactagaacagcatgggggaaactgccccgatgatcccatcacttcccaccaggtccctcctatgatacctgatctctgttgagtactccacagtctcttggaatggttttctaggggactgcctggttcagaatggggaagtaggtcctgactggctgctggaatgagaacctctggagtagcctgataataaaaggccaaactttctagggccaatacatcctgagtcatagagaagccacataaagagtcccctatggcagaactaagtcttctgagaatctttttaggaatctgtgatggagaagaatgactcctcttcttctctgagtcctgtagtaatgcattctctgctctacccttctccatgactgctgcctggtctgtcctagccttgctctgatccacactgagctggccttgagcagggtcgcacctgtacatgatgacaatggctggtttctcactggactctcctttcgcctctgtgaaccagtgatggcgctgaactggaggaggaggcagcatgtgaatgactgtgccatccaggcccaccagtatccctttctctcgctctttctctttgtcatcctcctcatctgttttccgacggcggaagaagcttttaaatgatatccagcgcttaggttttgcatcagctgcccgcctgctgccttcagagtgcaaaactgattcagcttctgttgacctggtagggctggttggcttggtccagttggtgaaatgcctctgcaaaaggttacctgcatggtaaggagaagaagtagagcgtggcgggggaaagggagctggtggctcactttgggggctagtcactaatttggagggagagggggtgactggctttatggatgggtctttctgtactttggtggtaggactgtctgtggtctgaggtgcttcagcctcaccactaggctgagatgtaaagagagatttgggccggactggcgtactcttaggtgtgctcttagcaacatcagcatctggaggaatggcataaagctcttccacactgcaagctttagggccagattgaggtgtttctggaggagactgtgggggttggattgaagccacaatctgagaaagcactgtgcttgctttctctctggtgctgctgctgcccaccatctgagactcctgagtgccttctattttggccacaggctcttgagtggctctctggatctttgctggggagctgtggctggaactatagcttctctgtggtgaagactgacctctgttgagacagttgttaaactcttgaaccttctgagccactgagccccttttatgctctgtgctgtttgaaaaccctttagtttgaagacagtcagtggttttgctagtggtgttatcaggcactttgctttctgtttctatttcttcataagtatggcttattacacttgtggttttttccttcactgagagttctccacttgttcccagaaaacttttgtagatagctagattgtcatatgcatttggattgataacaatgggaactttgatagcatttttggaactccgagcataagttggctcgtcatgaatgataattggaaaaggtggcataccagcattgttataactattaaatttaatttcagacaaattaggtgacttaacagggatggttttggaggaaatgtttgtagctgtgggtgatgtaggtgctgatttgtgacagtttttccttggaggaacatttggtccagttccactagtaattagttctactttaggtatcttttgtcgtggactggtgctagaagtccatacttcttggtatcgaattgcactggatttttggaaatgggcacttatttgtcctggtgtcaatgaagatgatgtaactggagagtttggagtagaggatgagctttttgtcttggggctgttaacagggccctcgaggtgctcactggccatggctgctgacacatccacgacagtatatggcttgcacaatggctgttccaggttcacaactcggtaaggttttgcttgctcttctgtggggacaaggtttatggttactgcttgcccagcaacatctgtagaggctttactttcttccttctcagtttgtacagcaatcttgccatctttctcttctaatcggagagcaaggactgctttgtgggtctctggaacttttattgagcttttggaagcctgtgatgaatctttatcctgattattactagagggactttcataattgggctcaatttccttcatgtccttagaatctcctgggttaccaggagattaatcccccattacaaatcttctgggataaactactggctgtctcagaacgtgattcttctgttaaagaagaatctggtgatgtggagtcagatgacaccatgctctgaatgcttccttgtccataagagaccacagaattttcctcataaccattcaggatttcatcatagctgtcatcatagtccacagcacagattctctgcagagacttgtttcgcagggggatggtattccattttttgtccacaaagaatcgaacaggagacaatgtgtttgctctgaagttggcaaagcgaggttgcggtctcatgcgaatctccatggccaacagctcttcatcactctcatcccaactctcgtgctcctcctccatgttactgaaaagtacatcctcttcactctcctcgccactggaaaactctgggtaacagaaccggcccccttcattactaatcacttctgtgctcccactcagaataacatgcttgccctgagtttcctttatcccacctatcatgcaacttggtggaagctttctttccaatgatcgtttatagcaatcatttattcttcccaagaatgtttctctggagtttgtttcatttcctcttatctgaggggcagtatccaagcctgctatctcctttaacacttcagttagtccattattggtatctgacatcttctttgcactatcattattgccataaggcttaggaacatggctaattccttcatcatcttcattattattggtaagaggtttctgactcaaggcagctctgtttccgttccaccctatgatgaccggtttggttctcaccagtgttcttggatgctaagctcaccacatatactttgcccatctgccactatcatagtgggcttcacagctatagtgggttttttagccacaggaggccggaaattgcccgtgttcctgatgcggtggttgttactgtgattggcattagttttcacattgccatgggtgatgggtgccttctcagggtctgggggaagctggtgcaaacttttaggtttaaagcaattcttgcattcaccaggtttccaaacatgttcagtaaaggtgttacaagcagacat

SEQ ID NO: 129137 - DNA, 1972 bp, Homo sapiens
gcggccgccacggacggagactgaggctcagaggggacaagacctgcttgaggtcacacaggcagttgagagcagagctgagtcttgaacttgggtctggctgatacccaagactgtccccactgcaatgtgacactcccagcctccagcggaagccttgggagcaggtccccaaaaagctcaaagcggaagaaaaggcggcgacgcaacgtgaactgcctgaagaacgtggtgatctggtacgaggaccacaagcaccgctgcccgtacgagccgcacctggcggagctagaccccacttttggcctgtacaccacggccgtgtggcagtgcgaagctggccaccggtacttccaggacctgcattcgcccctgaagcccctcagagactcaaaaccttgacagtgacaaagtgggcaatgggctggtggctggcagctctgactcatccagctctggctctgcctctgactctgaggagtctcctgagggccagccggtcaaggctgcggcagcggcagcggcagcgacacccaccagcccggtgggcagcagcgggctcatcactcaggagggcgtgcacattccctttgacgtccaccacgtggaaagcctggccgagcagggtaccccgctgtgctccaacccagcaggcaatgggcctgaagccctggagacagtggtgtgcgtgccggtgcctgtgcaagtgggtgcgggccccagcgccctctttgagaacgtgccccaggaggccctgggtgaggtggtggccagctgccccatgccaggcatggtgcccggctcacaggtgatcatcattgcgggccctggttacgacgctctcacggccgagggcattcacctcaacatggcagcaggcagcggtgtccccggcagtggactgggcgaggaggtgccctgtgccatgatggagggtgtggcagcctacacccagacagagcccgagggtagccagcctagcaccatggacgccaccgcagtagcaggcatcgagaccaagaaagagaaggaggacctgtgcttgctaaagaaggaggagaaggaggagccagtagccccggagctggcaacaacggtgcctgagagcgcagagcctgaggcagaggcggacggggaggagctggacggcagcgacatgtcagccatcatctatgaaatccccaaggagcctgagaagaggcggcggagcaagcggtcgcgggtgatggatgctgacggcctgctcgagatgttccactgcccatacgagggctgcagccaagtctacgtggccctcagcagcttccagaaccacgtcaatcttgtgcatcggaaaggaaagaccaaaagtgtgccctcatcctggctgtggcaagaagttctatttatccaaccacctgcggcggcacatgatcatccattcaggtgtccgtgaattcacctgcgagacctgcggcaagtccttcaagaggaagaaccacctggaggtacatcggcgcacccacaccggcgagacccccctggaggtgcgagatctgtggctaccagttgccggcaagcgcgcgtcgttcaactggcacatgaagaaagcaacactgcggaggtgcaagtacaacttcacgtgcgatcgcctgcgggaagcgcttggagaagctggacagcgtcaagttccacacgcttcaaaagccacccggatcacaagcccacctgacccacctgaccactgaccgcccctatttattcgtccgctcggacaccacgcccgggcttgccggggcctggacagctgcgagggccgcccggaccgcgggccggaaggaggcgcccccgccccgccccagagctgggccccctgggcaggttccccaccccgccccaccgcatccttctcggagctggtgcctggggctgcattgctggaactgtgtcaagagagcagagtgagattaaagagcgagaaaggagaaaaaaa

SEQ ID NO: 129138 - DNA, 1017 bp, Homo sapiens
atgctggctgcaggcgttgcagttttcggtgcatctcatcgattgcagagcatacttctcagatgtaatgggttcactgggattcagataactatagtggatctgactggcagcagaccaccaaacagtgaccatgagctttttttggtgcaagttaggctttgggaagtgttttggagcttcttctcagtccagccgctcccacctcatagttctccttcctctggatctgaacttgttaactctgccacaaaggagttgctgactcatttctgttctacccagcagttacctactgcaggcatcatggctgagcagagaagccgccaggccctggctctgccacttgctgggtgtattcagcacacagcaaccagagagagctttgtaaaatctaaaacaaagcaggggccagggctgctgacagtggttgatttggaactggctggaaaaattggagacattcttatgagagtcccgggtatgttagggcaaggagtgcatatgtgtgtgatggcccttggtgagagcctcgctgggtttgggccaggtgttgggggtgtggccggtggcacaaggagaggttggacccgggaggagagtaggcagccctgggacccgatgtgctggtgtcatgggaatcctggtgctatggaaggtgctggtgctgtggaaggtgctggtgtcattggaattctggtgctatggaaggtgctggtgctgtggaaggtgctggtgtcgtgggaatcctggtgctatggaaggtgctggtgctgtggaaggtgctggtgtcatggggatcctggtgctgtggaagggtgcttgtatcatggtgatcctggtgctatggaggcagctggtgccaaggagagtgctggtgctctaaaggttactggtgctctgaaggttgttggtgctatggaagatgctggtgctgaggagggtactgaggctctggaaggtgcttatgcacctagctatgctgccaggcctggttgtttccaggttcgtctgtga

SEQ ID NO: 129139 - DNA, 1044 bp, Homo sapiens
atgagtcgcatgggactgttagggtttggagaaaggaaagaactgccaaatcaccctgctgtcagtgagtggcctctaactctggtcacagggtgctcgagtggcacagtggcagaaggggagggaaatctcaccacctcaggccttttcagcattgtgcctcttcatcctgacggggtggcggccgggcagaggcactcctcacttcccagatggggcagccaggcagaggcgctcctcacatcccagacggtggacggtcaggcagagatgctcctcacaccccagacgatgggcggtcaggaagagatgctcctcacatcccagacaacgggcgaagactttattactcgtagcacagaaagcggcacgcactccaagtcccataaaggagatgaaggagagcctcgttggatgctgggatggatgctttgggtttgtgacatagctgagcccctagtgaaggccaagttgctggattgcaagcacacctgctgttcagtttgcctccagcagacgaggaccagccagaaggatgtgcgatgcccctggtgcagcggtgtcaccaagctgccccctgacttctccgtgtcgcagctcctcgacgaccccgaggtcctggctgtcatcaccattccacacgcttcggagcacatgccggtcttcatcagacttcccggcagtgggtgctacatgctgcccctgcccatctccaaggagcacgcgctgctgcccggagatatgagccgccacctgctgcccaggaaccggcagaagtccgtcactgtggtgaccatccctgctggacagcagcctctgcaaggcagggctccccagggggtggcggaggaggagcaggacaggcggggcatggtgaaaagctccatgtggttgagggtgtgcactgtcatcttggtggcttgcgtcttggtcttcctcctcagcatcgtgctccataacatgtcctgcatttctaagcgcttgactgtgacatcttgtggctggagagggctgcagggaagtctcttgtgggtgccaacttag

SEQ ID NO: 129140 - DNA, 757 bp, Homo sapiens
cccagcggttggaaaacctcggggcccaaattgaagggtagtgaaaagcaggtgtgggacagtgaagaacccatctttctccctctactcacggaatttctgtctattaaggtgacagaactgaagggcctggccaaccatgtggttgtgggcagtgtctcctgtgagaccaaggacctgtttgccgccctgccccaggttgtggctgtggatatcaatgaccttggtaccatcaagctcagcctggaagtcacatggagccccttcgacaaggatgaccagccctcagctgcttcttctgtcaacaaggcctccacagtccccaagcgcttctccacctatagccagagcccaccggacacaccctcacttcgggaacaggctttcttattaacatgctgcgacggcaggagggagctgggagaatggggacagcatggtccctgttcatctggatttttcagacggattcttccagcccacagctctcaggcactgcccgccactcaccagcccctaggcccctggtgcagcagcccgagccccttcccatccaagttgccttccgcaggcctgagacccccagctctgggcccttggatgaggagggggccgtggccccagtcctggcaaatgggcatgcaccctacagtcggactctgagccacatcagtgaggctagtgtagatgctgccttggctgaggcttcagtggaggccgttggcccagaaagcctagcctggggacctagacgaaa

SEQ ID NO: 129141 - DNA, 530 bp, Homo sapiens
  misc_feature (1)...(530): n = a,t,c or g
gagcggccgcagcgccgctctgctcagcgcccgggtcaataggagccagtccttcgcaggcgtcctcggcagccacgagcgggggcccaggagtttcccggtcttcagcccgccggggcccccacggaagccccccgcgctctcccgagtgtccaggatgttttccgtggctcacccagccgccaaggtgccgcagcccgagcggctggaccttggtgtacacggcgctgaagcgggggcctgacggcctactgggggnagtgcaccagcaggagcaagagaaactccaggggcagataagggagtccaagaggaattcccgcttggtgagtggcgggagggcttcctgtatgatctggacaagcaagtcaagtccattgaacgcttcctgcgacgactggagttccatgccagcaagatcgatgagctgtatgagggcatactgtgtccagncggcgtctccggggatggtgccttacacatgggtccgtgcctacaccactgggtccccgggaagccgagacgccggg

SEQ ID NO: 129142 - DNA, 1370 bp, Homo sapiens
atggagggtccccgcgcgaccccccttcctgccgcgtcgtcgatggcgagagcccggcacctctggcaggaacgtgggtggaccgatgctgagtgcctacgtctgacgtaccgagtgcacgagctctgctctgccgggaagccccgcgcggactcactctatgatgtccctgtcggtgcggccgcaggccgtctgctcagcgcccgggtcaataggagccagtccttcgcaggcgtcctcggcagccacgagcgggggcccagggtttcccggtcttcagcccgccggggcccccacggaagccccccgcgctctcccgagtgtccaggatgttttccgtggctcacccagccgccaaggtgccgcagcccgagcggctggacctggtgtacacggcgctgaagcggggcctgcggcctacttggaagtgcaccagcaggagcaagaaaactccaggggcagataagggagtccaagaggaattcccgcttggtgatggcgggaggagtgctgtggactgtggtgtgagaaaggggagctgtgacgagtctgagtgcctctgctggagtcctcctcatccctcctaaatatttgccccttctccccacccctgcagggcttcctgtatgatctggacaagcaagtcaagtccattgaacgcttcctggacgactggagttccatgccagcaaggtacgagtgcagcatgtgtgcaggtgggatcgatgagctgtatgaggcatactgtgtccagcggcgtctccgggatggtgcctacaacatggtccgtgcctacaccactgggtccccgggaagccgagaggcccgggacagcctggcagaggccactcgggggcatcgcgagtacacggaggtgagggatgggggcccatgaggcagaggcacaggagcatgtgtctgctggagagcgactggaggcacagctgggcgagtttcatctccgaatgaaaggttgtgctgtggatatcaatgaccttggtaccatcaagctcagcctggaagtcactggagctgcttcttctgtcaacaaggcctccacagtcaccaagcgctctccacctatagccagagcccaccggacacaccctcacttcgggaacagctttctatccacgaggaaaccaaacacctacacagccaaccaccgcagacggcccatcgagcagcacccagacatgagaacaccgccaccaccacaccgcgcccggaccaacacgggaagaaaggacaaggtcagagcacacgagggcgaaaaggcaacacccacaaggacaaggggagccccccacggaaaggcccagcgcctgcggccgctgtaccagtacgtcactattgcaaccctgagctga

SEQ ID NO: 129143 - DNA, 941 bp, Homo sapiens
atgagttataactctaagaactatgttgaaactataactacaatgaactccgtcaagttcggagagacaacccctagaaatcgaacgcattatcttagtactaatgagaagaaaatatttctctccggggtgttttccaacgcctaccctgctggactcagcagaggctgggacagcccttggggttctaccccatgggtcaggcacttctgctacctgtcctcaacccagctctgtgaccaaaactgttctctcctctcctccttgctgcctgccggcccctctgtctgcaaccgcctgctggcctctgcatggcagaagtcctccagctctgcatcttccgaggcctcggaaacctgccagtccgttagcgagtgcagctcccccacctcggactggtccaaggtcggctcccatgagcagccctcaggcgccactctgcagcggaggaaggaccgagtggagctcctgcgagacacagagcccaggccctgccagtgggggcaccctgggccccagcggggaagaggcaccgcgaccccggatgtcccctgccaccatcgcagccaagcacggtgaggaggtgtcccccgccgccagtgacctggccatggtgctgacagcggggcatgagcctgtagcaccagaagagcagccgggactcgctgcagtactccagcggctacagcacgcagaccaccacgccctcctgctctgaggacaccatcccctcccaaggcaggcccgcggggctgggcccaaccaaaccagtgtccatagaaagcacatatttgcaaagtccacagaggctgaagcaagagtgggccaccgaggggaaaatccagaagctgcccccgcaaatccaggtggtcaacttccaggtggactcatccccttctctgcccctgatcatggtccctgaacacatgcatgtgtcatag

SEQ ID NO: 129144 - DNA, 777 bp, Homo sapiens; identical to SEQ ID NO: 128116

SEQ ID NO: 129145 - DNA, 336 bp, Homo sapiens
tcatggcaactttttggcacaatgaaaaatatcgcccatgatcaacgtgttctgttctgagtccagcccctctggggaaagaaggggtgcatgaactccccctagtccacagtcgcctccctgtggcccaaagccctcttcacactccatcttgtagccccagcaggaactattttcttcttttccaaggtttgtgtgcagaacatcctgcccttgctgccccagcagcttcagttggcacctgccccagtccagcctctgggacccatgcagcagctcccagcggcccttggaggggaagatgtgtacatagtgggcctggagggcggctgtggc

SEQ ID NO: 129146 - DNA, 429 bp, Homo sapiens
ggtctgcctgattcatcaggtttctcatggggcctggaccacctcatgatcacaaaagtgaccgcacagcttcaatgcctctcctgtgtgggctggacacacgttcatctgactcacaaactttccctgggtggcacctggagccctggctctgggctggaacctgagtgtgaagccactggaggctgtgggattgcaggtcaggtggcgtgctgcctcgacactgccaccaagagggccaggcagtgtctccagctgccagcaggcggcgtacgacgactacactgtttgtgtgcagaacatcctgcccatgctgacccagcagcttcagttggcacctgccccagtccagcctctgggaaccatgcagcagctcccagcggccctgcacccaccaccagcatccgtttcacctgcagttgaagatcc

SEQ ID NO: 129147 - DNA, 3465 bp, Homo sapiens
tcactcaggtctcctgctcaggacgcccttgccgagggcggagggggatttgtgctgaaggagggctccggcagcagcgcagcaactcgggggacgctccttctccttgtcagtcacggccccttgtgtccccagatgcttctggggcgactggggtgtgtgagccctgctgccagggccccgctggggctgctccaggagctgtccgtggtgctgacgcggcggccgatcgggcgcgggatgcggcgcggctgctgagcgctgtccctggtcctggagaggttcctgggccctggcggcggcggcaggagcggtggccggagcggccggcagcggggccgatgacggggggacgagcccgggcggaggctgggcttgcagcagctgctggtgctcccacaggctgcggttctcagtgctcagctcgtccagccgccgctccagctcgtcgatacgctctcgctgggtgtggatgaggctctgctgcttctgcacgatggccgtgagctccttgaggcagagcacggcgcgcaccggattctccagcaggctctccatgccgcccgccgccgcctgcgccctgcctgcgcctccctgcctcttggcgtcagcgaaggctctgctgcgtgccctgtgaacatgaagccgcctgttgttccagtagagggatgtgggtggaggccaactgctgctcaggtctgagttggtggcagtgccctgtgtgagctttggggacccttgttcccaccacagagtgtccatggagcagcatgacttctggaagggcgtctttatggaacacctccacgtttccgtggagagatttcctgtagcccgtggccccggcatccacgtttccgtggagacttttcctgtagcctgtggccccggcatccacgtttccgtggagagtttcctgtagcacgtggctccggcatccacgtttccgtggagacttttcctgtagcccgtggccccggcatccatgtttccgtggagagttttcctgtagcacgtggctccggcatccacgtttccgtggagagttttcctgtagcctgtggccccggcatccacgtttccgtggagagatttcctgtagcccgtggccccggcatccacgtttccgtggagacttttcctgtagcccgtggccccggcatccatgtttccgtggagagttttcctgtggcacgtggccccggcatccacgtttccgtggagagttttcctgtagcccatggccccggcatccacgtttccgtggagacttttcctgtagcccgtggccccggcatccacgtttccatggagacttttcctgtagcctgtggccccggcatccatgtttccgtggagagttttcctgtagcacgtggctccggcatccacgtttccgtggagagttttcctgtagcctgtggccccggcatccacgtttccgtggagagttttcctgtggcacgtggccccggcatccacgtttctgtggagagttttcctgtggcacgtggccccggcatccacgtttccgtggagacttttcctgtagcctgtggccccggcatccacgtttccgtggagagttttcctgtggcacgtggccctggcatgttgtttgggtgcatggggacttaatgtgctgctagagatgctgattgagcagagccttactgggcttctagtagtgatagccgtttgctgccaagacatttcggaatcttccaatatgcttttcctccctataccccacatccctgtcacagagttgagaattggattacctttactgtagtaactcttccgcacagtgtccaggggctttgctgccttccctggctctcccaggcccagctggctctgctcggcaggcgggcagcccggctcgcagactgtgcgcacctgttcagccttcagggcgatggcctgctccaggaggcccaggtttccccgggtcatcatgtcctgcatctccgactcgtcagtgactgttgacttccgggagtgggtgtcctcgtccttgtcatcatccgagcggacctccacaataacagagtactcaggcttgggactgggtgattctgggccccggagctcacgggccttctgggcagaggtgtgagaggtgtcttccttctcggccatctggtcctcagacccattcaggggtgggttcagaaccacgtgctgtgcgtggtcctggtgtctcgttcgtctgaagtcgtttttagcactcctcgcctttcgtgaccttgtgttaactttgatggatatctctatagactcgttgtttcctgttttaccccatgggctgaaagccttctttggatgctcagattgtccctgattgaccagtggaagcccagtacagaggctcctgtagcctcggtccagctcccctgtcctttcttgttcttgcctttcctgcttggggcctggaactctggttcctgagtccagcccctctggggaaagaaggggtgcatgaactccccctagtccacaggcgcctccctgtggcccaaggccctcttcacactccatcttgtagccccagcaggagctattttccgaaaagtgaaaagctctgaaggtcccacaattcatggtatgtacaggggctcggaggagggaaactgcccagctttcccccggcacaggatgtttgtctttctttgtatcagtgctcagctgagtctgcagtgcttcagaggcagctttcattttataaaaatctatgatttctccttccagttgttttttctcttcctcgagcttccttatctcctcctgttgaatcattttaagatgctcgaatttgtcctgcagtcctgaagccccgaggatgtggacaaccaccatccggtgagcaaccacctcttgaggcctctctttaacgtctgccgggcaccctgaggttgcccccattctttgaacagctatggacggggacctgtcataggctgggctcaccttgggcgcttcagctgtctcggggcgatgaatctcgtcctgtcctgacgtctcagcctcggccccctccagagttccttccgattcatccgaaacagaggcgtccttcacctcagtgtcctcactgccgtcgctgtccacaccatagccctcgtccagagccagcttcagggggtgtgacttcctcttggacaccaggtgctcagcctcagcgccctccagcttcctcttcttggccagggggcagctctgtaaacttcggtgcctggagtacttgccccggacgtgccctgagcctgtgcatcctggggtggggcagctgaggtctgcagctgtggtctctgggggtcctcgcagggccttggatcgggtgcgagctcgcttgtcttcattttctaagctcatccctgatccccactggcagccatcacagtacccttggttccttgcagagatagttctgtcctcacattgggtgatgtcctgttgcat

SEQ ID NO: 129148 - DNA, 8526 bp, Homo sapiens
atgcccctgcctgctccctgccaggatctggggagatggctgtacctggcagccctagggtggacaaaaatgaagccaatgaagaaggcatgcactggcctttcaggtcctggcagtggcagcaagtcccccccagccaccagggccaaggctctgaggcggcgaggggctggggagggtgacaagccagaggaggaggatgacgaggcacagcagccgcaaccacagtccgggcccgaagaggctgaggaaggggaggaggaggaggctgagcggggccctggggctgaaggtcctccactggagctgcaccctggcgacccggctccaggcccagcagaggaccccaaaggggatggggaggcaggccgctgggagccctcactcagccgcaagacagccacgttcaagtctcgagcgcccaagaagaagtatgtggaggagcacggagctggcagcagtggggtggctggggcccctgaagagcgggtgcggacccctgaggaggccagtggcctgggggtgcctccacggccacccacctccactcgttcctcctccactgacacagccagcgagcactcggcggacctggaggatgagccggctgaggcttgtggtccaggcccttggccccctggcagcaccagtggcagctatgacctgcggcagctgcggtcccagcgggtgctggctcggcgtggtgatggccttttcctgccggctgtggtgcgccaggtgcgccgaagccaggacctgggcgtgcagttccctggtgaccgagccctgactttctatgagggggtgccaggcgctggtgtggatgtagttttggatgccacacccccaccaggtgccctggtggtgggcacagctgtctgtacctgtgtggagcccggcgtggctgcctaccgggaaggtgtggtggtggaggtggccaccaagccagctgcctacaaggtccgtctcagccctggccccagctcccagccaggcctaccaggcagcctcccgcagcccccacagccactgcaccgtgagccagaggaggctgtgtgggtggcccgctccagcctacgcctgctgcgccccccctgggaacctgagaccatgctgaggaagccccctacaggccctgaggaagagcaggcagagcctggggccaccctgccaccctgccctgctgccctggaccccaaacagcccgaggatgctgaggtctctaagatcagctttggtggcaacctgggtactcactgtgaggagggcgaggagaagcaccctccagccctgggtaccccagccctgctcccactgcccccaccccagctcctgtcaccaccacccaagtctccagcctttgtgggccccggccgccctggcgagcagccctcgccctgccaggaggggagccagggcggcagccgcagcagcagcgtggcctccctggaaaaggggacagcaccggcagcccgggcccgcacgccactgacagccgcccagcagaagtacaagaagggcgatgtggtctgcacacccagcggaatacgaaagaagttcaacggcaagcagtggcgccggctgtgctcacgagatggctgcatgaaggagtcacagcggcgaggctactgctcacgccacctgtccatgcgaaccaaagagatggaaggcctggcagacagtgggcctggcggggcgggccggcccgcggccgtggcagcccgtgagggcagcacggagtttgactggggtgatgagacgtcgagggacagtgaggccagcagtgtggcggctcgtggagactcacggccacgcctggtggcccctgctgacttgtcacgctttgagttcgacgagtgtgaggcggccgtgatgctggtgtcgctgggcagctcgcgctcaggcacgccctccttctcacccgtctccactcaatcgcccttctcgccagccccatcaccctcaccctcaccactcttcggcttccgccctgccaactttagccccatcaatgcctcaccagtcatccagcgcactgcagtccgcagtcgccacctgagcgccagcacccctaaggcaggcgtgctgacgccaccagacctgggcccccacccaccgccacctgccccccgagagcgccactcctctggaatcctacccaccttccagaccaacctgaccttcaccgtgcccatcagccctgggcgacggaagacagagctgttgccgcatccaggggccttgggggcccctggcgcagggggtggaggagccgccccagactttcccaagagtgacagcttagactctggtgtggactcagtgtcccacacacctacaccctccacgccggctggcttccgggccgtgtcccctgctgtgcccttctctcgctcccgccagccctcaccattgctgctgttgccaccccctgccggcctgacctcggatccagggccctctgtgcgcagggtgcctgctgtgcagcgggactcacctgttattgtccgcaaccctgatgtgccactgccctccaaattccctggggaggtgggcactgctggtgaggtgcgggctgggggacctgggcggggctgccgtgaaaccccagtgccccctggggtggccagtgggaagcctggcctgcccccacctctgccagcccccgtgcccatcaccgtgcctccagctgcaccaactgccgtggcccagccgatgcccgcctttggcctggcttcttcaccctttcagcctgtggccttccacccctcacctgctgccctgttgcccgttttggtgcccagcagctataccagccaccctgcccccaagaaggaagtcatcatgggccggcctggaacagatgggcagatggaggctctaacaggtccttcccaggaggtggcaggaccaggactggagccctcatctttaccactgtgtccagtaaacatcacaggcacggccatggaaggcagcgggggtgtgctgggcacttctccagcggcgacggccgaggagcgggctgcgggcggagcggcgtcggccgctgaggaggtgcgagcccctgccgggtcccccctgcgccggaccatgtattcggcccacaggcccctgatgcccgcgtccagcgcggcctcccgtggcctcggcatgttcgtgtggacgaatgtggaacctcgctctgtggctgtgttcccttggcactccttagtccccttcctggcacccagccagcctgacccctccgtgcagccgagcgaggcccagcaacctgccagccacccagtggcctccaaccagagcaaagaacctgctgagtcggcagctgttgctcatgaacggccaccaggtgggacagggagtgctgaccctgagcggccccctggagccacatgccctgagagcccaggacccggacccccacaccctttgggggtggtggaatctggtaagggtccgcctcccaccacggaggaggaggcctccggccccccaggagagccccggctggacagtgagacagagagtgaccatgatgatgccttcctctccatcatgtctcctgagatccagttgcctctaccgcccggaaaacgtcggacccagtccctcagtgccctacccaaggaacgggactcatcttctgagaaggatggacgcagccccaacaagcgggagaaggaccacatccggcggcccatgaatgccttcatgatcttcagcaagcggcaccgggccctggtccaccagcgtcatcccaaccaggacaaccggaccgtcagcaagatcctgggcgagtggtggtatgccctggggcccaaggagaagcagaagtaccacgacctggccttccaggtgaaggaggcccacttcaaggcccacccagattggaagtggtgcaacaaggaccgaaagaagtccagctcagaggccaagcccacgagcctggggctggcaggagggcacaaggagacgcgggagcggagcatgtcggagacgggcactgctgctgcccctggggtgtcctctgagctcctgtccgttgcagcccagacactcctgagctcagacaccaaggctccggggagcagctcctgtggggcagaacggctacacacagttgggggacctggctcagcccggccccgagctttctcccacagcggggtacacagcctggacggcggagaagtagacagtcaggcgctacaggaactgacgcagatggtgtctggccctgcatcgtactctggcccaaagccttctacccagtatggagctccaggaccctttgcagcccctggtgagggaggtgccttggcggccactgggcggcccccgctgctgcccacccgagcttctcgttctcagcgtgcggccagtgaggacatgacgagtgatgaggagcgcatggtcatctgtgaggaggaaggggatgatgatgtcattgctgacgatggcttcggcaccactgacattgatctcaagtgcaaggagcgggtgaccgacagcgagagtggggacagctctggggaggacccagagggcaacaagggctttggtcggaaggtgttttcacctgtgatccgttcctcctttacccactgccgccccccactggaccctgagcccccagggcccccggatcctcctgtagcctttggcaaaggctatggttccgccccatcctcctctgcgtcctcgcctgcttcctcctcagcctcggcagccacctccttctcactgggctcaggaaccttcaaggcccaggagtctggtcagggcagcacagcgggccccctacggcccccaccccctggggctgggggtccagcgacaccttccaaggcaacccggttcctcccaatggatcctgccaccttccggcgcaagagacccgaaagtgtgggtggcctggagccaccaggcccctcagtcatcgcggcccctcccagcggaggaggaaacatcctgcagacactggtgctgcccccaaacaaggaggagcaagagggcggcggagccagagtgccctccgcccccgccccatcactggcctatggggccccagcagctcccctgtcccgtcctgccgccaccatggtcaccaatgtggtgcggcctgtcagcagcactcctgtgcccatcgcctctaagcccttccccacctctggccgggctgaggcgtctccaaatgacacagcaggtgccaggactgaaatgggcactgggtctcgggtgcctgggggctccccgctgggtgtcagcttagtgtattcggacaagaagtcggcagcagccacctcaccagccccacacttggtggctggacccctgctgggcactgtggggaaggcgcctgccactgtcactaacctactggtgggcaccccggggtatggggcccctgcgccccctgctgtccagttcattgcccagggggcccctggtggtgggaccactgcgggctcaggagcaggtgctgggagtggccccaatgggccagtacccctgggcatcctgcaaccaggtgccctgggcaaggctgggggaatcacccaggtacagtacatcctgcccacgctgccccagcagcttcaggtggcacctgccccagcaccagcccctgggaccaaggcagcggctcccagcggccctgcacccaccaccagcatccgtttcaccctcccaccgggcacttccaccaacggcaaagtcctggctgccactgcacccactcctggcatccccatcctgcagtctgtaccctccgccccaccccccaaagcccagtcagtttctcccgtgcaggccccgcccccgggtggctcagcccagctgctgcctgggaaggtcctagtgcctctggccgcccctagcatgtcagtgcggggtggaggggccggccagccactgccactggtgagcccgcccttctcagtacctgtgcagaatggtgcccagccccccagcaagatcatccagctgaccccggtgcctgtgagcacacccagcggcctggtgccgcccctgagcccagccacactccctggacccacctctcagcctcagaaggtcctgttgccctcctccaccagaatcacctatgtgcagtcagcgggcgggcacgcgctgcccctgggtaccagccctgcgtccagccaggctggaacagtcacctcgtacgggcccacgagctctgtagctctaggcttcacctcgctggggcccagcggccccgccttcgtgcagcccctgctctcagcaggccaagccccactgctggctcccggtcaggtgggcgtgtcacctgtgcccagtccccagctgccgcctgcctgtgcagcccccggaggtcctgtcataacagcattttactctggcagccctgcacccacctcctcagcacccctggcccagccatcccaggcccccccaagcctggtctacactgtggccaccagcacaaccccacctgcagccaccattctgcccaagggcccgccagcccctgccactgccaccccagccccgactagccctttccccagcgccacagcaggttccatgacctacagcttagtggcccccaaggcccagcggcccagcccgaaggccccccagaaagtgaaggcagccatcgccagcattcccgtggggtcctttgaggcaggtgcctctgggcggcctggccctgcaccccggcagcctctggagcctggcccagtccgagagccaactgccccagagtctgagcttgaggggcagcccacaccaccagcccctccacccctgccagagacctggactcccacggcccggagcagccccccactgcccccacctgctgaggagcggaccagcgccaagggccctgagaccatggccagcaaattccccagctcatcttcagactggcgcgtccctgggcagggcctggagaatcgtggggagcctcccactcctcccagcccggccccagctccagctgtagcccctggtggcagcagcgagagcagcagtgggcgggcagccggggacaccccggagcgcaaggaggcggctggtactggcaagaaggtgaaggtgcggcccccgcccctgaagaagacctttgactctgtggacaacagggtcctgtcagaagtggacttcgaagagcgctttgctgagttgcctgagtttcggcctgaggaggtgctgccctcccccaccctgcagtctctggccacctcaccccgggccatcctgggctcttaccgcaagaagaggaagaactccacggacctggattcagcacccgaggaccccacctcgcccaagcgcaagatgagaagacgctccagctgcagctcggagcccaacacccccaagagtgccaagtgcgagggggacatcttcacctttgaccgtacaggtacagaagccgaggacgtgcttggggagctagagtatgacaaggtgccatactcctccctgcggcgcaccctggaccagcgccgggccctggtcatgcagctctttcaggaccatggcttcttcccgtcagcccaggccacagccgccttccaggcccgctatgcagacatctttccctccaaggtttgtctgcagttgaagatccgtgaggtgcgccagaagatcatgcaggctgccactcccacggagcagccccctggagctgaggctcctctccctgtaccgccccccactggcaccgctgctgcccctgcccccactcccagccccgcagggggccctgaccccacctcacccagctcggactctggcacggcccaggctgccccgccactgcctccacccccagagtcggggcctggacagcctggctgggagggggctccccagccctcccccccacccccaggtccctccacagctgccacaggcaggtgagggacccctgagaagatgccaggacttatagtaccccctcaggacatggacagtatgtgggggcaggaaggttatctcctcccgggtaaagccatttcgtcctctccagtttggggcggaatgaggcctgctcctcttgtaaatacccccttccctcgaagctccctcccggtgctggggggcagctgaggggctgcaggggcagtctccctcctccaagcccctgtacataacctggagcgtgtgaccttcagagcttttcactttatgcaaaatggctcctgtgagggctgcaagctggagggtggtgcaggccttgggccacagggaggcgcctgtggaatagggggagttcatgcaccccttttttccccagaggggctggactcaggttagtttgggggtgggggctcctgcactttgccacaggcacggggagggttttctcctcaccccctctgccctcccaacttgggttgtactttctaagaaggtgattccccctgcccttgcccccttccccagaacaaaacatgttgatcatgtgcaatatttcttactgtgccgagaagccgcaatgagcgagattaaagctgtttaacacac

SEQ ID NO: 129149 - DNA, 1658 bp, Homo sapiens
gcctgcgttcagtgaggcctcccgtggcgtcagcatgttcgtgtggaggaatgtggaaggtcactctgcggccgtgttctcctggtactccatccccttcctgacccctccctgcagccacacgaggcccagcaacctgccagtcactcagtggcctccaaccagagaaaacaacctgccaagttggcagccgttgctcatgagcgtccaccaggcccagtccctcagtgccctgcgcaaggaacaggactcatcttctgagaaggatggacgcagccccaacaaatcagacaaggaccacatccggtggcccatgagtggcgctcatgatcttcagcaggcggcaccaggccctggcggggcgcaccagggtcatcccaaccaggataaccggaccgtcagccagatgctgagcgagcggtggtacaccctggggcccaatgagatgcagaaatacaacctggccttccaggtgaaggtggcccacttgcaacaaggaccgaaagaagtccagctcagaggccaagcccacaagccaggggctagcaggagtgtaacaagggctcgtgggagcggagcatatcagagacgggcactgccactgcccctggggtgtcctctgaactcctgtcagttgcagcccaaacactccagagctcggataccaaggagcagcttctgtggggcagaacggctgcacacagtccagggaacctggctcagcctggcccaagccttctcccacagcggggtacacagcctggacggcagggaaatagaccgtcaggcactacgggaactgacacaggtggtgtctggcactgcatcatactctggcccaaagccttctactcagcatggagctccaggccactttgcagcccctggtgagggaggtgacccgtgggcagccctgctgccgcccacgagccttcaaagcccaggagtctggtcaacgcagcagagcgggccccctacggccccaacccctggggatgggggcccagggacgccttccaaggtggcctgtttcctcccaatggatcctgccaccttctggtgcaagagacctgaaagtgtgggcgacctggagctaccaggctcctcagtcatcagggtggagaagccgaggacaggctcagggaaccggagaccgagaaggcgctgtcctcttcactgcacgtacactggaccagtgccggccctgatcatgcagctcttccaggcccactgcttcttcctgtccactaggccacagccgccctccaggcccactatgcacacatcttcccctccaagagcttttcacttttcggaaaatagctcctgctggggctacaaagatggagtgtgaagagagccttgggccacagggaggtgcctgtggactagggggagttcatgcaccccttctttccccagaggggctggactcaggtgagtatgggggtgggggctcctacacttcgacacaggcagcgggagggttttctccccattccctctgcactcccaacttgagctatactttttaagaaagtgattcaccctgcctttgcccccttccccagaacagaacacgttgatcatgggcgatatttttcactgtgccaaaaagttgccatgaccgtcattaaacctgtttaacaccaaataat

SEQ ID NO: 129150 - DNA, 1170 bp, Homo sapiens
ctggttcctttaagcgccccaagcgaagcagggcggcccggccggcggtggggacatcggtttccctttgaaggggacggccaaagcccgagtgaccagcggcggcggggaggactagtccccggccagtttggtgccctggttgtcagatgttggaaagcagtaggacggaacatactcttcgtggttgtgtatccgttctggggtgcagcaattaacattggactttggttcctgtgactcttgcctgtgtcgatagagttaaactggagctctgctttgaaagataaataaagcacagcctctcacctggacataaatggatctaaagacagcagtatttaacccagctcgggatggcaaactccggcttctcacaaaataaaatggcaagcaaatccaaagaggaggtttcctccttgatctctgaaaaaacaaatggggccacgccactcttgatggccgccaggtatgggcaccttgacatggtggaattcctcctagagcaatgcagtgcctccatagaagttgggggctccgtcaattttgatggcgaaaccattgagggggctccccctttatgggccgcttctgcagcaggacatctgaaggtggtccagtccttgttaaatcatggagcatctgtcaacaacacgactttaaccaattcaactcctcttcgagctgcgtgtttcgatggccatttggaaatagtgaagtaccttgtagaacacaaagctgatttggaagtgtcaaaccgacatgggcatacgtgcttgatgatttcatgttacaaaggacataaagagattgctcagtatttacttgaaacagggggcagatgttaatagaaaaagtgtcaaaggtaatactgcattgcatgattgtgcagaatctggaagtttggacatcatgaagatgcttcttatgtattgtgccaagatggaaaaggatggttatggaatgactccccttctctcagcaagtgtgactggtcacacaaatattgtggattttctgacacaccatgcacagaccagcaagacagaacgtattaatgctctagagcttctgggagctacattgtttacccaaaaagagatctcctgcgatgaatctgggaggaccagagacctgagccctaggagaaagccaccccacaccacatga

SEQ ID NO: 129151 - DNA, 623 bp, Homo sapiens
aatacatccctggtctggcttcaccactccactccacagcacccccatgctcaccagctccaagtggcatcccactgaagggtcactgtgtcccctccagagggccaggaagcatggcgtgcccctctgtgccccctcagtgcccccagtgagaagcctggcacagagaaggcacccagggagtgaaaattgaaaacacaaaagaacaacataggcccccaggcatgtaattcccagctggcgtccgtctccactcgctcacccccacccacgctgagtgtgcccattattatgactgatgacagccaggcctcccagctccttctggctgctgtgaccatcaggaagctgtggagtaggatggctcccatgctggccctgcccacaggacagtctggtcagacgggtgcagagggacagggaaaggagggggaacgtggacagagcccctgctggaagcctcgcctagaccccaagctgtgtggcctcggcagcccgcgcagcttctctgagcggacgtctgcactggtccctgggggtgcgaggctgccctgcagactgtcgcctaccctgcctcagcccatcctctgcacagcagcccaaggaagcctcccgcagcgcac

SEQ ID NO: 129152 - DNA, 1041 bp, Homo sapiens
atggaatgggaggattgccgagcagggttgagagccctgctggactgcacgctgaagatttgtagtggaaccagcctgcagttgcatgtgttctcgggcactcagcagctggggatgagagaggagaaggcagatgggcagttggtccatgagtggacggcgatgccaaaagacttttcccgcctccaggccaacgtggactccaaaggaaaagaaccttgtaaatatgatggcataccccctaaaacacaggattctgtttattatgccaaagaagaaaagaagaaaacattggcagaacctttagtccaaaggggtgcagaaggtgacgtgtataaagcaccgactcctagcaaggaaacccaaggggcgctggacgtcaaagaggagcacaatgtgcagctggaggtgcctgtggaccagttatattcatatagttccccgaaaacctgcaaagataaggaagttgaaggaaatggtggaattgcacgacttagagtattcggtactggacaaaaagactggactgcaactgaccccaaagaacctgcagacctagtggccatcgcttttgggggtgtctgtgtaggatttagtaatgctaagtttgggcacccaaacaatataataggcaatgctcctgacagctgtaaagtggatgggtgcatcctgacaactcaggaagaagaagccgtgatcaggcaaaagtggattctcccggcccacaagtggaaaccactgcttccagtgaccaagttgtctcccaaccaaagtcatctgttcgatagcctgaccctagagctccaagatgtcatcactcacgccaggctcaccatcgtccccgacgggggagtgagccgccttcggctccggggcttccccagctccatctgcctcctgaggccccgggagaagcccatgttgaagttctcggggatgcgggagagaagggagacaaaggcgcccccggacggcctggaagagtcggccccacgggagaaaaaggtacctgcagccctgggccggccctcagagctctga

SEQ ID NO: 129153 - DNA, 1373 bp, Homo sapiens
atgaaggccagagtaaacaaatttggccacattaagcacctggtcaccaaggctgcttttagctctggcaaagtggatattgtcatcatcaatgatgccttcattgacctcaactacctggcctacatgttccactttgatgctggggctggcatttccctcaatgactactttgtcaagcttattccctggtatgacaatgaatttggcaacagggtagtggaggcctcatggtccacatggcctccaaagagtaagagcccctggaccaccagccccagcaagagcacaagaagattagagaggtctccacaggccgtggtcaagctcttgctgacttttgaagcgaaatcccatatgaacaaaggaaaggagatcagtcagctgccctcgtttctgtctgattggtgccagtgcagtacctggtctcacaacctgacgattgttcctgagcctgagcagcgtctgacgggccaggcggacagcagccacgactgcccccagggaccagtggctctgtgttgggctcaggaacggggatcagagaggtgggggaaaggcttctgcgtgcccagagacctttacgaagctgtagcttgcacagatcacttgcatgtggacccaagcctggcagcgaacaaggaaggagttggtgtcctgcctgcgctcaggatgagggggaatctggccctggtgggcgttctaatcagcctggccttcctgtcactgctgccatctggacatcctcagccggctggcgatgacgcctgctctgtgcagatcctcgtccctggcctcaaaggggatgcgggagagaagggagacaaaggcgcccccggacggcctggaagagtcggccccacgggagaaaaaggtgagaaaggagattccggtgacataggaccccctggtcctaatggagaaccaggcctcccatgtgagtgcagccagctgcgcaaggccatcggggagatggacaaccaggtctctcagctgaccagcgagctcaagttcatcaagaatgctgtcgccggtgtgcgcgagacggagagcaagatctacctgctggtgaaggaggagaaaccctacgcggaccccccactgtcctggcaaggccgggggggcacgctgagcatggcccaggacgaggctgtccatggcctgaagggcgcatacctggggcaagcccgcctgggccgtgggtttattggaattcaccgaccctggaaaaggagggccccccttttgttattttgaacactttcccctttgcggtctttttaaaagggggacggaggggggaacacccaaaaaggctcaagaaaaaagagggaactggcggggcaaatttgggggccttgcatccgccgcct

SEQ ID NO: 129154 - DNA, 420 bp, Homo sapiens
agtgaacacaagcgtgttgttttctctatcttcttcacggccgactcagtggtcagcggaactttgatgatagcatagtggcgacgcttgtttctcctgggggtgctcttccgaggatatctgggctgcctccggagtcgcagtgtcttgggccgcctgaaggtgagtgacatgcggatcttcttttttgcgtgtggctgcggacacctttcaacactgccttcttggcctttaaggccttcgctttggcttcggctttaggaggagcaggagcttccttcgctttcggtgccgtcttcgggtcgcagtgcgagccgtctgctttagctgggctggcggggcttcggcccttccccatcgccccgcctcacagtgcagttttccggaggacgccgagcccagggtccatctcggacgaaa

SEQ ID NO: 129155 - DNA, 284 bp, Homo sapiens
gcgcgccacagcttgagcagcatcggggccagcggcccaagaacgcagcgtgcaagaatccagcgttaatgcgcagggtgatcccggagggcggctacacactctggctggtgttcaccatgaataagctctggctggtgttcaccatgaataagcccaggttcctctccggcgacttcaagctgaaggccctgctggggtacccctcggagaacccgtgtttcctcaagggctccttcaagcccaacctgcccttggtgtggtgctcgcacaagaaagcctgg

SEQ ID NO: 129156 - DNA, 373 bp, Homo sapiens
  misc_feature (1)...(373): n = a,t,c or g
ttaaataaaacaaattttggcccccccccttcacgttgggggnnnnnnnnnnnnnnnnnnnnncccccccaggggggcggggatgctttcccaaaagggcccccccctttaaaaaaagtttttttgggggcannnnnnnnnnnttttaagaaaaaagggggggcccccccccggaaaagggtcttggtttcccccggcnnnnnnnnnnnnnnnnnnnnnnnnnnnnnnnnnnnnnnnnnnnnnnnnnnnnnnnnnntacccaggctttcttgtgcgagcaccacaccaagggcaggttgggcttgaaggagcccttgaggaaacacgggttctccgaggggtaccccagcacggccttcagcttgaagtcgcc

SEQ ID NO: 129157 - DNA, 454 bp, Homo sapiens
tcttcttttttgcgtgtggctgcggacacctttcaacactgccttcttggcctttaaagccttcgctttggcttcggctttaggaggagcaggagcttccttcgctttcggtgccgtcttgtctctggggaccctgcccgcgcgcaggctggctccactcgctccactggcctgtgtcacactctttctctgccacgtcaacctttggcatggccatctggacatgaagcctggcctcagggataaagccacagtccagctcaaaggtttcaagtaggatccaggtccccccgacaatgtgatccgctgtgttgggcccgaagcggttagcagtgaaagccgtctgcttaagctgggcgggaggggattcggactttccccatcgccccgcctcacagtgcagttttccggaggacgccgagcccagggtccatctcgaccgcgactcgtgccg

SEQ ID NO: 129158 - DNA, 687 bp, Homo sapiens
  misc_feature (1)...(687): n = a,t,c or g
caggtgaagctcgaggcgctgtggcgctttgaagccggagagaagctcagtagaatcgggaaggcgctggggctgtccaactccaccttggccaccattcgtgacaacaaggaaaagatctgggcgagttcccaggaggccacactgcaggcggccaccaagttgacgcgtggccgcagcctggtgttcaccatgaataagctctggctggtgttcaccatgaataagcccaggttcctctgtaagcgcctgccgagaggacgttcattttcctgtggaagatgagtcggcccctgggtcaaagccgccggagacctcctgaccctattgctcggtggcaacgcagccggcgacttcaagctgaaggccctgctggggtacccctcggagaacccgtgtttcctcaagggctccttcaagcccaacctgcccttggtgtggtgctcgcacaagaaagcctgggtannnnnnnnnnnnnnnnnnnnnnnnnnnnnnnnnnnnnnnnnnnnnnnnnnnnnnnnnnccccggggaaaccagagcccttttccagggggggtccccgccttttggtttaaagggggggggctcttcccccaaaaaaatttttttaaaggggggctccccttttgggaaaattttccgggccccccgggggtttaaaaaaaaatgtggtttttcccccaacg

SEQ ID NO: 129159 - DNA, 1355 bp, Homo sapiens
tgcattcgttcgccactcttggcatgagggagatggaccctgggctcggcgtcctccggaaaactgcactgtgaggcggggcgatggggaagggccgaagtccccgccagcccagctaaagcagacggctcgcactgcgacccgaagcgcgagtcatggctggggccttagtggcaacaagtgctgagatcagcgggctcagtagcaggaacacaagcacccccttgcggtgtctggaggaagcggcgcgggacagtctcccgctccaccgtgtcgggcctgaagaggcggcttgaacgctcgcgattactgaggcatctggtaggatcgcaaggccatcaacctacaggtgaagctcgaaggcgctgtggctctctgaaagccggagagaagctcagttagaattcgggaaggcgctggggctgttccaactccaccttgggccaccatttcgtgaacaacaaggaaaagatcttgggcgatttcccaggaggccacactgcaggcggccaccaagttgacgcgtggccgcagcctggtgatggagaacatggagcagctgctgagcatgcggatggaggaccagagccagcgcaacatgcccctcagtgtggtgctcattcgggagaaagcccacagcccgttcgagaaccgcaagcaggagcagggcgagggcgcctcacccgagaactttcgggcccgtccaaggttgattccttgcttttaaggcggcgccaccagcttgagcagcatcggggccagcggcccaagaacgcagcgtgcaagaacccagcgttaatgcgccagggtgaatcccggagggcggcttacacactctggctggtgttcaccatgaataagctctggcctggtgttcaccattgaataagcccaggttcctctgtaagcgcctgccgagaggacgtttcattttcctgtggaagatgagtcggcccctgggtcaaagccgtccggagacctcctgaccctattgctcggtggcaacgcagccggcgattttaagttgaaggccctgcctggtgtacccctcggagaacccgtgtttcctcaagggctccttcaagcccaacctgcccttggtgtggtgctcgcacaagaaagcctgggtacagcctgggtgacagagcgagactccgtttcaaaaaaaaaaaaaaaaaaaaaaaaaagcctgggtaaccatgagcctcttccaggagtggttcctgcacttttgctctacagtggagggcgctgcacccagtacgaccttccctacaaggggctgcccatcctggacagcactcccggccaccctgggtgttgagacagagcgagactccgtctcaaaaaaaaaa

SEQ ID NO: 129160 - DNA, 375 bp, Homo sapiens
cccacgcgtccgcccacgcgtccgggctgcagcagagctaccaagcagtcaaagagaagtcctctgaagccttggagtttatgaagcgggacctgacggagtttacccaggtggtgcagcatgacacggcctgtaccatcgcagccacggccagcgtggtcaaggagaagctggctacggaaggctcctcaggagcaacagagaagatgaagaaagggttatctgacttcctaggggtgatctcagacacctttgccccttcgccagacaaaaccatcgactgcgatgtcatcaccctatgatggcaccaaggctcgcctctatagcctgcagtcggacccagcaacctactgtaatgaaccagatgggcccccg

SEQ ID NO: 129161 - DNA, 436 bp, Homo sapiens
tcgggtgaatcactttaatgctgttaacggcaagtctgtaaaaggttcaggacaaagttcttttttctttcttttttaattataaaactaacagctgttagaatctttttttctttttttccttttttcttttcccagctacaaaatactctggggagatgcattataatttaaaatatataatattgcacaaacaaccaaaaggttaattaaactaaagaaataattacaaagagaaaaaccccatcccgtcaaaaaaaagattcagcattctctccatcccaccccctcactgaaggtttgaagtggaagtgacctcactctctcggtgtccctgacccacgatggttttgtctggcgaaggggcaaaggtgtctgagatcacccctaggaagtcagataaccctttcttcatcttctctgttgctcctgagga

SEQ ID NO: 129162 - DNA, 959 bp, Homo sapiens
tttcgtgggaggacgtgggatggtggcggagctggctgcagcagagctaccaagcagtcaaagagaagtcctctgaagccttggagtttatgaagcgggacctgacggagtttacccaggtggtgcagcatgacacggcctgtaccatcgcagccacggccagcgtggtcaaggagaagctggctattgcagcctgttcccggggcgcttgcttcctctgcccgttctctatacagacggaaggctcctcaggagcaacagagaagatgaagaaagggttatctgacttcctaggggtgatctcagacacctttgccccttcgccagacaaaaccatcgactgcgatgtcatcaccctgatgggcacaccgtctggcccagctgaaccctatgatggcaccaaggctcgcctctatagcctgcagtcggacccagcaacctactgtaatgaaccagatgggcccccggaattgtttgacgcctggctttcccagttctgcttggaggagaagaagggggagatctcagagctccttgtaggcagcccctccatccgggccctctacaccaagatggttccagcagctgtttcccattcagaaatttctggcatcgggtatttctataaagtccatcagttagagcaggagcaggcccggagggacgccctgaagcagcgggctgctctggtgattcttgtacctaatctggtgtgctcaccaatgagtgaaagggatcgtgggtcagggacaccgagagagtgaggtcacttccacttcaaaccttcagtgagggggtgggatggagagaatgctgaatcttttttttgacgggatggggtttttctctttgtaattatttctttagtttaattaaccttttggttgtttgtgcaatattatatattttaaattataatgcatctccccagagtattttgtagctgggaaaagaaaaaa

SEQ ID NO: 129163 - DNA, 425 bp, Homo sapiens
cgacgatttcgtgcggaaggggaggacgtgggatggtggcggagctggctgcagcaaatctaccaggcagtcaaagagaagtcctctgaagccttggagtttatgaagcgggacctgacggagtttacccaggtggtgcatgatgacacggcctgtaccatcgcagccacggccagcgtgggcaaggagaatctggctgtgagtaccacccaaaccctcccaagtaactgcccctcgcaacctgtcctgtgctgggctcccaacctttctaccattaagtgatcatttttccatatggggaaaaatatgtggagtacttttcctcccattttgaaagaattgtgtctggcaaccaaacaagctgcatattttaagtaataattagttttcccacttctgtattgttctagcaaatgttttccatt

SEQ ID NO: 129164 - DNA, 1194 bp, Homo sapiens
atggggtttctccatcttggtcaggctggtcttgaattcctgacctcaggctcaagcacggacatcagtgaggactgggagaaagactttgacttggacatgactgaagaggaggtgcagatggcactttccaaagtggatgcctccggggagcccttctgcttctggaagggctatcctgggggtgaacttgaaactctcatcaggcttctgcaaaagctcttcttcctgaagacagacccagcctttgtgctctcaccctccactctggtaaagctgcacctctgggggaatgaggggctgcaggaatctctggagagcctggtgcttcacgatgctgctctggtgattcttgtacctaatctggagaagaagggggagatctcagagctccttgtaggcagcccctccatccgggccctttacaccaagatggttccagcagctgtttcccattcagaattctggcatcggtatttctataaagtccatcagttagagcaggagcaggcccggagggacgcgcctgaagcagcgggcggaacagagcatctctgaagagcccggctgggaggaggaggaagaggagctcatgggcatttcacccatatctccaaaagaggcaaaggttcctgtggccaaaatttctacattccctgaaggagaacctggcccccagagcccctgtgaagagaatctggtgacttcagttgagcccccagcagaggtgactccatcagagagcagtgagagcatctccctcgtgacacagatcgccaacccggccactgcacctgaggcacgagtgctacccaaggacctgtcccaaaagctgctagaggcatccttggaggaacagggcctggctgtggatgtgggtgagactggaccctcaccccctattcactccaagcccctaacgcctgctggccacaccggcgtttttagttggaggaagaggagctcatgggcatttcacccatatctccaaaagaggcaaaggttcctgtggccaaaatttctacattccctgaagggaggaccctggccccccagagcccctgtgaagagaatctggtgacttcagttgagcccccagcagaggtgactccatcagagagcagtgagagcatccccaaatctcctctgccaaccagagctctgggcacagattctggtggctccctgctggcc

SEQ ID NO: 129165 - DNA, 1101 bp, Homo sapiens
tttcgtggcaagatggcggaagggtgagcttgtcgttttgctcctaggcgttggggcctgaattctcccagggttggggtgctgggcgagagtcccggtggggaacgtgagatcagcgggggcgtggactgatctgaaagggcagagtggagtcgcattgtgagggggtgggcaagcggtctgcgaagcctcggcccgcagggtacatctgagcggggaacaaaccggatccttgggcgggcaggaatcgcaccgcggtgctgccagatgtgtctgtcttccacagggaggacgtgggatggtggcggagctggctgcagcagagctaccaagcagtcaaagagaagtcctctgaagccttggagtttatgaagcgggacctgacggagtttacccaggtggtgcagcatgacacggtctgtaccatcgcagccacggccagcgtggtcaaggagaagctggctacggaaggctcctcaggagcaacagagaagatgaagaaagggttatctgacttcctaggggtgatctcagacacctttgccccttcgccagacaaaaccatctgactgcgatgtcatcaccctgatgggcacaccgtctggcacagctgagccctatgatggcaccaaggctcgcctctatagcctgcaggcggacccagcaaccttattgtattgaccaagatggccccccggaattgtttgacgcctggctttcccagttctgcttggaggagaagaagggggagatctcagagctccttgtaggcagcccctccatccgggccctctacaccaagatggttccagcagctgtttcccattcagaattctggcatcggtatttctataaagtccatcagttagagcaggagcaggcccccgagggacgccctgaagcagcgggcggaacagagcatctttgaagagcccggttgggaggaggaggaagaggagctcatgggcattttacccatatttccaaaagaggcaaagtttcctttggccaaaatttcttacattccctgaaggagaacctggccccccagaggcccttttaaagagaatcttggtgacttcagttgagcccccagcagaa

SEQ ID NO: 129166 - DNA, 568 bp, Homo sapiens; identical to SEQ ID NO: 117129
  misc_feature (1)...(568): n = a,t,c or g

SEQ ID NO: 129167 - DNA, 467 bp, Homo sapiens
cccacctgcacccaggtgaaataaacagccatgttgctcacacaaagcttgtttggtggtctcttcacacggacacgcatgaaatttggtgccgtgactcggatcgggggacctcccttgggagatcaatcccctgtcctcctgctctttgctccgtgagaaagatccacctacgacctcaggtcctcagaccgaccagcccaagaaacatctcaccaatttcaaatccgcacacaagaacttccaaacgcctgaaccgcagcggccaggcgttcctccagaacctccttccccaggagcttgctacaagtgccagaaatctgaccaccaggccaaggaatgcctgcagcccaggattcctcctaagccgtgtcccatctgtgcgggaccccactggaaattggactgttcagctcacctggcagccactctcagagcccctggaactctggcccaaggctctctga

SEQ ID NO: 129168 - DNA, 155 bp, Homo sapiens
catggccttttaaatcctataaactctccttacaattcccccattttacctgtccaaaaaccggacaagccttacaggaagctggagtcattcactgcaagggccatcaaaaggcatcagatcccatcactcagggcaatgcttatgctgataag

SEQ ID NO: 129169 - DNA, 160 bp, Homo sapiens
atcttctcggactgacgctgcccgatcgcctcagaagcctcctggaccatcacagatgctttgggtaactcttacagtggaggcatggccttttaaatcctataaactctccttacaattcccccattttacctgtccaaaaaccggacaagccttacag

SEQ ID NO: 129170 - DNA, 331 bp, Homo sapiens
ttgccccttccccagaaaagcgggacttgctgctaagggtgaaggaccaaggcaggcgtccctgcgtggtctgacacctttgaaacgtgggtgaataatcaggcatctctgcaatgattaaacaccaagggaaggctgccttcccagtccgtgaccagcaccggagttttgggtccatggataaaacgtgtctcctttgtctctctagagcaaagagcaggaggacaggggatttatctcccaagggaggtcccctgatctgagtcacggcaccaaatttcatgtgcgtccgtgtgaagagaccaccaaacaggctttgtgtgagcaacat

SEQ ID NO: 129171 - DNA, 937 bp, Homo sapiens
gattaaagcccgttatcacttgcctgttacagcttggccttttaaagcctataaactctccttacaattcccccactttacctgtccaaaaaccagacaggccttacagcaaaccgaactcattgccttaactcaatccctcacttttgcaaaggaattacacgtcaatatttttactgactctaaatatgccttccatatcctgcaccaccatgctgttatatgggcagaaagaaatttcctcactacacaagggtcctccatcattaatgcctttttaataaaaactcttctaaaagccgctttacttccaaaggaagctggagtcattcactgcaagggccatcaaaaggcatcagatcccatcactcgggacaatgcttatgctgataaggtagctaaagaagcagctagtgttccatcttctgtccctcatggccagtttttctccttctcattggtcactcctatttactctcctactgaaatttccacctatcgatctcttcccactcaaggcaaatggttcttggaccaaggaaaatatctccttccagcctcacaggcacattctattctgttgtcatttcataacctcttccacgtaggttacaagctgctagactgcctcttagaggctctcatttcctttccatcgtggaaatctatcctcaaggaaatcacttctcagtgttccatctgctattctactactcctcagggagtgttcaggccccctcccttccctacacaccgagcttggggatttgtgcctgcccaggactggcaaattgactttactcacatgcctcgagtcaggaaactaaaatacctcttggtctgggtagacactttcactggatggatagaagcctttcccacagggtctgtaaccaggccatcactaatcattctatacgacaaatgtttcttctaa

SEQ ID NO: 129172 - DNA, 1404 bp, Homo sapiens; identical to SEQ ID NO: 117133

SEQ ID NO: 129173 - DNA, 306 bp, Homo sapiens
tcactgtccatcaaccactttctcctttccactcttcaatctctcccttctcttaatttcaattcctttcattttccttagcggcaagtcccgcttttctgggagagggttaagtaccccaaccccttctccttcacccttagtggcaagtcccgcttttctggcagccattcccagagcccctggaactctggcccaaggctctctgactgactccttcccagatcttctcggattagcggctgaagactgacgctgcccgatcgcctcggaagccccctgcacccaggtgatataaacagccat

SEQ ID NO: 129174 - DNA, 667 bp, Homo sapiens; identical to SEQ ID NO: 117149
  misc_feature (1)...(667): n = a,t,c or g

SEQ ID NO: 129175 - DNA, 428 bp, Homo sapiens; identical to SEQ ID NO: 117150
  misc_feature (1)...(428): n = a,t,c or g

SEQ ID NO: 129176 - DNA, 436 bp, Homo sapiens
  misc_feature (1)...(436): n = a,t,c or g
gcatatgcggaccagctctgantaaggagacataaacnnnnnnnnnnnnnnnnnnnnnnnnnnnnnnnnnnnnnnnnnnnnnnnnnnnnnnnnnntttggcgccgtgactgggatcgggggacctcccttaggagatcaatcccccgtcctcctgctctttgctccgtgagaaagatccacctacgacctcaggccctcagaccgaccagcccaagaaacatctcaccaatttcaaatccggaccccactggaaatcggactgttcaactcacctggcagccactcccacagcccctggaactctggcccaaggctctctgactccttctcggcttagcggctgaagactgacgctgctggatcgcctcggaagccctgtagaccatcacggacgccaagcnnnnnnnnnnnnnnnnnnnnnnnnnnnnnnnnnnn

SEQ ID NO: 129177 - DNA, 742 bp, Homo sapiens
atgcaccttaccatcccattaaaacctaatcacccttaccccactcaatgccaatatcccatcccacggcatgctttaaaaagattaaagcctgttatcactcgcctgctacagcacggccttttaaggcctataaactccccttacaattcccccattttacctgttcaaaaaccagacaaggcttacaggttagttcagaatctgccccttatcaaccaaattgttttgcctatccaccccgtggtgccaaacccatatactctcctatcctcaatacctccctccacaacccatttttctgttctggatctcaaacatgctttctttactattcctttgtaccctttatcccagcctctcttcgctttcacttggactgaccctgacacccatcaggctcagcaaattacctgggccgtactgccgcaagccttcacagacagcccccacttcaaatcacccaagcagcttctcaggctcttggtattcagtggaaacttcatatcccttatcgtcttcaatcttcaggaaaggcagaacggactcgtggtctttgaaagacacacctcaccaagctcagcctccaacttaaaaaggactggacagtacttttacctcttgcccttctcagaattaagagcctgtcctcgagatgctacagggtacagtccatttgaacttgtatacggatgcgctttcttactcagccccaacctcgtcccagacaccagccccctag

SEQ ID NO: 129178 - DNA, 630 bp, Homo sapiens
cagtccaagtgaaagtgaagagaggctggaattaagggtgcaaaggaatagtaaagaaagcatgtttgagatccagaacagaataatgggttgtagaggcaggtattgaggataggagagtatatggatttggcaccacggggtggataggcaaaacaatttggttgataaggtgcagatcctgaactaacttgtaaggcttgtctggttttaggacaggtaaaatggggaaattgtaaggagagtttataggctttaaacggccatgctgtagcaggcgagcaaggttttattgagtagaagcagctctcaccagatgggggaaccagaagggagatggttttcctctgtagttgggctggttgcctggctcttctctgactgttctggccaaacttgacattgtgccattggttgatggcctgccggtccccgtcagcgtgctcttcggctggtgggctctccatgaccagctgcttgtgtcttcttccaccagtgtgttcctcacgatgtccagccacttctgtgtctgcccactaggttctccggtttttatgggcttatcaattttattgatctcaaagaatttacctttggttttattgactttttcagctgcttttctgtttt

SEQ ID NO: 129179 - DNA, 357 bp, Homo sapiens; identical to SEQ ID NO: 114504

SEQ ID NO: 129180 - DNA, 576 bp, Homo sapiens; identical to SEQ ID NO: 115923

SEQ ID NO: 129181 - DNA, 627 bp, Homo sapiens
atggaattttgtatttcattaggccggaaaataactttttcaaacatttttccctacaacggggccaattggaaggttttcttaaaaaagtcccaaccattattgaatgcactggttgagcaggatgatgccgaacgcttgttccgccgcttccgagcggcaggggatttaccgtatggcgcttttggtgaaattttctgggaaacacagtgccaggagatgcagcagcttgccgacagagtcattgcctgtcgccagccggggcagagtatggaaattgatctcgcctgcaacggtgtgcagataactggctggttgccgcagctttgggatgctgaagggatcagcttcagtgtcttcagctttgggatgctgaagggatcagcttcagtgtcttcagctttgggatgctggagcttgctacacatgctggaaatctgccactgggccaaggaatgcccacagcacggtattcctcctaagccacgtcccatctgtgtgggaccccaccgaaaatcggactgttcatctcacctggcagccactcccagagcccctggaactctggcccaaggctctctgactgactccttcccagatcttctcggcttagcggctgaagactga

SEQ ID NO: 129182 - DNA, 462 bp, Homo sapiens; identical to SEQ ID NO: 124296

SEQ ID NO: 129183 - DNA, 441 bp, Homo sapiens; identical to SEQ ID NO: 127060

SEQ ID NO: 129184 - DNA, 525 bp, Homo sapiens; identical to SEQ ID NO: 116093

SEQ ID NO: 129185 - DNA, 1080 bp, Homo sapiens; identical to SEQ ID NO: 119350

SEQ ID NO: 129186 - DNA, 645 bp, Homo sapiens; identical to SEQ ID NO: 120920

SEQ ID NO: 129187 - DNA, 1080 bp, Homo sapiens; identical to SEQ ID NO: 119354

SEQ ID NO: 129188 - DNA, 696 bp, Homo sapiens; identical to SEQ ID NO: 116192

SEQ ID NO: 129189 - DNA, 679 bp, Homo sapiens
ctgacttcttttcttcattgttgtctctctcaccattatcacggtgcacaaattcatccccgtcactttctccatctgatttgtcggtgtcactgtcatcagtactgtcatcatgcttatcttgatccatgtcctcaggatagccatcatcttcactggtgctggcagccactcccagagcccctggaactccggcccaaggctctctgactgactccttcccagatcttctcggcttagcggctgaagactgacactgcccgatcgcctcggaagccgctttgccgccctgtttcccgcgaccggacatgatcacctctcgcctacaactccagagacggagacaaaccgctctcggcgtccggtaccggaatgcaacgtaccgcacccgaactgcctctacaaactctttacggccgcgcggcagcccctttccattggctctggtgaccaatgacaggcaggtccgctcccaactagcgctctggaagagagaccgcctcctccagctctctccaatcaatagagcaatctccgaatcctcatttacatagccgctcacataaataacgaggccagccggctcagtctttgggacccagatgaatttagcggttacgggttttccacgaccacgctcgcttccaagcacataaactcgtaggaaataagaaaacat

SEQ ID NO: 129190 - DNA, 555 bp, Homo sapiens; identical to SEQ ID NO: 114510

SEQ ID NO: 129191 - DNA, 878 bp, Homo sapiens
atgtggattccaccacagtttatgacttgtaccttccagtgtggcaggtcgagctgcaccttggcccatttgagccatgactggggtagtcaagaaatgctgcactggaatatggggagcagaaaattgaagcagccctgggacgtcttggcactcagagcctgtgatgggaagggtggcactgactcagcccccctgcacccaggtgaaataaaaagctttattgctcacacaaagcctgtttggtggtctcttcacacggatgcgcatgaaatttggtgccgtgactcggatcggggggacctcccttgggagatcaatcccctgtcctcctgctctttgctccatgagaaagatccacctacgacctctggtcctcagaccaaccagcccaaggaacttctcaccaattttaaatcagtcccaactccaagcgttgctgagtctttccaatcttccttttctacggacccatctgacccctcctctcctccccaggctgctcctcgccaggccaagccaggtcccaattcttcctcagcctctgctccccgaccctataatccttttatcacctcccctcctcacacctggtcgggcttacagtttcattctgcgactagccctcctccacctgcccaacaatttcctcttaaaaaggtggctcaagttaaaggcacagtcaagtggctaaagactgatgctgcccgatcgcctcagaagcctacaggaaccatcacagatgctttagataactctcacagtggaggtccgataatggaccggcctttattagtcaaatcacccaagcagtttctcaggctcctggtattcagtaaaacctttatatcccttaccatcctcaatcttcaggaaag

SEQ ID NO: 129192 - DNA, 1332 bp, Homo sapiens
atggatgctggtacagtggccagaggggactgggaagtgaggaaaattgccatggtccagggtgttaactcccgggtgcttctggtttgccccatggatgagcacagtccacagacaacaccctcagacagagagacacaggaaactgacctgggagggagtgtcagcaggacacctcctcagtgggttaagaaagaattcaagagcgagccagtggtagaagaaaacagctgtattgagatggcaattttcatgcgtgtccgtgtgaagagaccaccaaacaggctttgtgtgagcaacatggctgtttatttcacctgggtgcagattacaacatgccccttgatagatcctgataaatctacaggatcaaaatgctataaattagtatcatacaattttcagacgattaacacccatgaaagcaggaggaaaattacttcagagaaaagcacagaaatgaaggaagaaatgaaagttctatatacgttctatgacctcgagcaggtggctgtcttcttgctgcgtctccacatggctttttctctgtgcgaaggcatccctgatgtctctctcatagaagagcaaagaaagcccatggagtctatagttatggtacaacttttagataggcctgacacggtcaggaaggcgatgagggtcagcaggaggaagaattggcgctgcggcggcatgcccggcgacgacccagttctcgccggcgaacgaaaagaaggcgaggaagaaatagatgcagcccacgatcggaaattcccagtcggtatccagaccgactgcatagatgcccttggccgaaagccatcccatcacccaactcgtcggcaccgtgacgacgccgcgggtaacgccattgtcgatacggcacccgtggcggtgccgatcggccaatgccggagcaatgatattgaccatgaagcaactggccatagttatgcgagtatatcagcatcaggtcagacgatcgatgcgtcccggccggaacggggcgcgatccggaatgagtgccgttggggcatactactcatcctgtattcgggttatgaccgcacttcagtcttgtaccggggacgacgaagctgtcttgctatagcctcgctcagcagcaacatgcttgtgcgcatgcgagatccaaaatcgcagcgattggcacgcgagcttgccaaccctcgtgatcaactcacacgaaggagagccctgatgaaagcgttgcgttttcatgccgccaaggatctgcggatcgaagatacccccgaaaccgatcgcgaaacgtctcaagggcaggggattgtgcggaatcgacctatcaattaa

SEQ ID NO: 129193 - DNA, 632 bp, Homo sapiens
atgaatcctcctgggagctccattaatgtgaaagatgactcaaagcacttgattgtaatgataagagagggagacacacagctggcggtgcagcaacaaccccctggtgccactggtcttccgaagacaaaggggacatcttttatccgtggacccaaaactccggcgccggtcacggactgggaaggcagccttcccttggtgtttaatcattgcagggacacctctctgatttttattcacccacgtttcagaggtgtcagaccaggcagggacgcctgccttggtccttcacccttagcggcaagtcccgcttttctgggggaggggcaagtaccccaacctcgtatctctgtgccccaatcccttatttccatgccccgacctctctctgtggcccaacctcttatctctgtgccccaacccctcatttccacgccccaacccctttcccgctttcctggaagatattttaatctttccctctgtgtcaactttgatgaccctgacagtgaaggtgagcatgataccgagatttctgagtgtcgtcttctcatcaggtgctcagataagagctcctatgctaggtcctttggacaacagagaaaaccaatgaagggtgtgcattctag

SEQ ID NO: 129194 - DNA, 375 bp, Homo sapiens
ccaggagtaagaggagcccagggtggtccctctatccccaggcagtgtgaagagtctgctattggtcctaaatttgcttggatcatctcttcctttcactggaagcaaggcatgttcaacatggaggctccttcttcccttttctttgtcaacatgtgtgcagtaaagaagcagacaacctggggccggccagacagaggattcatctggcagccacttccagagcccctggaactctggcccaaggctctctgactgactccttcccagatcttctcggcttagcagctgaagactgacactgcccgatcgcctcggaagcccctgctcttgtttacactgccggtttacactgtttctccaagccatcacagc

SEQ ID NO: 129195 - DNA, 1485 bp, Homo sapiens; identical to SEQ ID NO: 114306

SEQ ID NO: 129196 - DNA, 2206 bp, Homo sapiens
aatagatatgattttcacccctggacctccctccacgccaaaacacaagaagtctcagaaagggtcagcattcaccttcccatcccagcaatctcccaggaatgaaccatatgtagccagaccatccacatcagaaatcgaagaccaaagcatgatggggaagtttgtaaaagttgaaagacaggttcaggacatggggaagaagctggacttcctcgtggatatgcacatgcaacacatggaacggttgcaggtgcaggtcacggagtattacccaaccaagggcacctcctcgccagctgaagcagagaagaaggaggacaacaggtattccgatttgaaaaccatcatctgcaactattctgagacaggccccccggaaccaccctacagcttccaccaggtgaccattgacaaagtcagcccctatgggttttttgcacatgaccctgtgaacctgccccgagggggacccagttctggaaaggttcaggcaactcctccttcctcagcaacaacgtatgtggagaggcccacggtcctgcctatcttgactcttctcgactcccgagtgagctgccactcccaggctgacctgcagggcccctactcggaccgaatctccccccggcagagacgtagcatcacgcgagacagtgacacacctctgtccctgatgtcggtcaaccacgaggagctggagaggtctccaagtggcttcagcatctcccaggacagagatgattatgtgttcggccccaatggggggtcgagctggatgagggagaagcggtacctcgccgagggtgagacggacacagacacggaccccttcacgcccagcggctccatgcctctgtcgtccacaggggatgggatttctgattcaactgtacctttatttctgagctctgaaattctgcagaaacaggtgggccagagtatcacaagcatgctgggcttcctgtcacgtggtccttcaatgaagctgtgcatgggcctggcatgtgtcttgtccctttggaacacagtgtctggcatcaaaggagaagccaagaaagagaagggaatgacctttttacctacaacagatagcaagaagttcttctccttgctgagtgtcacttcctacagttccttcgccttccacaagttttctgtagctgtttacaacatttctaacctgaagacagtggaccccgccaaattccccacaaggtattgctactgtttaaacaatcggaccaatgacttatcagattttacagctctactggtagatatcattggcaattctaccagctacctcacagagatttttaagtcaacctccatcctctcagtgaatcaaagcaatgaatcagattgcatcttcatctgtgtgatgacaggaaagtcaggaaggaatctttctgacttctgggagatagaagaaaaatatcccattatcaattacacatttaccagcggcttgtctggtgttctggctttattgctcacacaaagcctgtttggtggtctcttcacacggacgcgcatgaaatttggtgccgtcactcggatcgggggacctcccttgggaaatcaatccccgtcctcctgttctttgctccatgagaaagatccacctacgacctcaggtcctcagacagaccagcccaagaaacatctcaccaatttcaaatccgcggcacgtcccactttcctggggcaggggcaagtacccctcaaccccttctccttcacccttagcggcaagtcctgctttcctaggcggcaagaaccccccaatcgcttatttccacaccccaacctcttatctctgtgccccaatcccttatttctgtgccccaaccccttctctacttttctggagggcaagaaccaccacccccaccccttctctgtgtctcaagtcttttctctaggcttgcctccttcactatgggagcattcacccatggcacacagactccgagtccaaccaaggcaacagcccccagatatccacaaacaggtgatctctctgcagagtggccattcactgctggtgaagagccagtcctggtcccaagaccccatcaagtttcaattgcctcatcatcataaaaacacggcatctgtgtgcattaatccatctgtatacgagaaagaagaagaaagatatggagacctttttatgaggaaaaaccaaaagacttcctag

SEQ ID NO: 129197 - DNA, 930 bp, Homo sapiens; identical to SEQ ID NO: 117359

SEQ ID NO: 129198 - DNA, 1093 bp, Homo sapiens
atgttgctcacacaaagcctgtttggtggtctcttcgcacggacgcacatgaaatttggtgccgtgactcggatcgggggacctcccttgggagatcaatcccccgtcctcctgctctttgctccctgtccccaggtctgcactgttggagcaactaagcggtggcaagtcaccaccagactcactggcatctgggccacacattgctgtgacttaagatcagagagaccaaggggagcaggcccagccgatgaaaggcaatcagatgttgccgtctcaatgttaaaagaatacccacctggcgcacaatacgcaaaccgcctctctccgcgcgttggccgattcattaatgcagctggcacgacaggtttcctgactgtaaagcggtcagctatcagagatgccgagaaagcagggcgactaccgcacccggatatggaaattcgaggacgggttgagcaacgtgttggttatacaattgaacaaattaatcatatgcgtgatgtgtttggatctggctctgaaggggctacgtgttttgctcgtggaaggtaacgacccccagggaacagcctcaatgtatcacggatgggtaccagatcttcatattcatgcagaagacactctcctgcctttctatcttggggaaaaggacgatgtcacttatgcaatatatttcacttgctggccggggcttgacattattccttcctgtctggctctgcaccgtattgaaactgagttaatgggcaaatttgatgaaggtaaactgcccaccgatccacacctgatgctccgactggccattgaaactgttgctcatgactatgatgtcatagttattgacagcgcgcctaacctgggtatcggcacgattaatgtcgtatgtgctgctgatgtgctgattgttcccacgcctgctgagttgtttgactacacctccgcactgcagtttttcgatatgcttcgtgatctgctcaagaacgttgatcttaaagggttcgagcctgatgaccccactggaaatcggactgttcaactcacctggcagccactcccagagcccctggaactctggctgaaggctctctga

SEQ ID NO: 129199 - DNA, 843 bp, Homo sapiens
atgaatccactccatgaaggctgtcagtctgacacacggaactacgtggggtcttggcaaggaaaacactcagacacatacagatacttgggagctttagatactccagctcctgtcttcccaacaaaagtatctgcaactcctgcaaagcagaaggttagacctccatacatacccctgaggaaagagtttgaatcccagtatttgggtgacttagtcatttcagcctttgagctttgcagaaccctagctgactggggtgaaagtggtacctcagcacaagcacagcggctctatgaaagatcatacgccaatcctcttatggcagctgagccagcccaagctgtaaagcttgggtggagaccttcacccaagccacacattggagacaagtcagtatcattttggctcctgtggatggagacaaaggagacacattttatccgtggacccaaaactccggcgccggtcacggactgggaaggcagctttcccttggcgtttaatcattgcagggacacctctctgattattcacccacgtttcaagggtgtcagaccacgcagggatgcctgccttggtccttcacccttagcagaaagtcccgcttttcaggggaaggggcaagtaccccaaccccttctctccttgtctctaccccttctctgcttttccagggaaaaggcaagagcttgctacaagtgccagaaatctgaccaccaggccaaggaatgcctgcagcccaggattactcctaagccatgtcgcatctgtgcgggacccactggaaattggactgttcaactcacatggcagccactcgcagagccactggaactctga

SEQ ID NO: 129200 - DNA, 813 bp, Homo sapiens
aaagcctataaactctccttacaattcccccattttacctgtccaaaaaccggacatgccttacaggttagttcaggctttgttgagtctcccacagttaccattgttcctggcctggacatcaatctggcctcccacactattccggataacactcctgaaccccatgactgtatctctctgatccacctgacattcactccatttccccatgtttccttctttcctgttcctcaccctgatcacacttggtttattgatggcagttccactaggcctaattgccactcaccagcaaagacgggctatgctatagtacaagccactagcctgcctctcagaacctctcatttcctttccatcgtggaaatctatcctcaaggaaataatttctcagtgttccatctgctgttctactattcctcagggattattcaggccccctcccttccttacacatcaagctcgaggatttgcccccacccaggactggcaaattagctttattcaacatgtcccaagtcaggaaactaaaatacctcttggtctgggtagacactttcactggatgggtagaggcctttcccacagggcctgaaaaggccactgtggtcatttcttcccttccgtcagacataattcctgggtttggccttcccacctctataatacagtctgataacggattggcctttattagtcaaatcgcccaagcagtttctcaggctcttggtattcagtggctcctggttttacctcaaaccaccacccttaagtctctcttaaagtggataaaagatcttcagtggcaag

SEQ ID NO: 129201 - DNA, 715 bp, Homo sapiens
gcaggctctggggtattactgcagtgagacaaaagagacacgttttatccgtggacccaaaactccggcaccagtcacggactgggaaggcagccttcccttggtgtttaatcattgcagggacgcctctctgattatacacccacgtttcaagggtgtcagaccacgcagggatgcctgccttggtccttcaccctttgcagcaagtcccgcttttctggggaaggggaaacacgctttaaaaggattaaagcctgttatcactcgcctgctacagcatggccttttaaagcctataaactctccttacaattcccccattttacctgtcgtaaaaccagacaagccttacaagttagttcagaatctgcgccttatcaaccaaattgttttgcctatccaccccgtggtgccgaacccatacactctcctatcctcaatacctccctccacaacccattattctgttctggatctcaaacatgctttctttactattcctttgcacccttcatcccagcctgtcttcgctttcacttggactgaccctgacacccatcaggctcagcaaattacctgggctgtactgcctcaagtcttcacagacagcccccattacttcagtcaagcccaaatttcttcctcatctgttacctatctcagcgtaattctcataaaaacacacgtgctctccctgctgatcatgttcagctga

SEQ ID NO: 129202 - DNA, 1452 bp, Homo sapiens; identical to SEQ ID NO: 116732

SEQ ID NO: 129203 - DNA, 2028 bp, Homo sapiens
atgaataatgatccttacattcctgcatctgcttttggggctcgccctgttaaaaccacagaagctcccccactgagcaccttgagacccctgcccctgcccaccaaagaacaaccccctttgactgtaattttccattaccttcccaaatcctataaaacggccccacccctatctccctttgctgactctcttttcggactcagcccgcctgcacccaatgaaataaacagccatgttgctcacacaaagcctgtttggtggtctcttcacacggacgcgtatgaaatttggtgccgtgactcggatcgggggacctcccttgggagatcaatcccctgtcctcctgttctttgctccgtgagaaagatccacctacgacctcaggtcctcagacccaccagcccaaggaacatctcaccaattttaaatcagacaaaggagacatgttttatccgtggacccaaaactccagtgccggtcacggactgggaaggcagccttcccttggtgtttaataactgcagggacacctctctgattatacacccacgtttcaagggtgtcagaccacgcagggatgcctgccttggtccttcacccttagcggcaagtcccgcttttctggggaaggggcaagctgctcctcgccaggccgagctaggtcccaattcttcctcagcctctgctcctccaccctataatctttttatcacctcccctcctcacacctggtccggcttacagtttcgttctgtgactagccctcccccacctgcccagcaatttactcttaaaaaggtggctggagccaaaggcatagtcaagcatgctttgaaaggattaaagcctgttatcactcgcctgctacagcatggccttttaaagcctacaaactctccttacaattcccccattttacctgtcctaaaaccagacaagccttacaagttagttcaggatctgcgccttatcaaccaaattgttttgcctatccaccccgtgctcggcataattgggctcacttcctccgtccgtcgggatgccgggcaggacctgaagcgtgaccgcgcggaatttcttcttggtgatgaagttcatcacccgcaccgtcggcggatagccgaagcgcgccgcctcctgctcgggcagcacttcgatccgctccatcgcctcatagggcaggttctggaactcggcgaagcccgatatgcgccgcccgttgagcagcatcaccggctcgcccccgctcgccgaactggtcagcgacttcacccgcttgagcagttcggccaggctgggcgcgcccagcgccgcaatcgcctcggcatcgagcaccgcgaccggctcgaccgccccgatgacggagccgggaatgcgcttgccggtgacggtgacttccgcagggggtgcctgttcgccgggatcggaattcgccctcggtactgtcggtatcgccagtcccaagacgaccgccgaccatcccacgccgcccctcggccgcgcgcgctccccataccgcatcgtccagccactcccatcgccgacgtgatggtgatgtttagtgtggcaatcatgtcacaattaaggctcgtgcttcgccatatcgacggaatatcgcggtggccgcctgccgtggttttcataactgacgtgaagatatggcttgtttacccgtccgacgattgtcgaataaggtcaaacgatcgcgacgacatgcagggagaagcgcccgcgatgagcatgaatgccgccgccagagtgggcgatccgatcggccacagctttagccagggcctgttcggcgaggcgctggatggtttgttctttgcccgtcgcagcgaggtggacatgcgcgcgggcaatctcggccggctgatcgcgcgcgggctgagcggcggacgctggacgccggccgatggccagctgacgctcggatcgcgcgacgtcttcatcaatggcccccccgccaccatgacgatccggtcgaccggccaatgccgccagcatagcggtctgcgcaccgtc

SEQ ID NO: 129204 - DNA, 1112 bp, Homo sapiens
atgtggaaaggccccaaaggattagacatgtatggaaagagctcagtgagccctaagacatcagatatactggggagagacactctcctgctggccttgaaggtgcaaacagtggtgttgcaaactgcctgtggagagggccatgtggcaggaaactgtgggaggcctctagaaactgaaggcagtctccagctgacagctactaagaagctaagggactcagtcctgcaaccaaaaagtcctgaattctgccaacaatttacaagagcttggaataggacccaagttccagatgagactgaagccccagctggcacctatgcagcccaatcgggggacctcccttgggagatcaatcccctgtcctcctgttctttgctccatgagaaagatccacctacggcctcaggtcctcagaccgaccagcccaaggaacatctcaccaattttaaatcgggtttcagaggtgtcagaccacgcagggacgcctgccttggtccttcacccttagcggcaagtcccgcttttctggggaaggggcaagtaccccaaccccttctctctgtgtctctaccccttctccgcctttctggggggcaagaaacacccaaccccttctccttcaccctgagtggcaagtccgcttttctagaggagcaagtaccccaacctcgtatctctgtgccccagtcccttatttccacgccccgacctcttatctctgtggcccaatcccttatttctgcaccccaacctcttatatctctgtgccccaatcccttatttccatgccccgacctcttatctctgcaccccaaccccttatttccacgacccaacccctttcccgcttttctggaaggagcttgctacaagtgccagaaatctggccaccaggccaaggaatgcctgcagcccgggattcctcctaagctgcgtcccatctgtgcgggaccccactggaaatcggactgtccaactcacctggcagccactcccagagcccctggaactctggcccaaggctctctgactgactccttcccagatcttcttggcttagcggctgaagactgatgctgcccgatcgcctcggaatccccatagaccat

SEQ ID NO: 129205 - DNA, 588 bp, Homo sapiens
ttttttttttttgagaaataaagctttttaatcacctgggtgcaggttggctgagtccgaaaaaggagtcagcaaagggagataggagtggggccgttttttaggatttgggtaggtggtggaaaattacagttaaagggggttgttctcttgcgggcaggggcgggggtcacaaggtgctcagtggggagctccggagactcactgtcccggagaaggaatgtcacaaggtaatgtcatcagttaaggcaggaactagccattttcacttcttttgtggttcttcagttgcctcaggccattctggatgtatacatgcatgcttgggctcagaggccggcctgacattcctgtcctccactgtaagagttacccaaggcgtctgtgatggtccaggaggcttcccaggcaatcaatcgggcagcgtcagtcttcagccgctaagctgagaagatcggatttaaaattggtgagatgttccttgggctggtgggtctgaggacctgaggtcataggtggatctttttcatggagcaaagaacaggaggacaggggattgatctcccaagggaggtccgccaatccgag

SEQ ID NO: 129206 - DNA, 2711 bp, Homo sapiens
atgggagactttaacaccccactgtcaacattagacagatcaacgagacagaaagtcaacaaggatacccaggaattgaactcagctctgcaccaaccagacctaatagacatctacggaactctccaccccaaatcaacagaatatacatttttttcagcaccacaccacacctattccaaaattgaccacatacttggaagtaaagctctcctcagcaaatgtaaaagaacagaaattataacaagctatctctcagaccacagtgcaatcaaactagaactcaggattcagaatctcactcaaaaccactcaactacatggaaactgaacaacctgctcctgaatgactactggttacataacgaaatgaaggcagaaataaagatgttctttgaaaccaacgagaacaaagacacaacataccagaatctctgggatgccttcaaagcagtgtgtagagggaaatttatagcactaaatgcccacaagagaaagcaggaaagatccaaaactaacaccctaacatcgatcaacaaaattgatagaccactagcaaggctaataaagaaaaaaagagagaagactcaaatagatgcaataaaaaatgataaaggggatatcaccaccgatcccacagaaatgcaaactaccatcagagaatactacaaacacctctatgcaaataaactagaaaatctagaagaaatggataaattcctcaacacatacactctcccaagactaaaccaggaagaagttgaatctctgaatagaccaataacaggagctgaaattgtggcaataatcaatagcttaccaaccaaaaagagtccaggaccagatggattcacagccgaattctaccagagttgcttcaaagagaataaaatacctaggaatccaacttacaagggatgtgaaggacctcttcaaggagaactacaaaccactgctcaaggaaataaaagaggatacaaacaaatggaagaacattccatgctcatgggtaggaagaatcaatatcgtgaaaatgaccatactgcccaaggtaatttacagattcaatgccatccccataaagctaccaatgactttcttcacagaagtggaaaaaactactttaaagttcatatggaaccaaaaaagagcccgcatcgccaagtcaatcctaagccaaaagaacaaagctggaggcatcatgctatctgacttcaaactatactacaaggctacagtaaccaaaacagcatggtactggtaccaaaacagagatatagatcaatggaaaagaacagagccctcagaaataatgccgcatatctacaactatctaatctttgacaaacctgagaaaaacaagcaatggggaaaggattccttatttaataaatggtgctgggaaaactggctagccatatgtagaaagctgaaactggatcccttccttacaccttatacaaaaatcaattcaagatggattaaagacttaaacattagacctaaaaccataaaaaccctagaagaaaacctaggcattaccattcaggacataggcacgggcaaggacttcatgtctaaaacaccaaaagcaatggcaacaaaagccaaaattgacaaatgggatctaattaaactaaagaacttctgcacagcaaaagaaactaccatcagagtgaacaggcaacctacaaattgggagaaaatttttgcaacctacccatctgaccaagggctaataaccagaatctacaatgaactcaaacaaatttacaagaaaaaaacaaacaaccccatcaaaaagtgggcaaaggacatgaacagacacttctcaaaagaagacatttatgcagccaaaaaacacatgaaaaaatgctcagcatcactggccatcagagaaatgcaaatcaaaaccacaatgagataccatctcacaccagttagaatggcaatcattaaaaagtcaggaaataacaggtcctcaatggattggatgatgtccagctgtttaggtgaaataaacagccatgttgctcacacaaagcctgtttggtggtctcttcatacagacgtgcatgaagtttggtgtcgtgactcggattgggggacctcccttgggagatcaatcccccgtcctcctgctctttgctccgtgagaaagatccgcctacgacctcaggtcctcagacctaccagcccaagaaacatctcaccaatttcaaatccgcatgctttgaaaggattaaagcctgttatcactcgcctgctaaagcatggccttttaaagcctataaactctccttacaattcccccattttacctgtcttaaaaccagacacgccatacaagctagttcagcgatctatgccttatcaaccaaattgttttgcctattcaccccatggtgccaaacccatatactctcctatgctcaatacctccctacacaatgcattattctgttctgcagctaatacgcgctttctttactattcctttgcacccttaatcccagcctatattgagtctcacttggactgaccctgacacccatcaggctcagcaaattacctgggctgcactgccgcaaggcttcacagacaacccccattacttcagtcaagcccaaatttcatcctcatctgttacctatctcaacataattctcgtaaaaacacacgtgctgtccctgctgatcatgtccagctga

SEQ ID NO: 129207 - DNA, 1352 bp, Homo sapiens
  misc_feature (1)...(1352): n = a,t,c or g
atgggaaaaggccgtcgatcgctctggcttcttcctgctgatgggggaagtagcgggaatgggaacgaactccaagggacatctccccatgactatttttccattgcaattaagtccacgcacattgggttggaataccccaccagtagacagagtaacagagtcagcccccagtccaagagaattaggcagccacttgggctgccttctggatccatcactgaaagggggccaccaaacaacaggcagaaagggtacactcgccagcagttttgccacgagagtacaccgaacaaaggagacagggtcatttataacctgacatgtttactctactgctgtgtccggtttccattggctggaacaggaccacacattctgtatttgtcccgattggctagcaacttagaacttttcaaaagagacaaaggcagaggagaacaaaggaaggaggaagtaacttgtttccacaagttacttgctgagaaagagaacaacccccctttttcctttatctacccaaatcctataaaacggccccacccctatctcccttcgctgactctcttttcggactcagcccacctgcacccaggtgaaataaacagctttatggctcacacaaagcctgtttggtggtctcttcacacggacgcgcatgaaatttggtgccatgactcggatcgggggacctcccttgggagatcaatcccctgtcctcctgctctttgctctgtgagaaacatccgcctacgacctcaggtcctcagaccgaccagcccaagaaacatctcaccaatttcaaatccgagacaaaagagacatgttttatccatgaacccaaaactctggcgccggtcacggactagggaaggcagccttcccttggtgtttagtcattgcagggacggcctctctgatcattcagccacatttcaagggtgtcagaccatgcagggatgcctgccttggtccttcacccttagcggcaagtcccgcttttctggggaaggggcaagtaccccaaccccttctctccatgtctcttaccccttctctgcttttccggggacaggggcaagtaccccaaccccttctctccgtgtctctactccttctctgcttttctggggacagggcaagtaccccaaccccttctctccttgtctctaccccttctctgcttttntggggcaggggcaagtacccctcaaccccttctccttcacccttagcggtaagtcccgcttttntagggggcaggggcaagtaccccccaaccccttctccttcacccttagtggcaagtcctgctttcctggggcaggggcaagtaccccttaaccccttct

SEQ ID NO: 129208 - DNA, 1751 bp, Homo sapiens
atgcatgaaatttggtgccatgagtcggatcgggggacctcccttgggagggcaatcccctgtcctcctgttctttgctccatgagaaagatccacctacgacctcaggtcctcagaccgaccagcccaaggaacatctcaccaattttaaatcgggctgctcctcgccaggcccagctaggtcccaattcttcctcagcctccgctcctccaccctataatccttttatcacctcccctcctcacacctggtctgccttacagtttcgtttcgtgactagccctcccccacctgcccagcaattgactcttaaaaaggtggctggagctaaaggcacagtcaaggttaatactcctttctctttatcccaaatcagatagtgtttaggctctttttcatcaaatataaaaatctagcccagttcatggctcgtttggcagcaaccctaagacactttacagccctagcccctaaaaggtcaaaaggccatcttattctcaaaatgcattttattttattacccaatctgcttcccgacattaaataaaactccaaaaattaaattccggccctcaaaccccacaacaggacttaattaacctcgccttcaaggtggtccaatattaaaagtagaagcagccacgtagcaatgtatttctgagttgcaattcctccttgcctccactgtgagacaaaccccagccacatctccagcacacaagaacttccaaacgcctgaactgcagcggccaggcgttcctccagaacctcctcccacaggagcttgctacacttgccggaaatctggccactgggcaaaggaatgcccgcagcctgggattcctcctaaggcgcgtccccatctgtgtgggaccccactgaaaaatcggactgttcaacttcacctgggcagccactcccagagcccctggaactctggcccaaggctctctgactgactccttcccagatcttctcagcttagcagcttgaagactgacactgcccgatcgcctcggaagccccggagaccatcacggacgccgagctgccagtaactctcacagtggaagcccacctgcacccaggtgaaataaacagccatgttgctcacacaaagcctgtttggtggtctcttcacagggacgcgcatgaaatttggtgctgtgactcggatcgggggacctcccttaggagaccaatcccctgtcctcctgctctttgctccgtgacaaagatccacctacgacctcaagtcctcagacccaccagcccaagaaacatctcaccaatttcaaatccggctgctcctcaccaggccgagctaggtcccaatccttcctcagcctctgctcctccaccctataatctttttatcacctcccctcctcacacctggtctggcttaccgtttcgttccgtgactagccctccccctcctgcccagcaatttactcttaaaaaggtggctggagctaaaggcacagtcaagaccatcacggacatcgagcttcaggtaactctcacagtggaagcccgcctgcgcccaggtgaaataaacagccatgttgctcacacaaagcctgtttggtggtctcttcacacggacgcgcatgaaaatactgttactttccagaacaatcttaaggacaacacaggagcccttacatttccactgggatcctgcttatattgtaacaaggaggtgctggatatagctacgctcccatctccctacggcaaccactga

SEQ ID NO: 129209 - DNA, 1208 bp, Homo sapiens
atgccacatcagaatgggaataaatgtggctaccagaggagcctgcaaagtttctggattctaatggaaaagaagaaactgccttttgcctggaatttcctgatgtggccccaaatagctatccatctcatgcccttagacatgcttttccatacctgtgaaataaacagccatgttgctcacacaaagcctgtttggtggtctcttcacaccgacgcatatgaaatttggtgctgtgactcagatcgggggacctcccttgggagatcaatcccctgtcctcctgttctttgctccgtgagaaagatccacctacgacctcaggtcctcagacccaccagcccaaggaacatctcaccaattttaaatcatgtaagcaagcctctttttactctcttctccaacctccctcactatccctcaacctctttctcctttcaatcttggcgctacacttcaatctctcccttctcttaatttcaattcctttcattttctggtagagacaaaagagacacgttttatccgtggacccaaaactccggcgccggtcacggactgggaaggcagccttcccttggtgtttaatcattgcagagatgcctctctgattatacacccacatttcaagggtgtcagaccacgcagggacgcctgccttggtccttcacccttagcggcaagtcccgcttttctggggaaggggcaacacgctttaaaaagattaaagcctattatcactcgcctgctacagcatgggccttttaaaccctataaactctcctttcccttcctcccattttacctgtcctaaaaccagacaagccgttacaagttaagttcaggatctgcgccttatcaaccacattgttttgttgcctatccaccccggtggtgcccaaccccatacactcttttgtcctcaataccgtcccgtcgtactacccattattctgttcgtatatgtcaaacatgctttctttactattcccctgcaacccttaatcccaagcctctctttgccttcacttagactgaccctgacacccattaggctcaacaaattacctgggctgtgctgctgcaaggctttcagggacagccctcattacttgaatcaagcccaaatttcttcttcatctgttacctatctcggcataattctcataaaagcacacgtgctctccctgccaatcgtgtccgactgg

SEQ ID NO: 129210 - DNA, 1623 bp, Homo sapiens
cgggggacctcccttgggagatcaatcccccgtcctcctgctctttgctccgtgagaaagatccacctacgacctcaggtcctgagatcgaccagcccaagaaacatctcaccaatttcaaatccgccactcccagaggccctggaactctggcccaaggctctctgactgactccttcccagatcttctcggcttagtggctgaagactgacactgcccgatcgcctcggttgaagccccctagaccatcacggatgccgagcttcgggtaactctcacagtggaaggttcccacggcgcccctaatcccgcttgaagcagccctgagaaacatcgcccattctctctcccctaccacccctcaaaaattttcaccaccccaacacttcaacactattttgttttatttttcttattaatataagaaggcaggaaatgtcaggcctctgagcccaagccaagccatcgcatcccctgtgacttgcacgtatacgcccagatggcctgaagtaactgaagaatcacaaaagaagtgaatatgccctgccccgccttaactgatgacattccaccacaaaagaagtgtaaatggccggtccttgctttaagtgatgaggttaccttgtgaaagtccttttcctgggctcatcctggctcaaaaagcacccccactgaggcaccttgcgaccccccactcctgccccgccagagaacaaaccccctttgactgtaattttcctttacctaccccaaatcctaataaaatgccccacccttatcttcccttcgctgactctctttttcggactcagcccaccatgcaccccaggtgaaataaacagctttactgctctcacacaaagcctgtttggtggtctcttcacacggacgcgtatgaaatttggtgccgcgcatgaaatttggtgccgtgactcggatcgggggagacctcccttgggagaatcaatcccctgtactcctgtgttctttgctccgtgagaaagatccacctacgacctcaggtcctcagaccgaccagcccaaggaacatctcaccaattttaaatccggagcttgctacacttgctggaaatctggccactgggccaaggaatgcccgcaggccgggattcctcctaagctgtgtcccatctgtgtgggaccccacttgaaaattcggacttgttcaactcaccttgggcaagccactcccagagcccctggaactctggcccaaggctctctgactgactccttcccagatcttctcggtttagcagctgaagactgacactgcccgatcgcctcggaagccccctacaccattcacggacgccgagcttcgcgtaactctcacagtggagggtaagtccgtccccttcttaatcaatacagaggctactcactccacattaccctcttttcaagggcctctttcccttgcctccataactgttgtgggtattgatggccaggcttctaaacctcttaaaactccccaactctggtgccaacttagacaatactcttttaagcactcctttttagttatccccacctgcccagttcccttattaggctgagacactttaactaaattatctgcttccctgactattcct

SEQ ID NO: 129211 - DNA, 1612 bp, Homo sapiens
atgggccttggcaagagtctctgtatcctgaaagatgcagtcctggctctgcgggaaattaaaggcataagtttccagtatgcaccaaacactaacaggctctggggatacagacaagcaaagcagacccagcatctatctggaatctctactcttgactgccctcagaggtacaatggagatgacactggttctgtttgggctctggagccctcttgtatgctgtgggcctgccctcttgtgtttccttcagaaatctattactttatttcagaagatgtatggaaacacctggatgcccaggaaaagtttgctgcagtcatgggaccctcacggagaacctctgttagggcagtgtggaagggaaatgtggggttggagcccccacacagagtccctactggggcactgcccagggtagctgtgaaaagagggccactgtcctcaagaccccagaatggtagatccacctacggcttgcactgtctgaaggacacaccaactcaggaagactggctggtgagtgtgcttcctgaaggatccagggttggtgtggaccccttgatcattcctacagctctgggccatggcaggaccacctttctgaaggttctggactttcaaggccctgctccctgccctgctgcaatgggcgttcggctcatggctgggccacaatgtgtctcctcagattattggaagaaaatggccaaagttctgagaagtgccggccatcacctcattcctgtcaaggagaacctcgttgacaaaatctggacagaccgtcctgagcgcccttgcaagcctctcctcacactgggcctggattacacaggcatctcctgggaaggacaaggttgcagacccttcggttgaaaatgggctgagaggaacgtcatgtgggtttgtgggtcactgccttggatgagattgcgtggctatttaatcctccgaggatcagatgtggagcacaatccagtatttttctcctacgcaatcattagggattaggagacgttcatgctctttcattgatggtgacccgcatagacgcccccagtgttgaaggagcacctgcttcttgacttgggtctggaagccgaatacaggatccaggtgcatccctacaagtccatcctgagcgagctcaaggccctgtgtgctgacctctccccaagggagaaggtgtgggtcagtgacaaggccagctatgctgttgaagcgagaccatccccaaggaccaccgctgctgtatgccttacacccccatctgcatcgccaaagcttgtgaagaattcagcttgagtcagaaggcatgagaatttctgatgagaaatctgcaggtaatctcactgaagatcccttttacgtgatagaccgaaccctcatcacaactggtgttgtttgcaacagcacagaaaagtcgagtcttatgtctgtggcttctgcagacactgctgagaacctgtggcatctcttctttcacattctgccatcagagagggctctaaccaggaagctcagagtcttaaagcttggcccagtaaattacagtgtccagaaccctacagcccagttacaccagcagggcccacatctgggggtggcctag

SEQ ID NO: 129212 - DNA, 759 bp, Homo sapiens
atgaaggtttatggctcgcaccctctgaagcagcggcctaagctgtatctggagccctttgagccaagactggggccagatctgccaggatgtgaggagcaacctcctagggtggcacagggcagttgtgacttgggactggcccctgaaaccaatcaatcgtcctggacctttgtgatcatactggttaatccagagcaaaccctaactctcttcaattctatgaaggctgagagaggtaaggaagctgcagatgaaaagttggaagttcgcagaggctatccagaagatctagctaagataattgatgaggcctccaccagtgatacccaggcaaacagggtctggagcaaagctccagcaaaatccagcagacctgcagaacagcagccttattttagaaggaaaactagcaaacagaaaggaatagtagcaacatcaacaataaaggacatccactcacagaccccatccaaaggtcaccaacatcaaagaccaaaggtagataaatccacgaagatggggcgaaaccagtgcaataaggctgaaaactccaaaaaccagaacgcctcttctccttcgaaggatcacaactcctcgccagcaaaggaacaagactggatggagaatgagtttgatgaattgacagaagtaggcttcagaaggtgggtaataacaaactcttctgagctagaggagcatgttctaacccaatgcaaggaagctaagaaccttgaaaaaaggttagacgattgctaa

SEQ ID NO: 129213 - DNA, 1680 bp, Homo sapiens
atggggtcttcactgagtccggtgctgtatgtagctctgcctgtacggcagcctctgctgcgctctgtggtggaggaaaggagcaccaaaatgcgagttgggagcccagggttccaggctaaatttcgattctactcccaaggcctgagctggtcagcgagaggggaagaagggttggtgcccgcgttctggctccagccctatcccagacctctaaacttcaaagcagagatgacagaacagaaagaaaatcagacttatgtcgatgggggttttagaccttatatccacagaagaaagaatttgactgaggggcataaggcagaaaaagagatggagccttgggatggcttctctgatgagtcctgccgcacccattgtcaagttcatgactacgccaaaggtcatggtgaggtccagagggagcgggtggatgagcagaaagaacacttggggggtcgtaggcaggactgccagcagcagcatctgaaccgaaggctgcattgcctgtctcaggggaggcgccgagtgaagcctcgggcagtgttaggggtcatggccgtgcccatggactggctggatctgagagacatggccatgaccatgctgccccagagcaccagctccttcagagtgtggacgctgaccacgtggtcccagttgcctggtaccagttctgggatgatgaaggcagaggaatattgtctcctggggatcacaagccagatagaagaggtgcggctctatattgattggtttgcgtatctaaggcacatcctggctgatccctttgctctctaccattactcatccgtcctcacaaaaaaccctttctcttctgaggttatcctcattcggccaataaaaccaataggctttaaagagaaggtgtcaatttgtctgagctcaaaggatgggaagttcttccagctgaaaaagatgaggggagaggctaaagaaggaatcaggaacagtcagaatctcagtgggaagctatgcagcttccaagtgcagcttgatgagtcagctgtgaagacagggtatgtccagatctctgtggagaggaacagcaacaggtctgaaaagaagagactgtatgtctgtccatcttcagatacctccaccaccaatgaccaactttccttcctgggaaaatggggagccagagagagaacagaaagtgaaatctcttcctctggcagccagccaagccacatcttggagaggctacctggctgtatctggtgggaacaggaaagcaggctacctgtggccctgaagaaagccttcatagggaaagatgtaggaaccctacctggtgctgattcttctgagcaattttcagaggcctcctttgcctgctttcacccaagggaaatttctggccctcagaccacgcgtacttggctctctgacagtgtacctgcacccaccaccctcatggatcacaactcctcgccagcaagggaacaaaactggatggagaatgagtttgatgaattgacagaagtaggcttcagaaggtgggtaataacaaactcctccaagctaaagaagcatgttgtaacccaatgcaaggaagctaagaactttgataaaaggttacaggaactgctaactagaataactagtttagagaagaacataaatgacctgatggagctgaaaaacacagcatga

SEQ ID NO: 129214 - DNA, 2621 bp, Homo sapiens
cctttgaccccgcgctgcaggaattcggcacgaggaactttggccgctcacttctggcgggctactgccccacatacatgcctgatcttgtgcttcatgggaccggcagtgatgagaagctgaagcagtgcctggtggccgaccttgtccacacagtccatcatccagtcctggatgagccaatagctgaagctgtctgtattatcgcagacacggataaatggagtgtgcaggtagctacaagtcagaggaaagtgacggacaacatgaaactaggccaggatgtcctggtctctagtcaggtgtccagtttgcttcagtccattttacagctctataagcttcacctccctgctgattttccaccccgtatgggaagtgaggagcgtctccgcccggcagctgccccatctgggagagaggtgaggggcagcccccgtaccgccagccgacccgtccgggagggagctcagttcctaacgggttacacgtctacagcccaggggatggggacacctgtcttagttcatctggactgcagtaacaaaataccatacactgagtggcttataagtaacagaaatttggaggatgggaagttcaggatcaaggcaccagcagatttagtgtctagattttgccgatttcgcaaccaccatcaaacagcattttcgcctgctggggcaaaccagcgtgtaccgcttgctgcaactctctcagggccaggcggtgaagggcaatcagctgttgcccgtctcactggtgaaaagaaaaaccaccctggcgcccaatacgcaaaccgcctctccccgcgcgttggccgattcattaatgcagctggcacgacaggtttcccgactggaaagcgggcagtgagcgcaacgcaattaatggattttgccgatttcggaaccaccatcaaacaggattttcgcctgctggggcaataccagcgtggaccgcttgctgcaactctctcagggccaggcggtgaagggcaatcagctgttgcccgtctcactggtgaaaagaaaaaccaccctggcgcccaatacgcaaaccgcctctccccgcgcgttggccgattcattaatgcagctggcacgacaggtttcccgactggaaagcgggcacgtttgagctctgctaagggtcagactgcctcctcaagtggatccctgacccctgtgtatcctgactgggagacacctcccagtaggggccgacagaacctcatacaggagagctctggctggaatctggtgggtgcccctctgggacgaagcttccagaggaaggaacaggcagcaatctttgctgttctacagcctccgctggtgatacccaggcaaacagggtctgtagtggacctccaacaaaccacagcagacctgcagcagacaggcctgttagaaggaaaattaacaagcagaaaacagccacatcaacatcaacaaaaaggacgtccactcagagaccccatccgaaggtcaccaacgatcacagctcctcaccagcaagggaacaaaactggatggagaattgagtttgatgaattgacagaagtaggcttcagaaggtgggtaataacaaactcctctgagctaaagaagcatgttctaacccaatgcaaggaagctaagaaccttgaaaaaagacacagcctgggcacaaaggaacccgctgccttgaagggaaggacccagtactggcaggattcatcacctgctgacttaaggccctggctttgtgctacactcttaaagcagtataagccaactgtgttctcccattccacagtggctgttcaccctagagcaggatttcttaacctcagcactgttgaccagcatccagtcctggatgagccaatagctgaagctgtctgtattatcgcagacacgaataaatggagtgtgcaggtagctacaagtcagaggaaagtgccgcacaacctgaaactaggccaggatgtcctggtctctagtcaggtgtccagtttgcttcagtccattttacagctctataagcttcacctccctgctgattttgttggggacattctcctggataataacctgaagtgtgttttccaacttggttccattctccctgtcactttcaggagccatgacccttatgatggggagggcacggatgaactcagaaccgcagcttgcagcccagacaccgagcaactggcccggcagtcaggcacatacccagtaagcctggggcaggccacggtgttagaagactctaaagcggcactgccaggtcttggacccacactaatggctgtgactgtggtgacaacagaagctgcagtagacatggttgtgggtgataggggagaggagagaggagggactctggtagctccaggaaccaggggtcttaccgaagagatatggtttcccgtccccagcccaagccgctggtggagttctcacccagttgttgcatttataacgttggccaaatatggaccaacttcttcgccccccgtttttcaccatgggccaaatattatacgccacggcgcacaaggtgctgcatccgctggcgattcaggctcatcatcccgttgtgatcggcttccatgtcgccagaatgcttaa

SEQ ID NO: 129215 - DNA, 1539 bp, Homo sapiens
atgattctgtcccctgctgccgtcttcccactcacgcaactcactctctggctttgttcttctcccttctccagtgcagcagtctacacccttacaccctctttctctgttcctatggtgcgcatcagttgttttgcttcttcagaaaaccgggaaattaatttcctgggatgtgctaagattcgggatggaggaccagcccattcggatccagcccttaacccagagcggtgtgatgatcctaaccgggttcgtaaatctgagggaactattcagccaactgaagcctatacaagacttgagctattggtagctccatggcacacatattctcttcatattcacattcacttctacattcaaccaacagttactgtggagcttccaagagcactgaccacagttcctggtgctttactgatgacatctcttcatatgactggggccactcggcatgattcaaaagggcatccagtcctggatgagccaatagctgaagctgtctgtattatcgcagacacggataaatggagtgtgcaggtagctacaagtcagaggaaagtgacggacaacatgaaactaggccaggatgtcctggtctctagtcaggtgtccagtttgcttcagtccattttacagctctataagcttcacctccctgctgattttcctccgctggtgatacccaggcaaacagggtctgtagtgtacctccaacaaaccacagcagacctgcagcagacaggcctgttagaaggaaagttaacaagcagaaaacagccacatcaacatcaacaaaaaggacgtccactcagagaccccatccgaaggtcaccaacgatcacagctcctcaccagcaagggaacaaaactggatggagaattgagtttgatgaattgacagaagtaggcttcagaaggtgggtaataacaaactcctctgagctaaagaagcatgttctaacccaatgcaaggaagctaagaaccttgaaaaaagggttagggtgaattgcctaacctagaataacctagccttagagaagaaccataaatgaccctgatggagctgaaaaacacagcacgagaaccttcatgaagcatacacaagtatcaatagctggatcaatcaagcagaagaaaggctatcagagattgaagatcaacttaatgaaataaagcgtgaagacaagattacagaaaaaatgaagaattccaccacagtgcgggtcgctgcaagcatgcagagcaaactgctgcagggggtagctgaagagggacctctccggctcacccggagtgcttctttctctgcagaaatttccatgtgccatcaatggctttttagtacttttggaaatggaaagagcagaaatcggtaccactgtgagaaagcacacattgaaggaaaccagcttgttgaggaaacaggtcgtgcttttaagtcacggcacagatatggcaccggtcctcttcacaagtttgaaatacatgaatacacagagttacatcacgttctgatgctgcaaggaaaatgttga

SEQ ID NO: 129216 - DNA, 490 bp, Homo sapiens
  misc_feature (1)...(490): n = a,t,c or g
ggcgcacgggagacctcaggcccagactccactccccagctgtgaaaggactgctggccagacccccaagctagcccgccangcctccatagagctgcccagcatgactgcgtccagtaccaagagttggtgggagacgggtgaggtacaggctcagtctgcggccaagactccgtcctgcaagctgcaaaccacccaaggtgaagtcatcttagcctcttggagtcagcctgactggggtgaacccattgatatgtattgcataaatgaacatatgacagtagtgatgaaggatctccagctatccgtgtactctctatggttcccagactctttgggcagttgcatggggtactgggcttgagtttttggaaaacagggaatgtgagcagagtgttgcagatcttcttgttcagggagcacctaaggaantgggcatgattttacaacntttttcctttttggcantgacctntgttcaaggtgggca

SEQ ID NO: 129217 - DNA, 467 bp, Homo sapiens
gagattctagaaggccaggcagtgatgtgaaagatggtgcattccagggtcataacggctgcactaggagccagcccagggctctcctggagcataggacacctgttcagtgcagaggactcagtaagtctttctggagaagtgattgagctggctcttaattgttgatgaggtcttggagcctcccttctgctcccagaggcttttcttgctcatgtctccagccacaatatccttgcaggacggagtcttggccgcagactgagcctgtacctcacccgtctcccaccaactcttggtactggacgcagccatgctgggcagctctatggaggcctggcgggctagcttgggggtctggccagcagtcctttcacagctggggagtggagtctgggcctgaggtctcccgtgcgcctctcggcgccgaattcctccacatggagtatgtatcgatggggggcggc

SEQ ID NO: 129218 - DNA, 1122 bp, Homo sapiens
atgctcattggagcatttcgggttttggaatacaatgcaagtattccaaaatccaaaacacttctggtcccaagcatttcagagaaggggcccagattaccttcctacagggagaaagaagggccaagaaaatttgaagaaggatcttgtgaggagatcaaaatgttggagtatgctcttaaacaggaaaggagcagatggatgaatgaagaacagggcattgtcctcatgcatagctggagtgttgtaagtgccgtgtacatgtatggaaggtctgtgacaccatgtgcacccaagtcggacatgagggaacttggctgtttcagccttgtggagtctctgggtgaagatatcagctgggaaagggttaatgagctatcaactcaagtcatcatacatctggatgggctgtcattaacttcttacaaaaatttgatttcccgtgagagattttcatcaaacatttatatacccagacatggccaggggagtcagcgtggcacagaatcatcagaagcatggtatatagatagtcaagactctggagaacctcttccgaatctgcctggttggctagagcagtgttgtgacttaggctaccatgcaagtctgaaccgggctctacgcaccttcctctctgctgagttaaacctggaacagtcgaagcatgagggtctggatgccatcgagaatgcagtagaaaacctggatgccaccagtgacaagcagcgcctcatggagatgtacaacaacgtcttctgcccccctatgaagtttgagtttcagccccacatgggggatatgagccacgttcattccatagagggacccaccacctataaaaccagaaaagagacaaagccagaagtgcagggtggatttcttaacacaagctcactacgacctctagtcctcatcacgctgacactaagcttaaacccagacccttctacagttttgtctacaaagcacaatttgcccaaagcctttacaaacaccaacagcctttctttcagatatggcagcagggtcacatcttacacggccctgaccacattttgtctcctctgccatccccatctctctgactcagtcctcgcttgcagccatgaaaaaggatga

SEQ ID NO: 129219 - DNA, 456 bp, Homo sapiens
cagtacccagtgcaactgccaaagagtctgggaagcatagagagtacacggatagctggagatccttcatcactactgtcatatgttcatttatgcaatacatatcaatgggttcaccccagtcaggctgactccaagaggctaagatgacttcaccttgggtggtttgcagcttaattgttcatgaggtcttggagcccccctctctcgtcccagaggcttttcttgctcatgtctccagccacaatatccttgcaggacggagtcttggccgcagactgagcctgtacctcacccgtctcccaccaactcttggtactggacgcagtcatgctgggcagctctatggaggcctggcgggctagcttgggggtctggccagcagtcctttcacagctggggagtggagtctgggcctgaggtctcccgtgcgcctctcggcgcctgcgcacgaaa

SEQ ID NO: 129220 - DNA, 1582 bp, Homo sapiens
caggcaaaaaaggaggggcagtgtcaggcagttggttgataacagtggtggcattatttgaaagggctagtttctgtttagcctttagagaagaaagcctaacagcagttagcaaagctgcaaagcaggtgtctactattaatgtgagggcattgactggaaaagaatgggaccctacaactttgaatggggatgtgtgggaggaccctgatgaagctggggacactgagcttgtaaactctggtgaagcttttttgccagaacaaacagcttcaccatccccagtagtggcaatatctccttcttgacccatgctgccatcagccattccacctttgtctgaggagataaaccctgcactacagtgggtccagtgggtccctggactcatcttgtggtcattttcccagtgccaggatgcataactggcatagacatacttagcagctggcaggacccccaccattggctccctgaatggtagggtgagggctacaaggcagacctggctgcagccactgtcgagtgcccaatttgccagcagcagagactgacactgagccctcagtatagccacattcctcagggtgatcagccaactacctggtagcaggttgattgtattggacctcttctgaaagggcagaggtttgtcctcactggaatagacacttactctggatatgtgtttgcctatcctgtatgcaatgcttctgccaagactatcatcagtggactcacagaatgccttatccactgtcatggtattccacacagcattgcctctgaccaaggcactcactttatggctaaagaagtgtggcagtgggctcatgttcatggaattcactagtcttaccatgttgctgattatcctgaagcagctgggttgatagaggggtggaatggccttttgaagtcacaattacaatgccaactaggtgacaatactttgcagggctggggcaaagttctccagaagcccatgtatgctctgaatcagcatctaatatatggtactgtttctcccatagccacgattcatgggtctaggaatcaagactggaatggaagctccctgagaggttggacttttactatcttgttcacagcacctagaagagaacctggcacctacattgcctctgaccaacgcactcactttatggctaaagaagtatggcagtgggctcatgctcatggaattcactggtcttaccatgttgctgattatcctgaagcagctgggttgatagaggggtggaatggccttttgaagtcacaattacaatgccaactaggtgacaatactttgcagggctggggcaaagttctccagaagcccatgtatgctctgaatcagcatctaatatatggtactgtttctcccatagccacgattcatgggtctaggaatcaaggtatggaagtggaggtggcaccactcaccatcacccctggtgacccacaagcaaaattcttgcttcctgttcccatgacattatgttctgctggcctggaggtcttagttccagagggaggaacgctgccaccaggacacacaacaatcccattaaactag

SEQ ID NO: 129221 - DNA, 2790 bp, Homo sapiens
gcggccgccatggacgagcaggcgggtcccggcgtcttcttcagcaacaaccacccgggcgccggcggtgccaaggggctcgggcctctggcggaggctgccgcggccggcgacggggcggctgcggcgggggcggcccgagcccagtacagtctcccggggatcctgcacttcctgcagcacgagtgggcccgcttcgaggtggagagagcccagtgggaggtggagcgggcggagctgcaggcccagattgccttcctgcagggagaaaggaagggccaagaaaatttgaagaaggatcttgtgaggaggatcaaaatgttggagtatgctcttaaacaggaaagagccaaataccacaagttgaaatacgggacagaattgaatcagggagatatgaagcctccaagctatgattctgatgaaggtaatgaaacagaagtgcagccacaacaaaacagccagttaatgtggaaacaaggtcgacaactactcagacagtatctacaggaggtgggttatacagatactattctagatgtgaaatctaaacgagtgcgagctttgttgggcttttcaattgatgtcacggacagggaagatgacaaaaatcaggactcagttgtaaatggcacagaggctgaagttaaagagacagcaatgattgcaaaatctgagttaacagattctgcctccgtgctggataatttcaaattccttgaaagtgcagctgcagatttcagtgatgaagatgaagatgatgatgttgatggaagagagaaaagcgtcattgatacttcaacaattgttaggaaaaaagcattgcctgacagcggtgaagatcgagatacaaaagaagctctaaaggagtttgacttcttggttacatcagaggaaggagacaatgaatctagaagtgcaggcgatggaacagactgggaaaaggaagaccagtgtctcatgcctgaagcctggaatgtggaccagggagtaattaccaaactcaaggaacaatacaaaaaggagagaaaggggaaaaagggggtgaagaggcccaataggtcaaaactacaagatatgcttgctaatttgagagatgttgatgaacttccttcattgcagccatctgtgggttcaccttccagacccagcagctccaggcttcctgaacatgaaattaatagggcagatgaagtggaagcattgacatttcctccttcttctggaaagtcattcatcatgggagcagatgaagcccttgaaagtgaactgggacctggagaactagcaggccttacggtggccaatgaagcagactcactaacttatgatatagcaaacaataaagatgcattgaggaagacatggaaccctaagtttacattgagaagtcactttgatggcatccgagcccttgctttccatcccattgagcctgttttgataacagcatcagaggatcacacattaaaaatgtggaatttacagaaaacagccccagccaaaaagagcacttctcttgatgtagaacctatctatacattcagagcccataaaggtccagtgctttgtgtggtaatgagcagcaatggtgagcagtgttacagtggtggtactgatggactgatccagggctggaataccactaatcccaacatcgacccctatgattcttatgatccttctgttttacgaggccctctgctaggccacacggatgcagtctggggtttggcttatagtgcagcacatcagcgtttgttgtcctgttcagcagatggcactctgcgtttatggaatacaactgaggttgctccagcactaagtgtatttaatgatattaaagaactgggaatccctgcctctgtggatctagtgagcagtgacccgagccatatggtagcatcattcagcaagggatatacaagcatttttaacatggaaacacaacaacgcattctcactttagaatccaatgtagatacaacagccaactcttcctgccaaataaatagagtcatcagtcatcctactctttcgatcagcatcactgctcatgaagacaggcacatcaaattctatgataacaatacaggcaaactgatccactcgatggtagcccacctagaagctgttacaagtttagcagttgatcccaatggcctttacttgatgtctggcagtcatgactgttcaatacgtttatggaatctagaaagtaagacgtgtatccaagaattcacagctcatcgaaaaaagtttgaagaatcgattcatgatgtagctttccacccatccaaatgctatatagccagtgctggagctgacgcactggctaaagtctttgtatgacgcaatgcatcatcttcaccttctagctgtttataagtaatcaactgcacacaagagatacagaagacgagggcaagaatcatctcgtcctgcccttttgttctgctgaaggagcacagagaacatttgttgaagtatagttttgcaattcatatactgttttctaaaactaaggtttgttcaggttgctgcaagctcagctgaatctgtgagcctgaggtctgtttcaaatttctccccaataggcgcctwtatttctgaggtggttctaattcgctaggcaggcctgagcgaatacaagtttagcttgtccctgttgagtaagtagggcatgctacaatggataatttaaaagcttgatagctgggactgaatagaagaaaacgggaaacttagacaagttctccctgagaaatctggttaaaacacattaattat

SEQ ID NO: 129222 - DNA, 584 bp, Homo sapiens
atggaagcctatagctatgagaaagtccaggaggagacaggagaagcttttacccgtccagaaggaggggcagccgaaggaaggagagagggaagagggtggtccagtgcaggcacagaaggttccaaacaggctgcacctgcactggaccaccctcttccctccttctttcagctgcccctccttctggacagcctctggagagcccttaaatttgtggtccttgaagctattgtaaagatgatacggtttaatggggtattggggaaatgcgaagccatccgagcacaagcgctccatgagggtgggccacctctcccgcttgccgtcttccataatcgtcggctgcaaattgtagcctgcagccgtatttcagctcgccttcggggatcgccgcctccgaagagcaacaacgagcaaagcagtctgtccacggacctccgcacagactctcagcgcctcccgcctctcagcagaaacgcccaacagaagggttagaaccagcgagcacgcgcaccttagccggccctgcccaacaggcccgaggcagagaaaccgccctagcagctctcgcgcgccacgaa

SEQ ID NO: 129223 - DNA, 2083 bp, Homo sapiens
atggccgtggccagtaccaagagtcggtgggagacgggtgaggtacaggctcagtctgcggccaagactctgtcctgcaaggatattgtggctggagacatgagcaacaaaagcttctgggagcagaagggaggctccaagacctcatcaacaattaaggcccagattgccttcctacagggagaagggaagggccaagaaaatttgaagaaggatcttgtgaggatgatcaaaatgttggagtatgctcttaaacagaaaagagccaaataccacaagttgaaatatgggacagaattgaatcagggagctatgaagcctccaagctatgattctgatgaagcgcaacaacaagcaatgcggtctgtccacggacctttgcacagactctcagcgcctcccgcctctcagcagaaacgcccaacagaacggttaggaccagcgagcatgtgcaccttagccggccccgcccaacaggccctaggcggagaaaccgccctagcagctctctcgcggcgcccagtgcaggccgcggttgctgctcaggtactagtttctttgcaaatcacatgtatggagctaaagccaggagacctctggccttttaccagggtaactgtgcattggggaaaaaggaaatgatcagacatttcggaaactactggacactggctctgagctgatgcttgaaagactcagggtggtgattcctaccacatccctgttcaactctcccatttggcctgtgcagaagacagatggatctggaagaatgagagtggattatcataagcttaaccaagtgatgactccaactgcagctgctgtaccagatgtggtttcattgtttgagccaattaacacatttcttggtacctggtatgcagccattgacttggcaaatgcccttttctccattcctgtctgtaaggcccaccagaagcaatttgccttcagctggcaaggccagcaatatacctttactgttctacctcagaggtatattaactgtttggctttgtgtcataatcttattcagagagaccttgatcactttttgcttccacaaggtatcacactggtccatgtgtgttaatccggcccatttatcaagtgacctgaagctgccagttttgagtggggtccagaacaggagaaggctctacaacaggtccaggctgctgtgcaagctgctctgtcaattgggccatatgacccagcagatccaatggtacttgaggtgtcagtggcagatggcgatgctgtttggagcctttggcaggcccccaaaggtgaatcacagtggaggcctctaggattttggagcaaggctctgccatcttctacagataatgagaaatggtcagatgtgcaattatatactgattcatgggctgttgccagtagtttggctggatagtcagggacttggaagaagcatgattggaaaattggtgacaaagaaatttggggaagaggtatgtggatggacctctctgagtggtcaaaaactggaaagatatttgtatcccatgtgaatgctcaccaactggtgacctcagcagaggaggattttaataatcaagtggataggatgacccgttctgtggacaccactcagcctctttccccagccacccctgttgtcgcccaatgggcccatgaacaaagtggccatggtggcaggaatgaaggttatgcatggactcagcaacatggacttccactcaccaaagctgacctgactacagccactgctgagtgcccaatttgccagcagcagagaccaacactgagacctcgatatggcaccacttctcagggtgatcagccagctacctgctggcaggttgattacattgaacctcttccatcatggaaaaggcagaggtttctcctcactggaataaacactcactctggatatgggtttgcctatcctccatgcaatgcttctgccaagactaccatccatggactcatagcatgccttatccactgtcatggtattccacacagcattgcctctctttacagagagagaggcactcactttacagataaagaagtgcagcagtgggcg

SEQ ID NO: 129224 - DNA, 1803 bp, Homo sapiens
atgcccataggaaaagtgggagagtactacatcaagggaacactccgtgcgacaaaagagtctgaacaacagtcttcagccctagaactttcctctgacagagtctacctaaatgagaaggaaccaggagaccaaccctggaatgctgcatttgtcttccgaggctgcggtgtggctctcgcactgcggccgcctcaccttggctggggagaacctcggtgggcaggattcagaggggcttttggtttcccgttttccacactgaacccttctaactggtctctgaccctgattattcagggctgcaaacaggaaggattttattcaccgtcgatgcggccccgagttgtcccaaagcgaggcagtgcccccaaggtccgtgctgaggagaacgctgctctgccttcgcgttgtccccctggacccctgcctgtggcacaaccaaggggcctgctgatgggggctcatgtgagcagtgccccagctgtgggtgtgggtgctgccagctgccaccgcctttgccctggtttcccagatagaccccgacccacactccgaagctgtatcatgaacgctgtggtgggcggctgtgacttgaggggtcaagtctatgatcccacgggaggctgggctaatgaggggaccagagacctcagtgctgtgcagggagtcccgaaccaccctggtggaaggccctgcccaactccccagtcctcccgccagctccctgtggtgtccaggagacctgtggtcaggcctggaggagaagctcctcctcccctcgacatcctccctgcagcccttgctcttcaccagagcctcctgactccccaggaccccagagaggaccgaccctctccagccgacctctgggctcaggacagctgggtggggcagccacaggagctgcctgtagggagcagagtcaggacggggaccgagccggacacccattctggaagtgtctgcacttccaggcaggggaaggacggcagtgggcccctagccagggagagctcagtcagagtgatcctccaggggcccagctctgcatggatgatgttcccagagtacacacctgggcctcgtgccagggccggcaccgccgttgtcggggccatggcaaggcaaacagtcaatgtttgcctcactaaagtgaggctgcagcaccctgaagggatccctggagggggacgtggtccccttgttcccaagcctgtctgcacatgcacgtggatgtcaagggttcccgtgtgtgagcacgtgcatatttgtatgagcatggggtgcaggcatgtgtgcctgtgtggccggagcgtgggctcgtggagaatgtgtactgctggccagacccccaagctagcccgccaggcctccatagagctgcccagcatggctgcgtccagtaccaagagttggtgggagacgggtgaggtacaggctcagtctgcggccaagactccgtcctgcaaggatattgtggctggagacatgagcaagaaaagcctctgggagcagaagggaggctccaagacctcatcaacaattaagatggactctgtgactacatgactaataaaatatggcagaaattgacaccatgcagttttccaagcccagggcttagggagacaggcagcttccagttcagtcttttggagggtcagctctggggccctaagccatcacgcatggagtccaaccaccctgagacgtcatgctggagacccacctgtggatgccccagtcaagagtcctggctgagcccagcctcccagccacccccacccaaggcatcagacc

SEQ ID NO: 129225 - DNA, 858 bp, Homo sapiens
gccgcaatacaggcggtggtcagagagtggaagggcagagaggctaaagggtccaggagcaaaaggaggtggcagcggatggcatcaaagaggcgagggtaggtcatgctggcaacaggaagcaacttcttatccagggccggggggcgggtgtctggctggaatctcccctgggtacatggagggtgccagccggctggacctgcagacccaggaagcgagatgggacgcctagggagccgggcccccttccacaagcaccttctcatacttcccaggcacggtggccacaaacttaaacctctttcccagatggggtgctcttaattgttgatgaggtcttggagcctcccttctgctcccagaggcttttcttgctcatgtctccagccacaatatccttgcaggacggagtcttggccgcagactgagcctgtaccctcacccgtctcccaccgactcttggtactggccacagccatgctgggcagctctatggaggcctggcgggctagcttgggggtccggccagcggtctcgatggcctgggtgtattgttccagccactgatcaatcttggagatgggcaagtctggctgggatttcttcacactgttactcttctctatggagcggtttagggactcggtcctgtcgatgagtttggtggtagggctcaggggaggcgagctctgttcgatggtcccctcccaagaccaaggggctgggtgtccttgggttggtgaccattttggtggtccttctggtcctcctcaggcccttcgggcccccgggtgttcttggccaggttcttttggcggaaggggtggttggacccggaaattcgggaccggtact

SEQ ID NO: 129226 - DNA, 2171 bp, Homo sapiens
  misc_feature (1)...(2171): n = a,t,c or g
ggcgcgtaaaaaaatctccacgcgaaaacgccttggcgctgtttccggatatttaaacgcccccccctctggggaatagtccccccgaggcaagaaacaccgcccgcaggcttntttttttttctttttaaattggggagaaagaacacgtgtctaaaaaaacccccgaaggaaaatttccccccagaagaatttttgttctctctcaagggattcctaaaaagaccacctcctttctacagaatccgtctaccaagaaaacaatattgaaacaaatcctgggggccccgtttggaatgtcttcccatggtttgcccaggacactctagtgggtgtgaagatgtcatattatactggactgtgaagcgagaaggtgatatttaagccactaaagcttgtggcagccaccaaattttccaatgccttctgcaatcttgcaatttaaactggcttcaccgccattcccaccccccacccagtgggaaaaagcctttaggagcaatttggtcaaggtgggggtgcttgtcaagggtttaacggttcaaccttcaaaggaaagccctgggtgcgctgaactccggggtggggggcaacctggcaaaggtaagcggggaacccccgtaaggcccccnggaagaaagctggggccacccttttgcccacttggaccagcaaaccgcgctgactgcaagttccccgggcgtgcccgtcgaaagcggccaggaggtcaactggggcggcttccctccagtgccttgggcaggggacccaccctcggcagcccgccccaccagggcccaggacgcagtggaagagcgtatggcgtcgcagcaggcagtccctaaggaactgcaccaactcctccaaacaccttcccaggtgctcctcgtcccagccttgcccaggggccccacttgcgcagcagctactgccagcagcactgtcttgagcacatatgaggataggatgcgtccccactgggtggcggccgctgagtccagcccacgggcccccagatcgcgttgagccttatagcaactgcaggcacttgaggtagcaggcacctggagctgcccgttcctgcagccaactcagcagcttctgctcctggcgtgctgtgttcacaccccacagtgcctccgcacgcaggccctcagggagctccaacaggggcgcgctgggcaagggtggcggtggtggcgccacaaggaagaccccatctcccagatggacagcggggaatgagacgcacagccatagaaaggcggcagcagccgtagtcagtgcggcagggcaagatgtgtaaggtggggggctgttccaggccacctggggtcaaggtgacccgacagcgcccctccaggctgtaacgcacagtggccaaggagcgctgcagatgcgactggaaccagcgcagcaccagagtagcagagaggtgacgccgcccgcgcacataccacgcagaaggcatcagcaaagggtttgcagtcccgaagccagtggccccccgaggcccccgatggtgagggtggtgccttgagggcgcacaagaagcagccgcggaaggccggggccagcgctggctcctcgcccaggctccgtggctccagcgccacaagcggcgggaggcgcagtggcaccagcacgtcgaagctgtcgggccggcggattttatgttgctcgtaggcgctgcccacctggatgaagtctccgcggaaggccaaggccagcgctcccccaggaatgagaccgggggacccccgggcgcggccagcccgcaccagctcgcccacgatccggctcacgtgcgccttgctgtggcccaacacgtgcggagacaggcgcacctcatgctcgtagtaactctccagcaggatgctgaggcccggctctcggaagtgtctcgaggagaaggcggcgtgaccctccagacggggagacccgggcaggaagcgctgccggacagcgtggcgacagcgcaggaggacatagctgaggaggagcaggacggccaccttaagcaacgggaagccgccatccacgccgtcggcgggctcggcccgggcgcccccgcttccccgcaggacatggtagaggcacaccagggcggtgcacaggccggtcaccaggggccagaagacgcgtagattgagggtgtagtgcaccgacat

SEQ ID NO: 129227 - DNA, 440 bp, Homo sapiens
atacagcaagatagccaggcccctctatactctaatcaaggagacccagagggcaaatacttatctagtagaatgggaaccaggggcagaaacagccttcaaaaccttaaagcaggccctagtacaagctccagctttaagccttcccacaggacaaaacttctctttgtacatcacagagagagcaggaatagcttttggagtccttactcagactcgtgggacaaccccacaaccagtggtatacctaaaggatggggaaccaatcgagcatgactaccaacaaattatagcccagacttatgccacccaagatgatctcttagaagtccccttagctaatcctgaccttaacctatataccgatggaagttcatttgtggtgaacgggatacgaagggcaggttatgccatagttagtaatgtaactgttcttgaaa

SEQ ID NO: 129228 - DNA, 376 bp, Homo sapiens
aggccacttctgaagtccaggcactctggtccttcagtatttggatgatttacttttggctaccagttcggaagcctcatgccagcaggctactctagatttcttgaactttctagctaatcaagggtacaagtgtctaggtcgaaggcccagctttgcctatagcaggtcaaatatctaggcctaatcttagccagagggaccagggccctcagcaaggaatgaatacagcctatactggcttatcctcaccctaagacattaaaacagttgcgggggttccttgaaatcactggcttttgctgactatggatcccaggatacagcaagatagccaggcccctctatactctaatcaaggagacccagagagcaa

SEQ ID NO: 129229 - DNA, 1551 bp, Homo sapiens
gtactctttgagacaggtgggcagataaagaacagactcagaaggggtgaagaacttgcccacgcttgcaaggttaatgagtgtcagtatggaaatgtaagcccaggtgctgtgggcgcctgtactctctctgtcacacaaccgtggtacctagaagtggactacactcatgaggccgtcaccataaagtgtaccttctccgcaaccggatgcccttctgagcaaccaacatgcctgtggtttcgctacggtgctcaccagcctgagaacctgtgcttggacgggtgcaaaagtgaggcagacaagttcacagtgagggaggccctcaaagaaaaccaagtttccctcactgtaaacagagtgacttcaaatgacagtgcaatttacatctgtggaatagcattccccagtgtgccggaagcgagagctaaacagacaggaggagggaccacactggtggtaagagaggaggcagaatggtgcactgttgtggacctcaaggatgccttattctgtattaccctgcacactgactcccagtttctctttgcctttgaggatcccacagaccacacatcccaatttacgtggacagtcttgccccaagggtttagggatagccctcacctgtttggtcagacactggcccaagatctaggacacttctcaagtccagacactctgatccttcagtatttggatgatttacttttggctaccagttcagaagcctcgtgccagcaggctgctctagatctcttgaacgttctagctaatcaaagatacagcgagatagccaggcccctctatactctaatcgaggagacccagagagcaaatactcatctagtagaaggggaaccagaggcagaaatagccttcaaaaccttaaagcaggccctagtacaagctccagctttaagccttcccacaggacaaaacttctttttatacatcacagagagagcagggatagctcttggaatccttactcagactcgtgagacaaccccacaaccagtggcatacctaagtaaagaagttgatgtagtagcaaaagtctggcttcactgtttaagggatggggaaccaatcaagcatgactgccaacaaattatagtccagatttatgccgcccgagatgatctcttagaagtccccttagctaatcctgaccttaacctatatattgatggaagttcatttgtggagaatgggatacgaagggcaggttatgccatagttagtgatgtaactgtacttgaaaactctttggcagcagtgactctccaaaaccgccaaggcctagacctcctcactgctgagaaaggaggactctgcaccttctcagggaaagagtgttgtttttacactaaccagtcagggataagttcccctctggaggacactacaactgcagggccctttcttcaccccatccagcaggaagtagctagagctatcatcggccaattcccaacagcatttggggtgtcctgtttagaggggagattgagaggtgaagccagctggacttcctgggtcgagtag

SEQ ID NO: 129230 - DNA, 1362 bp, Homo sapiens
atggggccagagcccaaaaacactcaccctggttcctgcacctgcccactcgcatgctcctcctcccataaggggtttgagtgtttagcagtggagcaagggagctacacccctgtcgcaagtcccatagtgggggtgaaggaaaaccaggagatcctggatctgttggagctgaagtacaatcagaccaggtctgctgttaccagatgtgttctgggtgctgccagcacagctagaataaagcaggcagaagaaggtggaaggagcagacttgctgagtcttctggccttcgtcttcctttcgtgctggagcttcctgccctcgaacatcagactccaagttcttcaggttttgaactcttggacttacaccagcggcttgccacatggtctcaggccttcaactacagactgaaggataccctgttggcttccctacttttgcggttttgggactcagactggcttccttgctcctcagtttgcagttggcctatcgtgggacttcaccttgtgatcattgagcgcaactattcctatcagcagggtacagagactgttgtgagctcttgggcaacaggtgtttctgctgctgcatcagtgagcgcaactattcctatcaacagggtccaaggccattgtgggttcttgggcaagaggtgtttctattgctgcattggtgagtgcaaccattctgatcatcagggtccagggaccgttgcaggttcttgggcaagaggtgtttctgctaccgcatcgcagatccaggtagacctgggaaagttttcagatgatcctgataggtacatagatgtcctacatctcacttggagagatgtcatgctattgttagatcaaaccctggcctttaatgaaaataatgtggctttagctgcagcccaagagtttggagatacctggtatcatcgtccagtaaatgatagaatgacagctgaacaaagggacaaattccctactgacattaaaacagctgcggggattccttggaatcactggcttttgctgactatggatccccagacacagcgagatagccaggcccctctatactctaatctaggagacccagagggcaaatacttatcttgtagaatgggaaccagaggcagaaacagcttcaaaaccttaaagcaggccctagtacaagctccagctttaagcattctcacaggacaaaacttctctttatatgtcacagagagagcaaggctagctcttggagtccttactcagacctgtgggacaaccccactgtatcaggatgagctgcggaaaaaaaccctgagacaccgagatagtgaagggagtggctttaatcagctggaagcatcagcagactag

SEQ ID NO: 129231 - DNA, 5194 bp, Homo sapiens
ccaaggcagatttcttcagacatggtcatagagaaaaggaaataaacaggttgaggggatgagtttggaaggaaagaagactcgagttcaaatcctgggtctgcatttcctccctatacgattttgggtaagtcacttaccactcctaaacttcggtttccttttcacttaattgagaatagaaattgctatcatggagggtggctgtgatgatttagaggagataaaattatgccaagtgccagtgaaggcctgagtatgcggttggggcttagggcttagtcatccaggagagccagtggaaaggcggatgcctgctcttcgtcagtgctgcgtgaaagcagcagagacggagagttgccgctgagcagctccagccccacagctgggacttggtccctgtaagctggcatcccacctgttgtcccagagccacctgagccagtcagtgcgctcagaagcagaacagaaggcaggagcttcaccagcaagctccattcagagggaacctctcttcaaagatcaattaaaagcgccgctgccagagcaaaagcgccggtccctcttgactgtccccctcctcacttttcgggctcagaaatgtggcccaggcagcccccttgtggcacgtgggggcgccacagactcttggctggtgtctgaagaattcagactgtctgattccaccgcaccaccgactgagcttcgaggacaggaagccaccggcatcactaagccaccggcatcacttcatccccagcctcacgcttgggactgggcccggggaagggacccccgcaggcacctcttaggaaccccagagctacaggagcacagtgagaagaccaccaccgaaaccctccctgcagacatggggaaactgaggacctgggagaggaaggaggccacagcaggccaggcagcagagggagctgctgggggtattcattttgaggccacttccctcctaagacccagtagctatgtccctcaaacccaaggagctctgagcaccacctacaaggaggccaagatggacagggatcttcacctgacacccatcctggcagcccagagagccaggggccccagaatacactcctttccatccgacgaaatgatagaaccctctgaagactcatttgagacgatgatggagcataagaatccatcatcaaaacaaatggagtcctccgagggctcatccaacaccaccgaggcgacgtcgggcagtggagtgcggggagaggcagggccagccagcggcccagcccaggaaaagaaggagccccccagtggcccactccaggaaatggaagagctgcccactgatctactccaagacatggaggagccatccagtggcccacgtaaggaaatagaggatccacccaatgacctactccaagacctggaggagtcatgcaacggttcacaccaggcaaggggggatccactcagtggagcatctgataggatgaaagaagcatcagtcaacccatcgggagcccgagaagaacaagaggctcacactgacctgaaggaatcgggaagggaggagactcctcaagagcaaaaccagaccgagcactcaaccgcagaacttatggccatggtgaggtccatcatctcgctgtacttccgaatgcaagacctcaaagagcaacagagagtagcagaagagatcttgatcaaagggatcaatgcaggccaactgcccgccccaaagcacttctctggcgatcgcagagaattccacgagttcatcgtactctgccaactgaccttacagagctacccaagaatgttctataacgaccgtctgagagttggctatgtcatcaatcacctgtccggcttggcattagaatgggccaaagctctactgcaggaaaacagccccctgatcggagacttcccagccttcctggaggccatgtccgaagtgtttgagtaccgccaggcactgcgtgtggcagaagaggccatgttcaccatcaggcagggcggccgctctgccactgagtacatcgatgagttccagagcctggtacccatcttgggctggccagatgaagtcctgcaggcccacttgtgccaggggctcaacgaggagatcaggcactatctattccgggtccctcagccggattccctagacagtctgattgtgctcatcctgcaaatagaagagaagctggcagagagaagagctatgctcaggctgccccccgaggcccgcccccggaacctgacctggatcgactcacctgctccagagaggtggatggtcagcagctggttgcccagcgaagtccatccggacatcaatcgcgcccacctcttcctgctgctcatggtgagagtgaacccctaccacagcgtcgcggtccaggccctggtggattcgggagctgacggcaacttcatggatgagaagttcgcccaagagcactacgtcgagctctacgagaagccgtacccacagccggtccaatccgtggacggctcgctgattggcaacgagcctgtctggctctacacggagcccctggtgtgtatccaccagaaccaccaggagtccatcgaatttgacatcgtaccttcaccgaacttctctgtggtcctaggcatccgctggctccgagtccacgcccccgaagtcgactggatcaaaggccgctgcaccttccactctccctactgcctgaagaactgcttccgcccgcccccgccatgcattgccctagagaggcacggcatgagcctgctacccggactgccacacccatactcagacctggccgacgtgtttaacccgaaggaagcagatgatgagacttccgaccagccaagctcagacggatccgatgatctttctgaatcagagccctctgagcttcagcaggctggagacagtgatcacagcgagaccttttacgagtgtccctccaccgcgccttgggaacctgtgggtgccaggatgcaagaaagagccaggctacaggaggaatactgggacctgcaggacatgctgaccaacagacaggactacatacagatgattccggaactgtttgaccagttacacggagccgagtggttcacaaaactggagctgcgtgggaccattgtggaggaaagcgtgaacgggcaccgcaccgaagatgtgtggaaagcagcgtttggtttggagcttgaagagatgaagagctaccagccgtttgcgctctccccagaccctatcatacctcagaacgtgattcacttcatcctaaaggacatgctagggttctttgtgctttcttatggccaggaagtcctgatctactcaatgagtcaggaggagcacctccaccacgtccgccaagtcctggtccgcttccgccatcacaacgtctactgctccctggacaagagccagttccaccgccaaaccgtggaattcctgggcttcgtcgtcacccccaaaggggtgaaactgaacaagaacgtcatgaccatcataacagggtaccctacccctggctccaagctatctctgcgaaacttcatcgaattcgtcttcccctaccgccacttcgtggagcgcttcagcatcatcgcagagcccctggtgcggcagctgctgagctcctaccagttctactggggagtcgaggagcaagaggccttcgagtgcctgaagagggctttccgcaaggcgcctctcctccaccaccccaagccccagaacccattctacttggaaaccggcgtcaccggcacggccctgcacgcctccctgatccaaatcgacgaccaaaccggcaagagagcctgctgcgctttctactcccgcaacatctcccctatcgaggttgagtactctcaagcggagatgaagattcttccaatacgggctgccttcatggtgtggtgccgctacctggagaacaccgaggagcccatcatgatccttctcaacacagaggatctagcctctctgaataatgacaggctcaccgtacttctccccgggcattgggtcttcttcttctcccacttcaactttgacgtcatggagctgccagaacaagacggcggccgagctctgccacctgtgagaaacctccggtggaggagagccttccagaggaacactgccgccaggcaaaccctgctgctggcctcaaggggattccccagggatccatcgacggaatccggggaagaagagaatgaagaacaggatgagctcaatgaacagatcctacggcaagagctgctggccatgatacccatcgaccagatcctcaacagcttcctcgcccacttcagcatggcccagatcagggccgtcattctgcacttcttccgaggcctcctgtactggaagaacaccctagccctggcagccatcctcgtgctactgcgcgtgaggcaatgcctctcgctgcggccggcacccgccatgcgggtggctcggccccagccccagcgctccctacgactcatcctggattcgtccctcatcgcaggcagcagcatcacgacagccatcacccagctgctcacccagatgcccgctctcgtaggtgcaaacaccatcccagcccaggagctggctgagctgttcctgggccctggccgctggcagcgaaatgctctgcactcccaggcccaccgaggcctgcagttcacccctggcttctggctgacgctgtgtgagttcttcggtgtcagagtcaccccccaggagggccacctccctgccctgcgtcagaaccgctacctggagctgcacgtcgttggtgatgaggatgtcgtcttgcgagaagccctgcaagacgacctgcaacgttaccgtcagtgtggcctgcatgacggcctgcaagacacctcgcaggacaagcaggacaacgacgtgcaggaggccccacccagccacacagcagccacccacccaccccgcccacgccacctgatggatccccaggtcctggaattccttggtagccgcctgctccacatccacagtgcagatggccagctgcacctgctcagccgggagcaggcagccagggccctgagccagttcctgaccctgatctacaggcgggccctgcccatccccgcctgggagagccagcccagggagcaggcaaggctagaagagctgcctgatgaggacgaagatgctaacctcgactga

SEQ ID NO: 129232 - DNA, 969 bp, Homo sapiens
tcagtcgccactgccagctcgcctaccttgttcttctgccgctcctctgtcccactcctctgtccatcgcagtagaagaagagcactgcgctcgtcattgacaatggctcttgcatgtgcaaagctggctttgcaggggacgatgctccccaagccatgtttccctccaccgttgggttccccggacaccagggcgtgatggtggacatgggccagaaggactcctacgtgggcaatgaagcccagagcaagcgcagcattctgacgctgaagtaccccatcaagcatggcatcatcaccaactgggacaacatggagaagatctggcaccacttctacaatgagctgcatggggccccggagtagcagccagtgctgctgaccgaggacccactgaaccccaaggacaacagagagaaaatgactcagattatgtttgagaccttcaataccccggccatgtacgtggccatccgggatgtgctgtccctctatgcctttgggcgcaccactggcattgtcatggactgtggacacagggtcacccacacggtgcccatctacgagggctactcccttccccatgccatcctgcatctggacctgactggctgggacttgactgagtacccctgcatcctcctcttctctgagaagagctatgaactgcccgatggccaggtcatcaccattggcaatgagtggttctggtgtccggaggtgctgttccagccttccttcccgtgcatggaatcttgccgcatccaccagaccaccatcaactccatcaagaagtgtgacgtggacatccgcaaagaccaatacggtactatccggtggcaccaccatgtatccaggcattgctgacaggatgcagaaggagatcactgccttggcgcccagcaccatgaagattaagatcattgcacccccagagcgcaagttctcagtgtggatcggttgctccat

SEQ ID NO: 129233 - DNA, 451 bp, Homo sapiens
tttcgtcagggcgtcatggtgggcatgggccataaggactcctacgtgggcgacgaggcccagagcaagcgtggcatcctgaccctgaagtaccccattgagcatggcatcgtcaccaactgggacgacatggagaagatctggcaccacaccttctacaacgagctgcgcgtggccccggaggagcacccagtgctgctgaccgaggcccccctgaaccccaaggccaacagagagaagatgactcagattatgtttgagaccttcaacaccccggccatgtacgtggccatccaggccgtgctgtccctctacgcctctgggcgcaccactggcattgtcatggactctggagacggggccacccacacggtgcccatctacgagggctacgccctcccccacgccatcctgcgtctggacctggctggccgggacctgaccgactacc

SEQ ID NO: 129234 - DNA, 234 bp, Homo sapiens
gtgtggtcctggctgccgcggaggcaggtgccggggtctcctttgcctcaatgtgaagagcttagaaagaggaggagaggagaactcccccggccgaagatgactttgaaaaggacctggagtggttaattaatgaaaatgaaaaaagtgatgccagcataatagaggtatatattgccaacagcattcataataattatattacaaagtgctttgcaattctttaaggttttc

SEQ ID NO: 129235 - DNA, 1715 bp, Homo sapiens
cccacgcgtccgcgcagaggcacgctgttgccatggcagtgtggtcctggctgccgcggaggcaggtgccggggtctcctttgcctcaatgtgaagagcttaaaaagaggaggagaggagaactcccccggccatctctgtgatcccagccgccgcattttacacagcatatttccttcacaaacagaaaatgaatgaaaataaagatactgattcaaagaaaagtgaagaatacgaagatgactttgaaaaggacctggagtggttaattaatgaaaatgaaaaaagtgatgccagcataatagagatggcttgtgagaaggaagagaatattaaccaagacttaaaagagaatgagacagtaatggagcacaccaaacggcattctgatcctgacaaatctttgcaggatgaggtctcaccaagaagaaatgacatcatttctgtaccaggtattcaacctttggatcccatatcagattcagatagtgaaaactctttccaggaatccaaactagaaagccagaaagacttggaggaggaagaggatgaggaagtaaggagatatattatggagaaaattgtacaagctaacaagcttctacagaatcaagaaccggtgaatgataaaagggagcgattacttaagttcaaggaccagttagttgatttggaagttcctccactagaagacactactacttctaaaaattattttgaaaacgaaaggaatatgtttgggaaactgtcacaattatgtatttccaatgattttggacaagaagatgtgctcctgtcacttactaatggaagctgtgaagaaaacaaggataggacaatactggtagagagagatggaaaatttgaacttctgaatttacaagacattgccagtcaggggtttttgcctcccattaataatgcaaatagtacagaaaatgaccctcagcagttgttacccagatcttccaactcctctgtcagtggcaccaagaaagaagattctacagcaaagattcatgctgtcactcactcatcaacaggagagccgctggcttatatcgctcagccaccactcaaccgcaagacttgtccaagctctgctgtcaactcagatcgaagtaaagggaatgggaaatctaatcacaggacacagtctgcacatatctcaccagtgacttcaacatactgtctttcccctcgacagaaagaactacaaaaacaactagaagaaaagagagaaaaactgaaaagagaggaagagcgacgaaaaatagaagaagagaaagaaaaaaagagagagaatgacatagtatttaaagcgtggttgcaaaagaaaagagagcaggtcttagaaatgaggagaattcagcgagcaaaggaaattgaagacatgaacagtagagaaaacagagatccacaacaagcttttcgattatggcttaaaaaaaagcaccgaagagcagatgaaagaaagacagacagaagaactaagaaagcaagaggaatgtttattcttccttaaaggaacagaaggccgggaaagggcctttaaacaatggttaagaaggaaacggatggaaaaaatggcagagcaacaagctgtcagagagagaactagacagctccgactagaagctaagcgttctaaacagttacagcaccacctatatatgtcagaagccaaaccttttcgttttactgatcattataac

SEQ ID NO: 129236 - DNA, 2120 bp, Homo sapiens
cgggctatactaatgccctagatagtacactcccaatgggtagtcgtcccatgcgaggtctacactggggaactgcaatgggcccccgtatgtccaggaaaaaagacaggtgtcgtggttttcaagtgtttcagctagagttttttaacataaagttttatgtatttaaaaaaaacagtctgaagtattgtacaatataagtgctgtcttaatacaaatcactggtggaaaggagcaggacataccctcagcaaaggtcatacaatagggggtaaaacgttttgtgttcttgagggagaagtttttgcatcatgtcctggggaggtcatggacacctccgccccgacagcatgcctctgacttcttgggagcgtctaccagttgaggcaagcttgaacaagtgtcagctcccgtgctgggagacagtccttgctgatcaccttgaatgcttgaacatgctttcgtgggggctaacttttgttttctctgtagttctctttgggtgatctcatctgccttttctgcctcgaatgatgaacacccttgaaaccttggtccttccttgtctcaagaggggaaaaaaggaaattggatttcctcagggtctggggcccgggctgtggctttaaggttccgaaaactgaatgaaatccaaaacatgcttgaggggcctggtccgggggtcaatgccgaaaaagaaggttcccaataccaaaacaccttctgaagaaagtcccaggaaagctggtgtccataggttttcagcaaccatcgtgaggtccttggaatctgggtatctttttttcccccctgttgttggttatatttttaggaaaaacctttggaatcaaagaatgtctgtctcctggaggctgtctgaatgaaagccggctggcggcagacccagcacctccatgatgcaggccagctgctccacctcattctccccggggaacagggggtagcccgtgtacaactccgccgtgatgcagcccaggctccacatgtcaatggccacgtcgtaggggtggcccaggatcacttctggggatcggtagaaccggctttggatgtacgtgtatactgcggaggcaaaacaggagggaaacagagggagagaagggaaggacggtgtggagtagaaatattaatggtgggagagaggaaaatgaatgaaaataaagagactgattcaaaagaaagtgaagaatacaaagatgaatctgaaaaggacctggaggggttaactaatgaaaatgaaaaaagtgatgccagcataatagagatggcttgtgagaaggaagagaatattaaccaagacttaaaagagaatgaaacagtaatagaacacagcaaacagctttctgatcctgacaaatctttgcaggatgaggtctcaccaagaagaaatgacttcatttcggtaccgagtattcaacctttggatcccatatcagattcagatagtgaaaactctttccaggagtccaaactagaaagccagaaagacttggaggaggaagaggatgaggaagtgttacccagatcttccaactcctgtgtcagtggcatcaagaaagaagattctgcagcaaagattgatgttgtcactcactcatcaacaggagagccgttggcttatatccctccacttataagttggcttatatcccaccactcaaccgcaagacttgtccaagctctgctgccatctcagatcgaagtaaagggaatgggaaatctaatcaggacagtctgcacatatctcatcagtgacctcaacatactgtctttccccttgacagaaagaactacaaaacgagaacaaaagagagaaaagctgaaaagagaggaagagcaacagaaaatagaagaagaggaagaaaaaaagagggagaatggcatagtatttaaagcatggttgcaaaagaaaagagagcaggtcttagaaatgaggagaattcagcgagcaaaggaaattgaagacatgaacagtagagtaagtaaaacttctctgaaaaataagttcatacagatatgaaagctgaacttatttatagaagggatgggttatcatcttatttttccttcaaattaataatatacatgcttgtatatga

SEQ ID NO: 129237 - DNA, 4427 bp, Homo sapiens
  misc_feature (1)...(4427): n = a,t,c or g
tttttttttttttttttttttttttttttttttttttttttttttggtggctcacacctttaatcccagcactttgggaggcctgggtgggcagatcaccaggtcaggagttcgagaccagcctggtcaacatggtgaancccccgtctctactaaaaatacaaaaaattagccgggtgtggtggtgagcacctgtagtcccagcttactcaggaggaggccagggagaatcgcttgaacctgggagatgggggttgcagtgagccgagatcatgccactgcaactccagccttggatgacagagcgagactccgtctcaaaacaaagcaaagcaaaacaaaacaaaatacacatagaatttgtccaagttattatcacccagggggaaaagcagattttatagtataaccgtttttaaatgaggggcctaagagagggcagtggctggttagtcctatgttagatattaacaaatacgtgtaggctggatgtggtaggtgacgcctataatcctcgcaccttcagaggccaaggtgggaggatcacttgactcaggagttccataacagcctgggcaacatagagtccgtctcctcacaagcttccattcttggctcaaggtattagagtcaggtgccaccaggtatataatgaaccggccagaatctggagaggactgcggtgactgccccctcctcaatcttgcacagcacataggaaagggctgcgggtgaggatgaagatgatggccaggaggcacaggaccggcactgtggctgatttcctggctgtgggaccagcatttttttccggctgcttctggttctccccagcctcaggcccagctgccagactgtggcccgcagtgtgaatggtggtttcattgggacgagtgagctctttgtccgaggacagtgatcctactgggagggtggggcgctgagtggactgcaaggtggacaggagcatctgggcaggggtgtggatatctgaagatgccccctctgaggcctgagaaattggggggcttggtaggaagtaaatgctttctggtgggccacaatccccgagtaagcatgtccacattctttgagatcaagacagctcatcaattcctgaacccatgggtccttgttgcccccacacacgctccaggaaaggagcctggaacctcgtgtagtatagacaccgatggtaagctctcaggtgtttccggagacgattcatgaactgaaccgatggcggggagtcggaagaaattcttttaccacaataacaacttccagtgacgctgccctcgttgccattgcctggctgagtcaggtacaccagcaggagcagaagcaggagcaggagcacgcgggacccgggccgcaagtcccgtcccatctcggggctccgcggactctgcggggatggagccacctcgctctgactcccagacatgctccggcgcgtgacgtccagctggtgtctcaatggctttcgccggggaccggaggagacggcggccggagaggaggcgcgagccagctgcaccccccggccctgctgtgccccgaccgtgcgctcagtactcggcccgcgccatgccagcctctggacgcagggaaagccgaggaggtggagctcccgcgccctgcgcccccgcactgggcccggctccgtcgagggaaggccaggaatcttggaagaaaccgaaagaaaactccggcggcgggcgaggaggggcgggaggacgacggcccgaggagccgattcggttcggttcaggaggccgcccgcctggcccgtccgccgacctgtgaggcggctgcactgccggaccggccctcctcctccgaggcactttcacttccccgatccgggcgccgcgggacccagccgcgctgcatgagcctcccgggcggcccggtggagagagtcgccgccagccccggccgcgcgcacctgcggggcagccacccgcggacgcaccgagcccggggggcgtggccgcccgctgagccggcgagggctcgggcagccctgacgtcacaaccgcacccgcgcaccctccaccgcgaggtatttaccttcgaaaagtggtggcggctgcagtctgggccggggccctgtgccgctgaagacatggagtttgtgtctggataccgggatgagttccttgatttcactgcccttctcttcggctggttccgaaagtttgtggcagagcgtggagctgtagggactagccttgagggccgctgccggcagctggaggcccagatcagaaggctaccccaggaccctgccctttgggtgctccatgtcctgcccaaccatagtgtgggcatcagcctggggcaaggggcagaaccaggtcctggaccaggcctggggactgcctggctcctgggagacaaccctccactccacctgcgagacctgagcccctacatcagctttgtcagcctagaggatggggaggaaggggaggaggaagaggaggaagatgaagaagaagagaagagagaggacgggggtgcaggcagcacagagaaggtggaaccagaggaggaccgggagctagcccctaccagcagggagtccccccaggaaacaaaccctccaggagagtcagaggaggctgcccgggaggcaggaggtggcaaggatggctgccgagaggacagggtggagaacgaaacaagaccccagaagaggaagggacagaggagtgaggctgcccccctgcacgtttcctgtctcttacttgtgacggatgagcatggcaccatcttgggcattgatctgctagtggatggagcccagggaaccgcaagctggggctcagggaccaaggacctggctccttgggcctatgctctcctctgtcacagcatggcctgtcccatgggctctggggatccccgaaagccccgacagcttactgtgggagatgcccggctgcatcggcacagctttgaagcgaagctgacaccttgcccccagtgtagtgctgtcttgtattgtggagaggcttgtctccgggctgactggcagcggtgcccagatgatgtgagtcaccgattttggtgcccaaggcttgcagccttcatggagcgggcaggagaactggcaaccctgccttttacctacaccgcagaggtgaccagtgaaaccttcaacaaagaggccttcctggcctctcggggcctcactcgtggctattggacccagctcagcatgctgattccaggcccgggcttctccagacacccccgaggcaacacgccatccctcagccttcttcgcggtggagacccctaccagcttctccagggagacgggactgccctgatgcctcctgtgcccccacatccaccccggggtgtttttggctcatggcaggattactacacatggcggggcctcagcttggactcccccatagccgtgcttctcacctacccgctgaccgtgtactacgtcatcacccacctggtgccccagtccttccctgagctcaacatccaaaacaaacagtcactgaagatccacgtggtggaggccgggaaggagtttgaccttgtcatggtgttttgggagcttttggtcctgctcccccatgtggccctggagctgcagtttgtaggtgatggcctgccccccgaaagcgacgagcagcattttaccctgcagaggttccctgacttccagtggcttttccaccccactcctggggcccctcaggacagcctggaggtgtctgtccggcctggttccggcatatcagcacggcccagctctggcactaaggagaaagggggccgcagggacctgcagatcaaggtgtcagcaaggccctaccacctgttccaggggcccaagcctgacctggttattggatttaactccgggtttgctctcaaggatacgtggctgaggtctctgccccggttacagtccctccgagtgccagccttcttcaccgagagcagcgagtacagctgtgtgatggacggccagaccattgcgttggcccactggagggggcaccagccctccccagcccaaccccttccgctccccctttcgcctcagagcggccgacaactgcatgtcctggtactgcaatgccttcatcttccacctggtttacaagccttgctcaaagggaagcggggcccgcccggcgcccgggcccccacccccatccccaactccctctgctcctcctgcccccacccgaaggcgccgaggagaaaagaaacctgggcggggggcccgccggcggaaatgaatgctgataccctagtagtccccagctcccaaacactgaaaggaaaacgtgaaaacactcaaggcctagggggaggacaggttggtaaaacatgaaaaggtaaataaaattacttgtttgaaaaaaaaaaaaaaaaaaagg

SEQ ID NO: 129238 - DNA, 2214 bp, Homo sapiens
atgcagcacaggctgagtggaccttctttggcaggccctgctgcaaaccaagctgatttccagggccttgataattctcagtggggaggcagcggctcagaccgaatggcaggagctatcagccccaaagtgtctgcacctcttctgaattccaatcatcagaacacccccgagttcagtgatgttattcccaaatttgaaagtgaaggtgaaaagtctgcctgtgaccacaccatcggggagcagcagcagcagcagcagcccctggcccgattccccaccaggacacttccctgggctaccggaccttcttcatcctcgtccttccaagtggactgggactacattgtggtcttgagctctcagttactagggcagctcaactgcagaagccttgcagagaagcaggcagcaggaagaagagccttagctttgggttccaattgctgccgccctctagaagctcgacaccattgggcagggtcctttaaccctgagcctcggtttccgatctgtattgtctgtctgggtattactgaccccgcgaacagccctagccgccccttcgcagcggacactgtgctcctatcaacgcacggcagcgccagctattcccaccttctgttcacgtcagactggcagcagctcacgtccctggcacctctccgatgctctgaacggcagctcccttcaacgtgcctagaaacccctctgagaggaaagaccatgctcagcagaaagcgctacaaacaccccaactacactgagcattcctcaatgcagccaccacgtctgattcacctcagtcccctacgcctgacgtcgggcccggcccagagcagtccacccccagggccagtgacatttctaataagcatttgtgatcacatgaccctcctgagcacagctgtccagtggctccctacggcccagagaatccagtccacacccctgagcctggccctcctggtcctttacgagcagacctcatgcgcctgtgtgactatgcaggcctcctcattgtttgacacaatctcatccgttatctggaactacatcgtcctgtgcattgagccagtgctcacacggaggagatgctcaggaagcctttgtggggaggtggatggatccaggcagtggatgggaaggaagtttccagtcatgattaagccaaaggaacttgggaaagaatgtccacgtcttcccatgggctacagactgtgttccacagatgctgaatccaacaagctccaacccttgcttaggttaaaaatgaacacaaatggattaactttttgccaagcaaaaggcctcagcatgaacaaccacccggtacctgtgactcctggctggagagcccagcccggcggaaactcagaaagggtgaagatgctgataggtcacaagcccctccccactgccaatggagatgccagagtgctccagcacaatggagtgtggcccaccaaagccccatttcctagcccggtggagatggccctcgctccattctacctcctctgtaccctataccaggagtcttctcccaaagcctggcagcagctgacgcctatcagcaccaaggaaccgacacagctccaccctgagcaggccatgcacctgcctctccaacacctgttggcagagccttgccctcctcacgttcatcctcacctcggccaaccatggatatttgtaataggcccaattccaacaacaaggagactgtcagaattaaaatgcttccactggtcacagcctctgttcacttgtacccagaagaggacctggtacctaataggcactgggctgtttcagcaggactggatcgcactcagtactagtcagctatacctcatacaaccttttatagatgccaaagccacattaaatgtacatacagattctgcatggaaaaaaacaagagttgttccagcaactttaaaaccaagacatagaaattgccatttcaagccagacaacctgatggttctagaagtcagagaagaaatcttgagggcccaagtgaataataaatggtgcgacgctcagaggctggcaataggggctgtcaatgaaaaaaccacctacagtggagaaaagagcagagaagcaaaacttcatgttaatctcaggcaatttggtgaagccaagagcttcatttatatttctctgctctttcagctgtcagcaaaacgcatcaatgaaacatga

SEQ ID NO: 129239 - DNA, 361 bp, Homo sapiens
  misc_feature (1)...(361): n = a,t,c or g
ctttggaggagtggaaatgcctgaaccctgcacagagggctttatacagggaagtgatgttggagaactacaggaacctggagtttgtggatagctctttaaaatccatgatggagttctcatcaactgggcacggtaatacaggagaagtgatccacacagggacgttgcaaatacatgaaagtcatcacactggagatttttgcttcccagaaatcaagaaagatattcatcactttgagtttcagtggcaagaaattgaaagaaatggccatgaagcacccatgacggaaaccaaagagttgacaggtagtacagaccgacgtgatcaaagacatgctggaaacaagcctattaaagn

SEQ ID NO: 129240 - DNA, 1038 bp, Homo sapiens
atgaaaatccacaaaagcggtggactgaaggctacaccacagctgtatgcttcccagttctctggtgttgctatactggcgacatggggtccccacagacctagaaattccagcacctctttctcaacccagagcaaattgagacgtccggatgagagttcagttgatttccaaaaactcatgttatgtaaggaagccaccaagaagagcaaagaaaaggagccagggatggcttttcctcagggacacttgattttcagtgatgtggctataaaattctctgtggaggagtggaaatgcctgaaccctgagcagagggctttatacagggaaatgatgttggagaactacaggaacctggagtctgtggatagctctttaaaatccatgatggagttctcatcaacagagcaaggcaatacagaagtgttccacacagggacattggaaagacatgatttttgcttcccagaaatcaagaaagatattcaggactttgagtttcagtggcaagaaattgaaagaaatggccatgaagcacccatgacagaaatcaaagagttaactgagttcatactggagaaaaacctcagaagtgtaatgagtgtggcaagaccttcagtcagaagtcttaccttcaatgccatcatagacttcatactggacagaaaccttacaaatgagaataatgtgacaaagtttacagttgcagatcacaacttaaaacacataggagaattcatactggaggaaaaagcatacaaatgtaaggtttgtgagaaggctttctgggataattcatgcctttcatgccaaaagagagttcacattggagagaaaccttacacagcccttgtaatgcataaggcaattcacactggagagaaaccttacacatgtaatgaatgtggcaaggcttttagtagaaaagcaaaccttgcactttatcatagacttcatactggagagaaaccttacaaatgtgaagaatgtgacaaagtttacagtcgcaggtcacaccttgaaagacataaatga

SEQ ID NO: 129241 - DNA, 1347 bp, Homo sapiens
atgacgatttcaataccactgcggaagacacaggcagcagcttctggatcggcagcaatattaaactcggcgtttggcgtacagttgccgcgtccggcagaaccacccatgatcaccagacggcgaatatacggcttgcattccgggcattgtgaaagtaacagcgcaatattggttaacgggcccgatggccaccagggtaacaggctctggtgcacgcatcagggcatcccgaatcgccagaaacgccggtatcccgagcggctttcggttgtgctcaacaaagtcgtagccagccattcccgattcgccgtgcacagatgccgcatcacgcggtgcgcgtaccagtggcacagcggccccttgggcgagcggaatctccgcattccagaaatgcagcagttgcagggcattgcgggtagttttctcaaccgagacattacccgcgacggtggtcatcagttgcaggtcgagttcgggtgcaaaaatcgcggcggcaatggcgacggcatcgtcaatgccggggctgctaatgacttaatcgacttcacgaatatcgacacgcagctctttcggcacttcgaaaacaatgttttcttcacggccttccagcggaatgcttcaccaccgcccagctgctgcaaacgtgccaccacattctgcaccagaatatccggagctcacggttttgccatgccggtgatacaggcgtttgcgccggtgctgaaactacgcaaatggctgaatccggtgtctctggtgccgggctggcagtgcgaggggagtgcgttgctgttccgccggatggcgctggttgaactggcggagtatcgcgacattatcaaactgctggggcgtcagagcgtcggcccggatgcctccggctgggtgttccgcctgacgccgtatgtgatggtgggcgtcatgctgactatcgctactgcgctgccggtggtgaccgtcggttctccgctgccgcaactgggtgatttgatcaccttactgtatctctttgccatcgcgcgtttcttctttgccatttctggtctggataccggtagcccgtttaccgctatcggcgcgagccgtgaagcgatgcttggcgtgctggtcgaaccgatgctgctgcttggtctgtgggttgccgcacaggttgccggttccaccaacatcagcaacatcaccgacaccgtttatcactggccgctgagccagagcatcccgctggtactggcgctttgtgcctgtgcgttcgccacctttatcgaaatgggcaaactgccgttcgacctggcggaagacgcagccatgcatgcatgcaggtcgcctctagacgttcatcattaa

SEQ ID NO: 129242 - DNA, 1449 bp, Homo sapiens
atgtggcgggagacgaaacgttacgcggcggtactgctgcttacgccccattatagcgcatcgttactgcctgactggctaacctgtaccttcatcaaagtggtcatcacgtacccggggtttacctcaagtttggcctcaagcaatcccatatatccctgtgtagattccgccaaaacagtgtttccaaatgctccactccatgaccgggttcagtctgtgagaagaatgggcccatttaaaggcgttttccgaaaggtcttttccaatttagggtttgagtattccctttccacgtgggccaccatggggtccccaggttccctgggggtgtctccgttcggaaagactctttttgtagaatctgcaagtggatctttggacgctttgtggcctactgtggaaaaggaaatatcttcacataaaaactaccagaagcattctgagaaacaaatttatgatgtgcgcattgaactcacaggcctcaatgcactcccaaatatctctttgaacttttacaagaacagtgtttccaaactgctcaatcgaaagaaaggtttaattcatctcctccaaccctttattttgagactatgcgtgtctctgcataaaaaccgagaagaaaacctaggcattaccattcaggatgtagccatgagactcagtgcgctccccaatatcgtttgcagactctacaaaaagactgcttccgaagtgctcaaagaatggtccactcggtgggatgaatacacacatcacaaggaagtttctcagaaagctttgcctactctttctgtgaagatctacaaaaagaatatttgccaactgctcaatcaaaacaatggtccaaatagtgaaatgaatgctctcatcacaaagaagtctgtcaaatctgcaagtggatatttggagagcattgcggccctagtggaaaaggaaatatcttcatataaaaactacacagaggcattctataatcttctatgtgatgtatacagtcatgtcacagagatgaaactttcttcgattgagcagattggaaacactctttttgtagaatctgcaagtggagtttggagagctttgaggcctcgtggaaaagaggtaaacgatattttcattgatcaaattgcaaactctgttcttgtagattcttcaaaggatatttgtaagcgctttgaggcctgtggtgctatggtgaaaaaggaaaatcttcacataaaaaccagacagaagatttctgagaaacttcattggccatttggggcaccgaggttaacaagtttaacggggcccgaaaaaacaggaaaaggggaacaccccggcgccaaagcccgcggggaactttccggagcaccaccgttaattcacaccagaaaactttctttgatgagcaatgtggaaacactgttgttggagaaactgcagggatatacgggagctcattga

SEQ ID NO: 129243 - DNA, 969 bp, Homo sapiens
atgacctgtgcgcagcatgcaggccgctgccagctcagccaggacctgagccgcgagcagctggctctgctgaagctggtgctgggcggggcctgtacccacagctggccgtccccgacgccttcaacagcagccgaaggactcagaccagattttccacacgcaggccaagcagggcgccgtgctgcacccacctgcgtcttcgctggcagccccgaggtgctgcacgcacaggagctgaggccagcaactgcgacggaagccgaggggtggcaaggccgcaaaccgaaaaataaaaacaggtggtgccccgcttggcgggagaagaagccctgcctgggtggtagcgcgctaaagcaaaaacgccgacgacgtatacgtgctgcccaccgggcgaagggctgctgcccgcgggaagcacctgcggggaagcagacgatgccgacgtggcgcagtgctaatgcgaggcaacaggcacggggagagcacaagcgcaactgcaaagagctcaagcgctcgcgccaggcggcggctgttgcaggactgtccatgaatactggcggtgcggatgtaacaaacaaacaaaacctgaggaggctcaacccaccggcaaatggcctgccggtgacgcgtgcgcatgctgagcgggacgtgccggggctgacacgcgaggccccgccacggcccgcgtctacgctgcgaggtgggccttcggtgcgcgccgggctacgccggcgccagcgcgcgcccaacttgcgaatgcggggacaccaggtactgcccccaagacccgaaccagacatgaagccgacctgtcccgattatagcgcatcgttactgcctgactggctaacctgtaccttcacaaaaagtggtcatcacgtacccgggtttacctcaactttggtcggtgtgctggctttcaatgaccaacacaacaaagaaaaaataattgtttctgagacttag

SEQ ID NO: 129244 - DNA, 1293 bp, Homo sapiens
ctatgtgtatccctctttaaaagtacatcttgcaagttgtctagagggtacttctgagtgttggaagctaataacaacaacaaagtcctctctagcacacatttcagaaacagaaatcttgattgtaaatgctaactgtactacagaagattttagggtgatcatacaacatttctttgtcttctgatggtcaacgcagaatttaagtacaattttaaaacaatcatctcttgagatcttctgaagaaggattctgggcaatatggacattttacaatattcttccgatccatgagcataggatgtttttccatttatttgtgcatcttcaacttctttcatcagtgttttgcagttttccttgtagagatcttcaccttcttggttaaatgcattccacaagtagattccatcgaagacaccacttttggtcatccagaagaagcaactcctcatccattcagttttttcatgagactggagcaattcagtcacatcttcagctcctggcccgtgtccttcactgcacattaaagccacgtagtattcacttgacacatattgccctaggcggtgtagaattcttaagagaacgtcgaagacacgagatgtgaccacaaccagagaaaagagttgccgagacacgcgtttcagccgctcatccctggggccccgtaaagatgccctggtaaagagttttgtaaatcgatgaagttgatccttatatttaaatctcttcagtgtggagctagaatcatgggcagtttttaaactttcctccgtttgtgtgttcctgtttgctgcgacactcttcacagtaatacttgtactcactgcatgggtttctgtgttgctgaaagcccaaattgaggtaaaccccgggtacgtgatgaccacttttgatgaaggtacaggtagccagtcaggcagtaacgatgcgctataatcggggggtctccaaggtagcaacgccattgcggcatggcgtaacatcggtgggtcgcgaagccgggttacagcaaatccacacaattccacatagaatcttgttcccgtgtgtatttgtagctcatggtcatcctgattccgatagcgaacctccagacttgatgaaaacgcccttatttcgaatttgtcattctttaatgctttcttcccgtaactcatcacaatccgctttgtgtcgctacgactcagtttctgggcgccgcgcctgcgctggtctacgtcacaccccgctgtgtagctatagtcgcgcgaaggtccgggcttctggctgcgtgaggcccccat

SEQ ID NO: 129245 - DNA, 1485 bp, Homo sapiens
atgcctgaccgaccgaccgcccgcgcccgcgcgcgctggcgggcgcgcgcggacccccgggccgggccccgcgggtgccaccccccgcggggggcccccggccgagccagtacgggcacggggggaggcccaacccccgacatggctggcatgatgcgttttgccccaacaatacgccataccgcgacacgacccctggacagccgctaccttacccctgggccccttgatatgcgaggggactcaggattccgaaccgggcggggctccgacgtgggtagcctgaaaccgactgatacccgtagaaatggtaagatttatcttaatggtagtaagtgttttattaccagcagcgcctacaccccgtacatcgtggtgatggcgcgcgacggggcttctccggacgaacctgtctacaccgaatggtttgttgatatgagcaaaccgggcatcaaagtgaccaaacttgaaaagctcggtctgcgtatggatagctgctgtgaaatcacctttgacgacgtggaactggacgagaaagacatgttcggtcgggaaggtaacggctttaaccgcgtcaaagaagagttcgaccatgaacgtttcctggtagccctcaccaactacggtacggcgatgtgcgcctttgaagatgcggcgcgctacgccaatcagcgcgtgcagtttggcgaggctattggtcgtttccagttgattcaggaaaaattcgcccacatggcgatcaaattaaactccatgaaaaacatgctgtatgaagcagcgtggaaagcagacaacggcaccatcacctctggcgatgcagcgatgtgcaaatacttctgcgccaatgcggcatttgaagttgtggatagcgcaatgcaggtgctgggcggtgtcgggattgcgggcaaccaccgcatcagccgcttctggcgtgatctgcgtgtagaccgcgtctccgggggatctgacgaaatgcagatcctgacgctgggtcgtgcggagcaaataatggatcatctacccatgccgaaattcgggccgttggccggattgcgcgttgtcttctccggtatcgaaatcgccggaccgtttgccgggcaaatgttcgcagaatggggcgcggaagttatctggatcgagaacgtcgcctgggccgacaccattcgcgttcaaccgaactacccgcaactctcccgccgcaatttgcacgcgctgtcgttaaatattttcaaagatgaaggccgcgaagcgtttctgaaattaatggaaaccaccgatatcttcatcgaagccagtaaaggtccggcctttgcccgtcgtggcattaccgatgaagtactgtggcagcacaacccgaaactggttatcgctcacctgtccggttttggtcagtacggcaccgaggagtacaccaatcttccggcctataacactatcgcccaggcctttagtggttacctgattggtgcctgcactgctaactga

SEQ ID NO: 129246 - DNA, 4599 bp, Homo sapiens
tcattttagcaaacgctttctggtctgccgcagtgggcatcggctgattgcgtagcagggccactggtatctgccggtatcaccgacattaacattgaagacgacccaggcattcacgtccgccaagagaacaaaaagaaacgaaacacataacacagctggatccgctgacgtgtctgagagcctgagctccatgggcctggagagaccatgtcccgtatccatcttcctccggatggaattcttatcacgttcacccgctggtcggtgccagccactaggccgtgaactctctctttccagccgatctagaagagatggcgtcctcagcctttttttcgtcttgcgtgcgttccctcgccttcgatcacttgtctcttgttcctctggccggtgtattccccctttgtacttcctcgtgggggattcccccgggtttctcaacctgcgcttattgaggatgaagcctgaataaccgagttcgtgcgggaacccccggatcgcacccgacggtactgcggcaggtcctgaaatactaaggccaagccgatgtggggaccccattacttcggcttttccgacaggcttctctactgtgagcgccgggtcccccaccccaacaggtgagtaattataacgtaactccggtagaatcgagctcggtacctctcgttcatccactctccgatcatctcttctttcgccgttgcgaagcgtgaagagtacggcgatatggcagaacagaaatgctcgaagatcctggcattcgcacacatcatgatggtgctgaccgtaatgttcttcgtcttcagctgtgtactgagcctgactccggcagacctggctgcggctaaagagcagaacatctcgattctgtcttacctggctaaccactttaacgcaccggttatcgcgtggatggctccgattatcgcgattatcgctatcaccaaatccttcctcggtcactacctgggcgcacgtgaaggcttcaacggtatggtgattaaatctctgcgtggtaaaggtaagtctatcgaaatcaacaagctgaaccgtatcactgcgctgttcatgctggtaacgacctggattgttgccaccctgaacccgagcatcctgggtatgattgaaaccctgggcggtccaatcatcgcgatgatcctgttcctgatgccgatgtacgcaattcagaaagtaccggcaatgcgtaagtacagcggtcacatcagcaacgtattcgttgtcgtgatgggtctgattgcaatctccgcaatcttctactctctgttcagctaagtcctttcgcgccgctttcgggcggcgcttcctccgttttaacgcgatgtatttcctatgattagcgtattcgatattttcaaaatcggcattgggccttccagttctcataccgttggaccatgaagggggtaacattacggcgatctgttgccgtatgttaagagtgacccgtgtgtgcgtgtcgtcgcctcgacgggagccccctgttgctctttggtgtgggctccgggaccgggttttccccgttacgggggctcgggctcggccgctatgggcctgttggttccgcttcagtggttccggggagatttttttgttttttttggtacgtcgtttgtttatcccacgtcgctttctctgtccaaccgcagtggctttcacgtcagggacagtacgcgtctgctctacccatgtgcgtacacttgaccgtgaattccgaaggcacctgcgttgcttagaccaagaatacacagcgcggctggctgtacggtacgtaagctgcaacggtagcgcattgagaccatatgattgctgcagggggccgaaaacacgattggcatccaaattagagaaaactttcatgccaggtgcgtttcgactgctaactgacttacagccatcgtatagcgccgattttgtgtttatcggaggacgtcgcggggccggggaccgcagtgttaaagtgcgtgcaaagacatgggcacgagcacgcgtggttgaaggagagtcgccttgatgggttgtcatgggaggatggaagacgtctgccagatcagaaggaacgatactgatggtaaggtcagggggtggtaatgcgtggagtgggatgctcgtgtacggagtcccccgttcaccatttgcgtaggaggatgcgttcgtcgagtcgcacccgttcaccatttgcatacgaagatgcgttcgtcgagtggcaccggtgcacccccttacacccgtgctgcccacaccccgggcccgcgctgatgccggcggagctaggaccgacgaccctaaggagttagccacgacccgacgatacactgctcggttgttgacatatagacagtaactaagtgtgatgaaactgaaaaggatagtaatacgtaacgggcagactgaaatacgggcgtagcgtactagtactaaagaggacattgggctaaaaggagaaaggtaaggttgtatgcatgcagtacgggtgcaacaagagcgccttagactagcatgcgttacattacttgtggatatataagaaaaggctttataaaaaccaccggggtgtttaaggcagttaatgacgcggggcgaaatgagcgggaggggtaaaaacgcgataactgacatacggggagtaaaagaatagtggaagcgtaatgaacgaacaaccaaaagaacccggaataccgaacagggacgatatattaaccggaaagccgagaacttggtgaccacgggttttgatatagtacggggagtgggggggggggggggagctgccctcaccaccactgtgttacagcatttgcaagtatgccgcctacgcctgccgcggatgtaacggtttgccgccaccgccaactgcacgctggcgggcaaggtgggatacgcgaatgtgtcggattgaacgggcggctccgcggccgaggtggagccggctgcgcatccattataacttgtcaaagggatggggtaccacgggtatgtttgcccgaacctacgcgtcgggggtgagaatatggagggtttaaagcccgggagccttgccaaaatgttcaggtgtcttgtgataactcggagagacacagcgggtacttccgggatcatcaccagaatgtattgcgcggggtccacaggtggcccacggtgtagatttgagatgttgctatgttcataaatgaacttgagtccggaattccgacgctgaatgatgcctccctggcggacacggagggccttccgaggggtaacactaagaaaaataaagtccataaagggggccttcaggagattgctacggtccataccaagagccagtgaacggggacttatggggacaataaagtcgacttgaacccgagagatggtccaccagagattgcacgaaaaaaatattgaaaagctaattaagctattacggggatatcgaggtatggggggagtctttccagcacgataagaaatgaagaccacgggcaaccgggtataagtcacttcgatggtcatatgaaaatccttgggcaaacttttgctaatttccaaatgtgccgtgttgcgaagaggaatactcggcacgttatctttgccagggaatcccgggcttgaccggtccaggtcgggttgccgcagggggcccccgtaccggggccgtggtctcgtcatgacctccggttttgggtggccgggtgcatacagttggacgttgttaacgttctgagtcgagtggaagtgtagggtactagcagtgagctgaatgttggggtgctcggggactaaaaaaatatatataaaataacacgctggccgtgagcgtggccgcgtgcgtggtcgcactgtacttaaaggcatcgtatagcgccgattttgagcagggacggcagggtgccgctggtgccgggtctctgggcctgagagaaacgccagtccgtgttgggcggggcttgcgatctgatcttcaatcttcacgcgaccataacgaacaaagaatggtgtaccgactttcagcccggcctgtttcaggcccgccatcagcggtggcaggatctcttcgtagttcacggtgatcgcatcagttgacaggccatcagaaataacgacctgtacgtccggattggcaacacactgcgctttcagcgcttcaacagcttctgcacacaggcggcggcccatatccgggcgagtcaggtagagatttttgtcgctaatttcagagcgtacttccagcaagccctgcgctttcacccactcttccggcacttctttcagtacggtatctttcgaacgagagtgatcggccaggaaacgcagcagcgcctgcgtacgtggacgcggaccggcacgaccggtacaaacgcgggccacggtgctgcggcgcagttctgttaatacgtctgcgcgatgcggattttcaacaccaatccacgcttttgcttcagcggaacctaaatccagcgcacagctttccgaggtcaccggtgccgcacagttggtggtggcgcactttgcttctgacggcgcgggggccgcttgtcccattgacgccatcacgctgcgtacaatttcttcaatctgtttttgatccat

SEQ ID NO: 129247 - DNA, 2382 bp, Homo sapiens
ttatgccccaatataaagttggctagattttaaaattggaatttgtctttgtaataaatagacgatctctagctcggtacccatagcttcggcaggcttgccaatcaatcgggcgattaacagactcagtacaccctgatggctgacgactaaaatattctgatagtgctgaaattcactaagccttgcgataaagcgttccacacgttgcgaaaatgcctgaaatccttcaccgttcgtggggattgcatgctgccagtcattgcaccacgcgctatagttttcggcatcttcttgcatgaggtcgcgatgatgtcgcatctcccagtcgccaaaaaacatttcgttgagttcaggtatgatttgcacggggagctggcggtcactgagaaccagtcgcgcggtatgctgtgcccgttccagttcactgcataaaaccagatcaaaggaaacaccatgtagcagcgtatgcagattttgcgcttgctcaataccgcgcgcggtcaggggggtgggcgcatgaccgctgtaaagaccatcgatattcgcttgcgtttcaccatgacgaattaaccacagtcgcatcatgccccagacgaacgctaaaaatgcaaagccaaacccagcccaggtaatgcgcggagtaatatcaagacgcagacgggccatgctgttttcgaacagcgcgataaccaggacgccgaccaccagttttacgatggcaatcaccagcgccagcagcagtccaccggcggtgaaggtttccatttgtccccacggaataaacaccccgacgaacatctgcaacaccaccagctgtttcaggctgataccccatttcatgacgccaaagccgctgccgctgtattcagagagcgggccttcctgcagctcctgctcggcttccgccaggtcgaacggcagtttgcccatttcgataaaggtggcgaacgcacaggcacaaagcgccagtaccagcgggatgctctggctcagcggccagtgataaacggtgtcggtgatgttgctgatgttggtggaaccggcaacctgtgcggcaacccacagaccaagcagcagcatcggttcgaccagcacgccaagcatcgcttcacgggtcgcgccgatagcggtaaacgggctaccggtatccagaccagaaatggcaaagaagaaacgcgcgatggcaaagagatacagtaaggaatcagctcggtacggtacgccaaatttatcggtgactttgccaaagccatgcgcccagaaagtttcctgccaggccatttcgatttttccgttagcggcaagattgtcaaaccagcgttttccttcttcgacctgttgcgaatcgagcaccagcgtaaagccggagtagctggcttttcctgacggcatggcatcgctcatcatgatgtcgcttccggcaatgcgcacattggcgtgggcgatggcggtatcgggaaattgcattccggaagggcagttctcggcgctgtcctgcgctgattttggcatttcgccgaagctgattttatagagcagttccgcgcccaacgtacctggccatgggcatatcctgtccgcgtgctgatgacttacctgaagccggtactgccgaaactgaccgagcgtgcagaagcattcctcaatacggaactgacctgggatggtatccagcaaccgctgctgggccacaaagtgaatccgttcaaggcgctgtataaccgcatcgatatgaggcaggttgaagcactggtggaagcctctaaagaagaagtaaaagccgctgccgcgccggtaactggcccgctggcagatgatccgattcaggaaaccatcacctttgacgacttcgctaaagttgacctgcgcgtggcgttttttggacttcaggtggctggagtgagccctgctcccccctggctccttcccagcctgggcatccttgagttccaaggcctcattcagctctcggaacatctcgaagcgctcacgcccacggatctgaagggtgaaatattctccatccagtggtttcttctttgcctcaaagctgttccgtcccagtagattaccactggagtcttccagtgtgatgatggtgaggatgggcctccggttcatgccgcccatgcaggaactgttacacatgtagttgtagtggatggtggtacagtcagagccaacctcaggcggctcatagggcaccaccacactatgtcgaaaagtgtttctgtcatccaaatactccacacgcaaatttccttccactcggataagatgctgaggaggggccagaccatcgctatctgagcagcgctcatggtggggccagcgcctcacaacctccgtcatgtgctgtgactgcttgtagatggccat

SEQ ID NO: 129248 - DNA, 3132 bp, Homo sapiens
atgatagagcatccccgcaggcgagacaactaccgacaaagcggccccccagttgctgataagcccacgacaaaaggcgagccgctgatcagcgatattgtttccgacgcgcaacaagctaatttactgatccctgtggatgaaacaccgcctgtcatcaacgacgaacaatccacatcaacaccgttaaccaccgctcagacgatggcgttggctgcggtggctgacaaaaatacgacaaaagacgaaaaagcggatgatctgaatgaagacgtcaccgcaagcctgagcgccctttttgcgatgttgccgggttttgacaatacgcccaaagtgactgatgcgccgtcaaccgtgttaccgacagagaaaccaacgctcttcacaaaactgacttctgagcaactcacaacagcacagcctgatgacgcccccggcacaccagctcagccattaacaccgctggtagcagaagcccagagtaaagcggaagtcatcagcacaccttcaccgccttccatctctggggtgacccggagtaaaatgcgccaacgagaatggctggttttgccgccagaggatagcctcgttatccgccggagtaacaaaaccagccagcttcccgctttcaacgttccgctaagtgcggcaaaggcagcggcatcaaagccgtggcgggcgtcgaataccgcatgccggaactcgcgcccaagtaaagtttgtagtgccgagggagaacagtggttttcagcatctggccgcggcgaaatccacagccagtcgccagcgcgtgatatggcccagatgtgcaaactggcagcagaagggcattttgccgaggcacgcgttattaatcagcgtctgatgccattacacaacaaactatttgtcgaacccaatccaatcccggtgaaatgggcatgtaaggaactgggtcttgtggcgaccgatacgctgcgcctgccaatgacaccaatcaccgacagtggtcgtgagacggtcagtggtgatgaaacctacctggaagcggcaccgcttgcggagcttcatgccccggctggaatgattttgccggtgacctccggtgattatgcaatcccggtgaccaacggtagtggtgctgtcggttcgtactcagcgatcaccgaaccgggcgcgggctccgacgtgggtagcctgaaaacgacttatacccgtagaaatggtaagatttatcttaatggtagtaagtgttttattaccagcagcgcctacaccccgtacatcgtggtgatggcgcgcgacggggcttctccggacaaacctgtctacaccgaatggtttgttgatatgagcaaaccgggcatcaaagtgaccaaacttgaaaagctcggtctgcgtatggatagctgctgtgaaatcacctttgacgacgtggaactggacgagaaagacatgttcggtcgggaaggtaacggctttaaccgcgtcaaagaagagttcgaccatgaacgtttcctggtagccctcaccaactacggtacggcgatgtgcgcctttgaagatgcggcgcgctacgccaatcagcgcgtgcagtttggcgaggctattggtcgtttccagttgattcaggaaaaattcgcccacatggcgatcaaattaaactccatgaaaaacatgctgtatgaagcagcgtggaaagcagacaacggcaccatcacctctggcgatgcagcgatgtgcaaatacttctgcgccaatgcggcatttgaaataagagggcactttaaatttcgccatattttgttcgcagaagcggaaaaattcctcttcgctcaatgtttcaccttcattcagcaccacaaatgctttgatggcttcatcgcgaatcgaatctttaatacccacaaccacgatgtcctgaattttcgggtgcgcggcgataatattttccagctccacgcaggagacattctcgccgccacgtttaatcatattgcagcggcgatcgacgaaataaaaaaagtcctattcgtcgcggtatccggtatcgcgcgagtcgtcgatatcgatgacgcggtagcacgtcatctgcacggtgtgcggcaggggattaatctaccgttacggctggaaggtgaaattgtcggcgtaattggcctgacaggtgaaccagagaatctgcgtaaatatggcgaactggtctgcatgacgcagtttaaagataaatctgcgcgttatgccgagaacatcaacgctggtctgtttgactatccggtgctgatggcagcggacatcctgctgtatcaaactaatctggtaccgttcgggaaagttgtttttctaaataacaacagatacaactgtgatatctgtctggaactgcgcgacctgctgattgcgctggaaagtcgtctgcatcaaaagcataaactggatgctgctgcacaccttcagtatgagcaagctcgcgataaagtcattaagaaaatggcagaaaacatcccagaaattctggttgatgagcttaaaaatgccgatattaatcgtcgggttaacacgctggaacttaccgataatcaaggcgaaaatcttaccttcgtattaacgctacatgacggtagcaaatgtgagttagtcgtcaatgagttgcagattgaaatgctggcgcgagcaatcattcatgcaattaataatgcggaaatgcgtgaactggcattacgtattacctcactgttagatttcctgccgttatacgacgttgactgccaggacaatggcaatctggaatatgacacctattcccaaccggaatggaaacataacttgttcgaccattatctggcggtgctttaccgctttaaagatgaaagtggcaaagaacaatttagcggcgcagtggtgaaaacgcgtgaagcaacgccggccaagcacacccacgggccgacccgcggaacggtcatgaccaggcggcaccccgtaggcaccccgtcgcaggaccacagccgggcacacctccgagggcgtgggccgtggacgcccacggggtatcacacgtgcggggaacacagaaaaggggacaaccggggggagacagaacaggtctgtctctctgcgctggtggaggcagttcctaaggcagaaacagtgtga

SEQ ID NO: 129249 - DNA, 1905 bp, Homo sapiens
atgctggcgattctgaccggtaacgttggtattaacggaggcaacagcggcgcgcgtgaaggttcatacagcttaccgtttgtccgtatgccgaccttggaaaacccgatccagaccagcatttcgatgtttatgtggaccgatgccattgaacgtggcccggaaatgacggcgctgcgtgatggtgtacgcgggaaagataagctggatgtgccgatcaaaatgatctggaactatgccggtaactgcctgattaaccagcattctgaaatcaaccgtacccatgaaatccttcaggatgataagaagtgcgagctgattgtggttatcgactgccacatgacctcatcggcgaaatatgctgacatcctgctgcctgactgcaccgcttccgaacagatggactttgcgctggatgcatcctgcgggaatatgtcttacgtgattttcaacgatcaggtgattaaaccgcgctttgaatgtaagaccatctatgaaatgaccagcgaactggcaaaacctggggttaaccacattcagaaggcgcccagaaaattagtagaccaccaagcagggaaccaccgcatttggcccctacttggaccaacaagcccctacgctgccacaacgacgcccaaattccggcaccgttacatttccacaacggccggagaaaagacttcacaagaagcacaattaacagagtggttttcagcaaggccaccaaccatctctcataagccagcactgcctcttcagcttaccctcatcactacagggcacgaggacgaagatgatagtgagatgtggtcactcaccgccttgatgggttgtcatgggaggatggaagacgtctgccagatcagaaggaacgatactgatggtaaggtagtgctgatcgcggtgattctgggcatggttgtttatggcgtatttgaaggtgaaggcgctggtacgctggcgagcactcgtccattctggtctggcgatgcgcatgttatcccgatgattaccggggcgacaatcctgtgcttctcctttaccggctttgacggcatcagcaacctgtcggaagaaaccaaagatgcagagcgcgtgatcccgcgtgcgattttcctgaccgcgctgatcggcggcatgatcttcatctttgcaacttacttcctgcagctgtacttcccggatatctctcgctttaaagatccggatgcgtcacagcctgaaatcatgctgtacgttgcgggtaaagcgttccaggttggcgcgctgatcttctccaccattaccgtactggcgtccggtatggcggcgcatgcaggcgtagcgcgtctgatgtacgtaatgggtcgtgacggcgtattcccgaaaagcttcttcggttatgtacacccgaaatggcgtactccggcgatgaacatcatcctggttggcgcgattgccctgctggcaatcaacttcgacctggtaatggcaacggcgctgattaactttggtgcgctggtggcgttcactttcgttaacctgtcggtcatctcgcagttctggatccgtgagaagcgtaacaagacgctgaaagatcacttccagtatctgttcctgccgatgtgtggtgcgctgaccgttggtgcgctgtgggttaacctggaagaaagctcaatggttctgggtctgatctgggctgctatcggtctgatttacctggcttgcgtcaccaagagcttccgtaatccggttccgcagtacgaagacagacctataaaatgctgccactggactataactgactcgctgctttactgcttccctgatctgactactgacttctgctactcctcgctgctcctgctgctcctggggctgctgctgctcctgctgaggcttctgctactgctacaactaccctga

SEQ ID NO: 129250 - DNA, 1962 bp, Homo sapiens
atgactgggcgctaccacgaggttgtattgccagggcggggtgctggctatggccgttttggcgtacggggccgaacgaaggacaatagccggtacaaccggccatgccctggaacggcacccaggaacgcccgccggcaccaaggaggcgaaccgggaaagcgagccgaacaaagactgcccttaacagccttgagaaggccggatagcgaaaacaatggtgggcaagagaaagtacgtaagaagaggtgcccggctacagtgttgaggcgcatgaccgctgatatgcacgggtccacagcgggcgatcatccatacgaagaagcatacccgtttccatttgtatcagatcatccatacgaggatgcgtacccgttgtccattgtatcagatcatccatacgaagaagcatacccgttgaccatttgtatcagatcatccatacgaagaagcatacccgttgtccatttgtatcagatcatccatacgaagaagcccccgattatagcgcatcgttactgcctgactggctacctgtaccttcatcaaaagtggtcatcacgtacccggggtttacctcaatttgtggatactatacgacttctagcaaggcttgcttttcggtgtttgcttggtgtttcgttacatccgatgttccgggccgtttcagtgacgaggacgaagatgatagtgagatgtggtcactcaccgccttgatgggtgtcatgggaggatggaagacgtctgccagatcagaagtatcgatactgtgttccacgtcgtcaaaggtgattcacagcagctatccatacgcagaccgagcttttcaagtttggtcacttgatgcccggtttgctcatatcaacaaaccattcggtgtagacaggttttccggagaagccccgtcgcgcgccatcaccacgatgtacggggtgaaggtgttgaaccgcccggcaactggtacagcacataggttggtgcccccagacgtcccagtccatccacacggcggcgagagtaacaaaccccgcgtccagaccaccgtctcttcagggatcagcagactgtcgatacccatatccgccagtgctttgcaaaacgttccggacaagacacacgacatcagcaacatcaccgacaccgtttatcactgtccgctgagccagagctcccgctggtactggcgctttgtgcctgtgcgttcgccacctttatcgaatgggcaaactgccgttcgacctggcggaagccgagcaggagctgcaggaggcccgctctctgaatacagcggcagcggctttggcgtcatgaaatggaccaaagatcagctgactgtcaccgtaaaggtgcaccacctgccggaagtggtggagtttctttactacaaacaggggggctggctgtcggtgctgtttggtaacgacgaacgcaaactgaatggtcactacgccgtttactacgtgctgtcgagggagaagggcactaagtgttggattacgacagcatggattatcgtcagcgtccgcaccgaccaacgatgctgaaacctacgagttcatcaacgaactgggcgcaagaaaaacaaccgtcgtgccgattggtccgctgcacgtcacttctgagaaccgggccacttacgtctgttcgtcgatggcgaaaacattatcgaagccaataacgaatgaatacaccgtacacagtgctgaaagcagcaaccggccacgtccaaaacagcatggtagtaagttccgcatgaacgaagacaccaacgcaccgctagcgcggacccgaagaacgggcaagccaaaggaacgtaatcggtataggttgtgttgctcaaccgaaccacacactcaccgaataaccaccgcgacgtacacacaaggaataagcacacaacagagcagcgcaacacaccggaccaacaccacgcactggctactgactacagccatcgtatag

SEQ ID NO: 129251 - DNA, 1396 bp, Homo sapiens
  misc_feature (1)...(1396): n = a,t,c or g
gcgcatttgaacaggataaagccgtagagtgcgattgctgtgaacaacagacgtcagtttattactcgggtcccttttattgcgttgatgaagttgaacatctctgtccgtggtgtattgcggacggttctgctgctgaaaagtttgcaggtagttttcaggatgatgccagcatagaaggtgttgaatttgagtatgatgaagaggacgaatttgccggtattaagaacacatatcctgatgaaatgctgaaagagttggttgaacgcacgccaggttatcatggatggcagcaggaattctggctcgcgcattgtggcgatttctgtgtttttatcggctatgtgggctggaatgatataaaagatcgcctcgatgaatttgccaaccttgaagaagattgtgagaatttcggtattagaaattctgatctagctaaatgcctgcaaaagggtggtcattgtcagggttatctcttccgctgtctccactgcggcaagctgagactcacctggcacggcttcaaaaacatcgataacgagcacatgtatcttgacccgatcaaagtcaccctgctgactccggggatggaaaaagacggcaccatgagcgactttggtattccggccagcatcgtggcgaaatacctcgacgaacatggcatcgttgttgagaaaaccggtccgtataacctgctgttcctgttcagcatcggtatcgataagaccaaagcactgagcctgctgcgtgctctgactgactttaaacgtgcgttcgacctgaacctgcgtgtgaaaaacatgctgccgtctctgtatcgtgaagatcctgaattctatgaaaacatgcgtattcaggaactggctcagaatatccacaaactgattgttcaccacaatctgccggatctgatgtatcgcgcatttgaagtgctgccgncgatggtaatgactccgtatgctgcattccagaaagagctgcacggtatgaccgaagaagtttccctcgacgaaatggtaggtcgtattaacgccaatatgatccttccgtacccgccgggagttcctctggtaatgccgggtgaaatgatcaccgaagaaacccgtccggttctggagttcctgcagatgctgtgtgaaatcggcgctcactatccgggctttgaaaccgatattcacggtgcataccgtcaggctgatggccgctataccgttaagcttggttttgatgataaccatgccatcagcctgttcagcgcatatgcttctctggtttacgttacccctattctcggcggctggcttgccgaccgcctgctcggcaaccgcactgcagtgattgccggcgctttagagcacatccacaacggcacctggaaatccaagctacttggaag

SEQ ID NO: 129252 - DNA, 1399 bp, Homo sapiens
atggcgtccgacactctgtttatgccagcaagaatcgttggtcatcgatcgactggaattgttaccacgcgcgctcgcgctcgctatttacgcctacgcggtccagctattgatcgtttgtcgcagtgcctcgtgaggataagagaaggaaaaataataaacccgtcccaaggctctccggaaaatcgtttccggttgactaacattgtacggatagccaccgtcggtgacgggggttcgcaaaaaccaagcttgaccgacgacttaacccgtcgactgtgtagtataatagatagtgatcctgtggacaaagtggtgttgggtgcacacccagcggttgcaacaccaattgcagtggtagagacagcaagttttgggcgctttgcccctgagactgtacaacaaatcaccgatgcacccgtccacggcgcccagggaaaagctgtctaccggtggatcagcgatgttccgattaggccccaatctccgttggtcctgtttaagactcttgggcggaaacccaagaatcgaaaatccacgttcagactcgaactgggttctctgctggatacaggtggtccacacaaagaagcagaccagtatatcgctcgcgtctttaacgcagaccgcagctacatggtgaccaacggtacttccactgcgaacaaaattgttggtatgtactctgctccagcaggcagcaccattctgattgaccgtaactgccacaaatcgctgacccacctgatgatgatgagcgatgttacgccaatctatttccgcccgacccgtaacgcttacggtattcttggtggtatcccacagagtgaattccagcacgctaccattgctaagcgcgtgaaagaaacaccaaacgcaacctggccggtacatgcttgtaattaccaactctacctatgatggtctgctgtacaacgccgacttcatcaagaaaacactggatgtgaaatccatccactttgactccgcgtgggtgccttacaccaacttctcaccgatttacgaaggtaaatgcggtatgagcggtgcccgtgtagaagggaaagtgatttacgaaacccagtccactcacaaactgctggcggcgttctctcaggcttccatgatccacgttaaaggtgacgtaaacgaagaaacctttaacgaagcttacatgatgcacaccgccgcttctccgcactacggtatcgtggcgtccactgaaaccgctgcggcgatgatgaaaggcaatgcaggtaagcgtctgatcaacggttctattgaacgtgcgatcaaattccgtaaagagatcaaacgtctgagaacggaatctgatggctggttctttgataatgcagccggatatatcgatacgatcacgctgggcggaccgagctga

SEQ ID NO: 129253 - DNA, 846 bp, Homo sapiens
atgatcggctatctcgcggctgtggatatggaaaaacagcaaatctccccggcgcaggtcgttgttcgccacaatcgttgcccggcgatagtggtacatctcattggccgtgcgcgggagcttagcctcaaggatcttgttgtaggcataaaaaaccaacccgctacagtcaaagcctttatcaggccgcgtaccgccccagacgtaaggcttgccaagctgctgctccaggcggtgaatcgccacttcgaaggcgtcgtcatcacgacgctggcccgttagtttgttggggtgaaaagtgccggtaatcggttgaaaaccatagatgagctggcaaatgaatcccgttcatccgttggcctgacgcaggccgcgttgaaaacgctggaatcaagcggagcgatacggattgaacgccgtgggcgcaatggcagttatctggtcgagatggataacaaagcattgctgactcatgtggatatcaacaacgtggtatgtgcaatgcccttgccctatacccgtttgtacgaaggcctggcgagcggattgaaagcccagtttgatggcattcctttttactatgcgcacatgcgtggcgcggatattcgcgtggagtgtctgcttaatggcgtgtatgacatggcggtggtttcgcgactagcggcggaaagttatctcccgcaaaaaggcttatgcctcgcgctgtagttggggccgcccccctacgttggcgagataccagctttagcaagtaaaggcgaagtcagagtacgtgaagcgcgtggggcatgtatagccgttcggtgattctccgggtgccgagctcgcaatcgtattcagtgtctt

SEQ ID NO: 129254 - DNA, 3443 bp, Homo sapiens
agtcaggggtcacggcggcgtaggctgtggcgggaaacgctgtttgaagcgggatggatggcaagcggcggccaggcccagggcccggggtgcccccaaagcgggcccgtgggggcctctgggatgatgatgatgcaccttggccatcccaattcgaggaggacctggcactgatggaggagatggaggcagaacacaggctgcaggagcaggaggaggaggagctgcagtcagtcctggagggggttgcagacgggcaggtcccaccatcagccatagatcctcgctggcttcggcccacaccaccagcgctggacccccagacagagcccctcatcttccaacagttggagattgaccattatgtgggcccagcgcagcctgtgcctggggggcccccaccatcccgcggctccgtgcctgtgctccgcgccttcggggtcaccgatgaggggttctctgtctgctgccacatccacggcttcgctccctacttctacaccccagcgccccctggtttcgggcccgagcacatgggtgacctgcaacgggagctgaacttggccatcagccgggacagtcgcggggggagggagctgactgggccggccgtgctggctgtggaactgtgctcccgagagagcatgtttgggtaccacgggcacggcccctccccgttcctgcgcatcaccgtggcgctgccgcgcctcgtggccccggcccgccgtctcctggaacagggcatccgtgtggcaggcctgggcacgcccagcttcgcgccctacgaggccaacgtcgactttgagatccggttcatggtggacacggacatcgtcggctgcaactggctggagctcccagctgggaaatacgccctgaggctgaaggagaaggctacgcagtgccagctggaggcggacgtgctgtggtctgacgtggtcagtcacccaccggaagggccatggcagcgcattgcgcccttgcgcgtgctcagcttcgatatcgagtgcgccggccgcaaaggcatcttccctgagcctgagcgggaccctgtcatccagatctgctcgctgggcctgcgctggggggagccggagcccttcctacgcctggcgctcaccctgcggccctgtgcccccatcctgggtgccaaggtgcagagctacgagaaggaggaggacctgctgcaggcctggtccaccttcatccgtatcatggaccccgacgtgatcaccggttacaacatccagaacttcgaccttccgtacctcatctctcgggcccagaccctcaaggtacaaacattccctttcctgggccgtgtggccggcctttgctccaacatccgggactcttcattccagtccaagcagacgggccggcgggacaccaaggttgtcagcatggtgggccgcgtgcagatggacatgctgcaggtgctgctgcgggagtacaagctccgctcccacacgctcaatgccgtgagcttccacttcctgggcgagcagaaggaggacgtgcagcacagcatcatcaccgacctgcagaatgggaacgaccagacccgccgccgcctggctgtgtactgcctgaaggatgcctacctgccactgcggctgctggagcggctcatggtgctggtgaacgccgtggagatggcgagggtcactggcgtgcccctcagctacctgctcagtcgtggccagcaggtcaaagtcgtatcccagctgttgcggcaggccatgcacgaggggctgctgatgcccgtggtgaagtcagagggcggcgaggactacacgggagccactgtcatcgagcccctcaaagggtactacgacgtccccatcgccaccctggacttctcctcgctgtacccgtccatcatgatggcccacaacctgtgttacaccacgctccttcggcccgggactgcacagaaactgggcctgactgaggatcagttcatcaggacccccaccggggacgagtttgtgaagacctcagtgcggaaggggctgctgccccagatcctggagaacctgctcagtgcccggaagagggccaaggccgagctggccaaggagacagaccccctccggcgccaggtcctggatggacggcagctggcgctgaaggtgagcgccaactccgtatacggcttcactggcgcccaggtgggcaagttgccgtgcctggagatctcacagagcgtcacggggttcggacgtcagatgatcgagaaaaccaagcagctggtggagtctaagtacacagtggagaatggctacagcaccagtgccaaggtggtgtatggtgacactgactccgtcatgtgccgattcggcgtgtcctcggtggctgaggcgatggccctggggcgggaggccgcggactgggtgtcaggtcacttcccgtcgcccatccggctggagtttgagaaggtctacttcccatacctgcttatcagcaagaagcgctacgcgggcctgctcttctcctcccggcccgacgcccacgaccgcatggactgcaagggcctggaggccgtgcgcagggacaactgccccctcgtggccaacctggtcactgcctcactgcgccgcctgctcatcgaccgagaccctgagggcgcggtggctcacgcacaggacgtcatctcggacctgctgtgcaaccgcatcgatatctcccagctggtcatcaccaaggagctgacccgcgcggcctccgactatgccggcaagcaggcccacgtggagctggccgagaggatgaggaagcgggaccccgggagtgcgcccagcctgggcgaccgcgtcccctacgtgatcatcagtgccgccaagggtgtggccgcctacatgaagtcggaggacccgctgttcgtgctggagcacagcctgcccattgacacgcagtactacctggagcagcagctggccaagcccctcctgcgcatcttcgagcccatcctgggcgagggccgtgccgaggctgtgctactgcggggggaccacacgcgctgcaagacggtgctcacgggcaaggtgggcggcctcctggccttcgccaaacgccgcaactgctgcattggctgccgcacagtgctcagccaccagggagccgtgtgtgagttctgccagccccgggagtctgagctgtatcagaaggaggtatcccatctgaatgccctggaggagcgcttctcgcgcctctggacgcagtgccagcgctgccagggcagcctgcacgaggacgtcatctgcaccagccgggactgccccatcttctacatgcgcaagaaggtgcggaaggacctggaagaccaggagcagctcctgcggcgcttcggaccccctggacctgaggcctggtgaccttgcaagcatcccatggggcgggggcgggaccagggagaattaataaagttctggacttttgct

SEQ ID NO: 129255 - DNA, 684 bp, Homo sapiens
  misc_feature (1)...(684): n = a,t,c or g
atgatcacacttgctggcccatgtctgttaaggcccgaggaccgctnagaccctggggcagacagacgtggttcagtctggggactcagcgatcttcgaaatacctataatgcgttatacttaacacattcgggacgcctcagtgaatgccccacaccagcaaacgaggaaaaagagccgaccaatcacaaccgaacgctaacaaaccaaacacagaaagagaaaaaaaagacaagaacgaaggactgcaccacaaggaacaagaacagcacacgtcccggatcggggataatagccggaccctcttactatactgtagcaggtccaccatcagccatagatcctcgctggcttcggcccacaccaccagcgctggacccccagacagagcccctcatcttccaacagttggagattgaccattatgtggctggtcttactcatgaagtaatgtcactaagtcaccttactcttgttatgcgctggggatcggtatcggcggcacacttggcgcactgggcgcgttgtcgatggatatcaacagagctgacacccaattcgataaccagcacctcttctcctctaaaggattgcagctcctctccagcaatggaacaaagctggttggagaatgactttgatgagctgacagaggacaaaaaaacatgtctctgtgaccattga

SEQ ID NO: 129256 - DNA, 587 bp, Homo sapiens
gtgatggtatgcgcaccttgcgtgggatctcggcgaaattctttgccgcactggcccgcgccaatatcaacattgtcgccattgctcagggatcttctgaacgctcaatctctgtcgtggtaaataacgatgatgcgaccactggcgtgcgcgttactcatcagatgctgttcaataccgatcaggttatcgaagtgtttgtgattggcgtcggtggcgttggcggtgcgctgctggagcaactgaagcgtcagcaaagctggctgaagaataaacatatcgacttacgtgtctgcggtgttgccaactcgaaggctctgctcaccaatgaagaactggcgcaagccaaagagccgtttaatctcgggcgcttaattcgcctcgtgaaagaatatcatctgctgaacccggtcattgttgactgcacttccagccaggcagtggcggatcaatatgccgacttcctgcgcgaaggtttccacgttgtcacgccgaacaaaaaggccaacacctcggcgatgggatactaccatcagttgcgttatgcggcggaaaaatcgcggcgtaaatttctctatgaacacaac

SEQ ID NO: 129257 - DNA, 835 bp, Homo sapiens
acatggtgctgatggcaggtttcaccgccggtaatgaaaaaggcgaactggtggtgcttggacgcaacggttccgactactctgctgcggtgctggctgcctgtttacgcgccgattgttgcgagatttggacggacgttgacggggtctatacctgcgacccgcgtcaggtgcccgatgcgaggttgttgaagtcgatgtcctaccaggaagcgatggagctttcctacttcggcgctaaagttcttcacccccgcaccattacccccatcgcccagttccagatcccttgcctgattaaaaataccggaaatcctcaagcaccaggtacgctcattggtgccagccgtgatgaagacgaattaccggtcaagggcatttccaatctgaataacatggcaatgttcagcgtttctggtccggggatgaaagggatggtcggcatggcggcgcgcgtctttgcagcgatgtcacgcgcccgtatttccgtggtgctgattacgcaatcatcttccgaatacagcatcagtttctgcgttccacaaagcgactgtgtgcgagctgaacgggcaatgcgggaagagttctacctggaactggaagaaagcttactggagccgctggcagtgacgggaacggctgcccattattttcggtgggtagtgatgggaatccgccaccttgcggggggatctcgccgaaattcttttgccgcactggccccgcggccaatatcaaaatttgtcgccctttgctcagggattcctttttgagagaaacttgcgagcctggcaagccttgggaattgtgccgtcgttttaccacgggggggact

SEQ ID NO: 129258 - DNA, 1513 bp, Homo sapiens
ccctaattaaagctaggtacccgccaatctttacatggagctgaaggcatgcttcactggcgctatgagaaaggcgaactggtggtgcttgggcacaacctggccgtctcctactttatcgcgctggctgccagtttacgcgccgattgttgcgagatttggacggacgttgacggggtctatacctgcgacccgcgtcaggtgcccgatgcgaggttgttgaagtcgatgtcctaccaggaagcgatggagctttcctacttcggcgctaaagttcttcacccccgcaccattacccccatcgcccagttccagatcccttgcctgattaaaaataccggaaatcctcaagcaccaggtacgctcattggtgccagccgtgatgaagacgaattaccggtcaagggcatttccaatctgaataacatggcaatgttcagcgtttctggtccggggatgaaagggatggtcggcatggcggcgcgcgtctttgcagcgatgtcacgcgcccgtatttccgtggggctgattacgcaatcatcttccgaatacagcatcagtttctgcgttccacaaagcgactgtgtgcgagctgaacgggcaatgcaggaagagttctacctggtaactgaaagaaggcttactggagccgctggcagtgacggaacggctggccattatctcggtggtaggtgatggtatgcgcaccttgcgtgggatctcggcgaaattctttgccgcactggcccgcgccaatatcaacattgtcgccattgctcagggatcttctgaacgctcaatctctgtcgtggtaaataacgatgatgcgaccactggcgtgcgcgttactcatcagatgctgttcaataccgatcaggttatcgaagtgtttgtgattggcgtcggtggcgttggcggtgcgctgctggagcaactgaagcgtcagcaaagctggctgaagaataaacatatcgacttacgtgtctgcggtgttgccaactcgaaggctctgctcaccaatgtacatggccttaatctggaaaactggcaggaagaactggcgcaagccaaagagccgtttaatctcgggcgcttaattcgcctcgtgaaagaatatcatctgctgaacccggtcattgttgactgcacttccagccaggcagtggcggatcaatatgccgacttcctgcgcgaaggtttccacgttgtcacgccgaacaaaaaggccaacacctcgtcgatggattactaccatcagttgcgttatgcggcggaaaaatcgcggcgtaaatttctctatgaacacaacacttttgtgtctcctcacatccgccccctcatcgaacggcgaggacgatccagtacacgagacaaatggtgtgcacggccgagcacggagagacaacaggacaatagcgctgctcgaatactgtcgtgtcagcagggaaatacgagcttcgagcacactagtagcattcgtgtcggaacgaccaattccctcaacgtactctga

SEQ ID NO: 129259 - DNA, 478 bp, Homo sapiens
agaagagagtgaagagagtaaaaatcgttttgtgaggctatatggaaggtattactctggggccatctcagtggattcttgaagggtaagtaggagtctatcagaaaaagaagggttgagtagagtggacattggggcagagaagccagtggcctcaaatgcatgtttctttctcatcctgactgttccctttttaggcagacatatttgctggagccatattcatcaagctggccttgggattggacctttacctggcaatcttcatcctcttggctatgactgctgtttacaccaccactggtaagtatgttgcatattttgctcactcaggctatcttttgctgatcccaccccaacctgcaattagcattctcagtgttaaccttgtcactgccgaggtaaaggcaccatttcatttccactatgagagtcaagcacagcaccagaaacacaactagaccatacaacacagaat

SEQ ID NO: 129260 - DNA, 1981 bp, Homo sapiens
aggctgatcattaacccagaacttatataaagatggctcatgcgtggaatgggtatagcactgcctgcagccatggccagtacggttagccccagcaccatagctgagaccccagagccacctccattgtctgactggccagagcctctggggtgtctgggtgcacttgctggggcttgaccctcacctgtcttcccttctgctcagcatctgtctattttcaagaagtctgatttggatcttttaactccaaccctagtctgttctcttgcattccagatgggcgcctctctctttgccagtaacatcggcgtcatagaaggagaaggtccacaagccaagcctctttaatgtctcactgtctcttattttgaaatgctgaataatctgaacgcacagggccctaagggtaagttaagtccctgtcaatgtctgtctctgcaggtgatgaccatgccggaatatctcaagaagcggtggacattggggcagagaagccagtggcctcaaatgcatgtttctttctcatcctgactgttccctttttaggcagacatatttgctggagccatattcatcaagcaacccagtggtgaaggtaaatacatgaggacacatggataaaatgccctggttcttttctttctctcactagggggcttggaagtagtcatcataaacattggatgtcttagatttcagtaagacatctcattttactctgatgcctttttagcatttaacgaagttggaggttatgagagctttaccgagaagtacgtgaatgccaccccatccgtagtcgagggggacaacttgacaatcagtgccagttgctacacacctcgggcggactccttccacatcttccgagatgctgtgactggaaagggacgctgactgcctttgaaatcatcccctggcttgtttcatgagtgtgtcacgttctcccggcaggtcattgtgcagcgctgcctggtgtggcaaggacatgtctcacgtgaaggccgcttgcattatgtttctctttgtttaatggttgttggttttgcctatttgggcctcattggactcacttctgaattcttccccagatatggtagcatgtgtggtaccttctgaatgcgtgatttcaaccctctctggtttagcaaggcagtgtccagccactaaccagtgcttgtaccctttcccggctccaggactgcgaggcctgatgctttcggtcatgctggcctctctcatgagctccctgacctccatcttcaacagcgccagcactagaactaaagcacaatggaagtaactatagtgcttttgtttaatgtttaaattatgttgttttcttctcaggatatttgttcttctattaactgttgtgagcattgtgtgggtcccactggtacaagtttctcaaaatggacaactaatccattacacagaatcaatttaatgatgacttacttgaataagcttctcatattttctaaacattctgattttcttcttgcttcttttgcagggagcattctggggtctaatggttggacttgcaatgggcctcattcgtatgataacagagtttgcttatggaacagggagttgcttggctcccagtaactgtcccaagattatctgtggagtgcactatctgtacttttccatcaaggtaccattctattatactattgcaaacatttgcctattactaatgcacttttgtatggtccctgttcagctgtaccgcctgtgctgggttcttcggaacactacactgacaaggatttctagttcctttgtgatctagatcttctgcaatcatttgcttatctttgttccagattatcctgagaaatcacgtggatgcctcaagaaagcttatgacttgttctgcggtttgcagaagggacccaagctaaccaaggaggaggaggaagccttgagcaagaagctcacagacacgtctgagaggccctcgtgg

SEQ ID NO: 129261 - DNA, 1392 bp, Homo sapiens
atgccacgaaacgactgggcagacatcgcggaaatgatcgttccactcggcaaacagcggcgggaaatttcccacctgataaccaccaggagcgatatcccacggtttacaactatggtcgccgtgaagtcagtaacttcctcggtcggtaacgcgctttactggattgaacgttttggtattgatgcgctgcgcgtcgatgcggtggcgtcaatgatttatcgcgactacagccgtaaagagggggagtggatcccgaacgaatttggcgggcgcgagaatcttgaagcgattgaattcttgcgtaataccaaccgtattcttggtgagcaggtttccggtgcggtgacaatggctgaggagtctaccgatttccctggcgtttctcgtccgcaggatatgggcggtctgggcttctggtacaagtggaacctcggctggatgcatgacaccctggactacatgaagctcgacccggtttatcgtcagtatcatcacgataaactgaccttcgggattctctacaactacactgaaaacttcgtcctgccgttgtcgcatgatgaagtggtccacggtaaaaaatcgattctcgaccgcatgccgggcgacgcatggcagaaattcgcgaacctgcgcgcctactatggctggatgtgggcattcccgggcaagaaactactgttcatgggtaacgaatttgcccagagccgcgagtggaaccatgacgccagactcgactgtacaaaaaaaagcaaaagacaagagaagaaaaccaaacgcacaaacagaaaacaacacaaacgaatgctgacagaggcggccaagagctcccccatcaaggaggcgccaaccaccggtttcaaacaacttctccgaccggtttattacccacccaaatttacccgaccgaatttatttcccaaaacgttgggcaaccattgcctgactattaatgaaacgctgcccgccaatggcatcactgctatctttggcgtctccggtgccggaaaaacttcgctgattaacgccatcagtggactgacgcgcccgcaaaaagggcggattgtcctcaatgggcgggtactaaatgatgccgaaaaaggtatctgcctgacgccggaaaagcgtcgcgttggctatgtttttcaggatgcgcggctgttcccgcattacaaagtgcgtggcaatctgcgctacggcatgtcgctcatgaacgattacctgcgcaaacagataatcgacatcagcacgcggatcgctggaacggctaataatggcgactttactggtcagtggattaccgccgccaataccgtcaatttccagatcgttaccggaacccataattgccatcaatattttatcgcgctgcgtttgatcttcgggtaa

SEQ ID NO: 129262 - DNA, 1523 bp, Homo sapiens
atgttttgctccgctcatgtgtaatcaacaccatgttaattcatggcgtggattaaatcaccattatggtgatggaaaaaatccacatgttgtttaccatgcatggagcggagggttttatgagcagcatttctgaaagaattaaatttttactggcaagggaaggcttgaagcagcgggatttggctgaggctttgtcgactagcccacagaccgtcaacaactggataaaaagagacgcgttaagtcgtgaggcggcgcatcaaatatctgaaaaattcggttattctcttgactggttattaaatgaagagggttctccaaagaaggatctggagagcaacatcccgccagagtctgagtggggaactgtcgacgcttgggacaaaaatacccccctacctgacgatgaggtggaagtaccgtttctgaaggatatcgagtttgcgtgtggtgatggacgagtacacgatgaggatcacaacggttttaaattgcgcttttcaaaagcaacgctccgtcgagttggagccaatagtgatggttctggtgtcctgtgttttcctgcatcaggagacagtatggagccagtcattcctgatggtgcaactgtagctgttgatactggtaataagcgagttattgacggcgaactctacgccatcaaccagggagatctgaagcgcatcaagcaactttatcgcaaaccaggcggaaaaattctaatcagaagcattaatcgtgattatgacgacgaagaggccgatgaggcagatgtcgagataatcggttttgtgttctgcgtgatggagcagatgaaaatgctcgataccctgcaaaatacccagctccagagcgcgatagtgaaggctatgtatgccgctaccatcgagagtgaactggatacccaatcggcgatggactttattctcggcgcggataataaagagcagcagagcaaacttacgggctggctcggtgaaatggcgtcctattactcagctgcgcctgttcgcctgggtggggcaagggttccacacctgttgccgggtgattctctcaaccttcagtcggcgcaggataccgataacggctactcgacttttgaacagtccctgctgcgttatattgccgctgggcttggtgtgtcgtatgagcagctttcgcgaaactattcgcagatgagctactcgaccgcacgcgcaagtgctaacgagtcctgggcgtactttatggggcgtcgcaagtttgtggcatcccgacaggcctgtcagatgtttctttgctggcttgaagaggcgattgtccgccgcgtggtcacgcttccttcgaaagcccggttcagtttccaggaggcgagaacagcctgggggaatgccaactggattggctctggtcgaatggcaattgacgggctgaaagaggtacaggaggccgtcatgctcattgaggcaggtctcagcacgtatgaaaaagagtgcgccaaacgcggtgatgattatcaggagatttttgcccagcag

SEQ ID NO: 129263 - DNA, 1872 bp, Homo sapiens
ttaacacgccagttcgtgggcccggtgcgtggtgtcgaaagcgtcgatcaacacatacacggcggaagaaagttgctgacgatggttcagcgaagtcagcactggccagacgggcatactttgcgcccaaaattcgccatcgagcaaaactgccagcgggcgttcttctgctgttgcatcgccggtggtaaaaatccatacacgccgtgactttttcaaccgttcacttttccagataatttctttggcaggtatttctggcgcttgcggacaatcccatcccggttgcagaggcgcttgcggcatttcgagtgcagaaacagcgtgccctcgcccgcctttccagctttgtaggttcagcggatcggctatcgcctggggtaatagttttcgccagccttcgcgcaattcgaggcgatcgggggatggtacagaaaaaatgtcatcgcgttcggtgggaataaagcagtagctgccgcgccagttggcattgagttgtgtcgtccactgccagacgttagtgcctgcaattcgctgcatcgactggggctggctgttctgatggtgatcggtcacaccagtgatgtagacccatacacggttaatcaacgagtatttgcatggagagtctactctagaggatccccgttcaatattgatattgccgtatcctacagaagggacgatttgtcgggtgacggtgccttccaatgcacaactactggaaatagcaatagcaccggttatcgccagcgcgcgatggcaagaatgcggcataaaataacgcacattaattgccccgcctttctgcgctggagaaataagcacaggtttagggataaccatattactgacatcacctaagcccattgctttacccgcttgtagacggatagattcaatgcgggctaataatgctttgtcggcatccagttccgccggtaattcataacctgtttttcccagatattcagccggaataatgacgactggcatcgccatatcgatacaggtcaccgggacatcgtcaaaataatcaatctgattatcagtcgggaaaacttttccggttttggttccagcggcattcaggaaagtgagcgcaaccggtgcggcagtacccggtacgccgtcaattctggcgctaccctcgtactcgacaacaccatttggcgtttgcacatcagcttcgatgaacgtacccgtattgacgttgcggatacgtacgcgagtaactggcgaagtcgctgcaatcaaaccattttcaatggcgaatgccccaacaccagacagcatattgccgcagttaggcgtggtatcgacacgttgctcatgaacgattacctgcgcaaacagataatcgacatcagcacgcggatcgctggaacggctaataatggcgacgccagtatgactaagcccgcgaccagagatcatcggaatatagccgccgcaggctgcgaccatcggccccaacatcagcgaagtcacatcgccgacgccaccggtggagtgtttatcaacaatcgggccattcagatgcaggcttttccagtcgagaacggttcctgaatctcgcatcgccatggtcagcgagacacgctcaggcattgtcatatcgtggaagaaaatggtcatcgcgagggcggcaatctgcccttcggagatagtgttgtcgcgaataccgttgataaagaaacgaatttcttcatcgctcagcgcatgaccatcacgttttttacgaataatttcgtcgccgtgacccagcgctttcagcaggcttgccagcaggctggaagcgccaaagcggtagtgacggggatcctctagaggcgacctcacactgcaatcatatcccttccccaactccat

SEQ ID NO: 129264 - DNA, 1353 bp, Homo sapiens
atgggtaagatcatgagttcataccagcatgtagatctaattgtggattgtgactttgaggcataccatagacagccctcgagtggcaccaagagtgtggtaacagggcccagtgcacaggctttgatcacagagaagattgtgacataccactgggaccagcacgtaggtgatgtgcttgttctgaatatttattgcgtgattaatgtgctggatcacaccgtgaaagctgtaatcgatgaccgctttatgggcggcataaccacgataaacctccagttgatggccattatcgtgcgttatttcttcgcttccggtagtgcctatatcgttgctatgttaccggtatttgccatgctggcgaacgtctccggcgcaccgttaatgttaaccgcgctggcactgttgttctccaactcctatggcggcatggttactcactatggcggcgcggcaggtccggtcatctttggcgtgggttataacgatattaaatccttgtgcttcgatgaacgtacccgtattgacgttgcggatacgtacgcgagtaactggcgaagtcgctgcaatcaaaccattttcaatggcgaatgccccaacaccagacagcatattgccgcagttaggcgtggtatcgacacgttgctcatgaacgattacctgcgcaaacagataatcgacatcagcacgcggatcgctggaacggctaataatggcgactttactggtcagtggattaccgccgccaataccgtcaatttccagatcgttgccggaacccataattgccatcaatattttatcgcgctgcgtttgatcttcggcattttgaagtatatacaggaccgagcaagggaaggcttgaagcagcgggatttggctgaggctttgtcgactagcccacagaccgtcaacaactggataaaaagagacgcgttaagtcgtgaggcggcgcaacaaatatctgaaaaattcggttattctcttgactggttattaaatggagagggttctccaaagaaggatctggagagcaacatcccgccagagtctgagtggggaactgtcgacgcttgggacaaaaatacccccctacctgacgatgaggtggaagtaccgtttctgaaggatatcgagtttgcgtgtggtgatggacgagtacacgatgaggatcacaacggttttaaattgcgcttttcaaaagtggatccagccacgggtgggatgctaacagggatgaggatgactcttgtacctggactcagtataatagggggatcctctagagtcgacatagaaacaaatacgccctcggaaaatccagagggcgtcgggcaattaaaccggtgttag

SEQ ID NO: 129265 - DNA, 1725 bp, Homo sapiens
atgcaactaaaagcaggctcccagtttctggacccttctgagaacctgatagaaacattgaagctggatgagttcccccagagccttctcatcctcaacctgtctggaaacagctgcaccaaccaggatggctaccgcgctcacctccgccgcctgccgcctgccgccagccgccgggtctggctcgccctgggctcctgccccttaccgctggagagctcgccggcgcacagggcctatgagcgaccgtcagtagcgcaccagccagccgtgcccggagcccgccgcagcctcgaggtaggagcgcgggtcggggtggccagggaatgtcaggttctgatgccagtgattggaaagaaatggcgggattttgccgatttcggaaccaccatcaaacaggattttcgcctgctggggcaaaccagcgtggaccgcttgctgcaactctctcagggccaggcggtgaagggcaatcagctgttgcccgtctcactggtgaaaagaaaaaccaccctggcgcccaatacgcaaaccgcctctccccgcgcgttggccgattcattaatgcagctggcacgacaggtttcccgactggaaagcgggcaggattttgccgatttcggaaccaccatcaaacaggattttcgcctgctggggcaaaccagcgtggaccgcttgctgcaactctctcagggccaggcggtgaagggcaatcagctgttgcccgtctcactggtgaaaagaaaaaccaccctggcgcccaatacgcaaaccgcctctccccgcgcgttggccgattcattaatgcagctggcacgacaggtttcccgactggaaagcgggcactggaaaccaaaagcaagacgcagcaccagcgctcacctccgccgcctgccgcctgccgccagccgccgggtctggctcgccctgggctcctgccccttaccgctggagagctcgccggcgcacagggcctatgagcgaccgtcagtagcgcaccagccagccgtgcccggagcccgccgcagcctcgaggtaggagcgcgggtcggggtggccagggaaggggatcctctagagtcgaaccgggggtcagcacccaaaacagaaaccggataccaaggcgaagaatctttatttaacaaagcgtactacggcggcggcacgaacttcttccgtaaagaaagccagaagcttcagcagagcgctaaaaaacgcgatgctgagttagcgaacggcgccctcggtatcatagagttaaataatgattacacattgaaaaaagtaatgaagccgctgatcacttcaaacacggtaactgatgaaatcgagcgcgcgaatgttttcaaaatgaacggcaaatggtacttgttcactgattcacgcggttcaaaaatgacgatcgatggtattaactcaaacgatatttacatgcttggttatgtatcaaactctttaaccggcccttacaagccgctgaacaaaacagggcttgtgctgcaaatgggtcttgatccaaacgatgtgacattcacttactctcacttcgcagtgccgcaagccaaaggcaacaatgtggttatcacaagctacatgacaaacagaggcttcttcgaggataaaaaggcaacatttgcgccaagcttcttaatgaacatcaaaggcaataaaacatccgttgtcaaaaacagcatcctggagcaaggacagctgacagtcaactaa

SEQ ID NO: 129266 - DNA, 1675 bp, Homo sapiens
atgcaggacagcgctcacctccgccgcctgccgcctgccgccagccgccgggtctggctcgccctgggctcctgccccttaccgctggagagctcgccggcgcacagggcctatgagcgaccgtcagtagcgcaccagccagccgtgcccggagcccgccgcagcctcgaggtcccgtctgaggtgcccctgaccgtccctgccctcaccccaccccggatcccggcaatgctaaccgctgtctgcggctctctgggcagccagcacacggaagcgccgcacgcctccccgccgcgcctcgacctgcagcctctccaaacttaccagggccacacgagccctgaggccggggactacccctccccgctgcagcctggagagctgcagagcctcccgctgggcccggaggtggacttctcgcagggctatgagctgccaggggcctcctcgcgggtaacctgcgaggacctggaaagcgacagtcccttggccccgggccccttttccaagctcctgcagccggacatgtcacaccattatgaatcgtggttcaggccgactcacccaggcgcggaggatggctcgtggtgggaccttcatccgggcaccagctggatggacctcccccacactcagggcgcgctgacctcacctggccacccgggggcgcttcaggcgggcttggggggctacgtcggagaccaccagctttgtgccccgccaccccacccgcatgcgcaccacctccttccagctgccggagggcagcatctcctagggccgcccgacggggctaaggccttggaagtagccgccccggagtctcaagggctggattccagcctggacggggcggcgcgtcccaaaggctcccggcggtcggtgccccgcagctcaggccagaccgtctgtcgctgccccaactgtctggaggcggagcgactgggggctccatgtgggcccgatgggggcaagaagaagcatttgcacaactgccacatcccgggctgcgggaaagcctacgccaagacgtcgcacctgaaggcgcacctgcgctggcacagcggcgaccgtcccttcgtgtgcaactggctcttctgcggcaagcgcttcacgcgctcggacgagctgcagcgccacctccagacccacaccggcaccaagaagttcccctgtgcagtctgcagccgcgtcttcatgcgcagcgaccacctggccaagcacatgaaaacccacgagggcgccaaggaggaggcggctggggcggcctcgggagagggcaaggccggcggcgcagtggagccccccgggggcaaaggcaaacgcgaggccgagggcagcatggcgtcgtcgagccctgactccccatgttcctgcgactgctttgtctccgtgcccccggcctcagccatcccggctgtgatctttgctcatgaactcggaccgaccccgggacgaggtgcaggaggtggtgtttgtccccgcaggcactcacactcctgggagccggctccaggcctctgagctgtgggaggtggtggaggagcctcgggtcaggctggggacagagggtgtcatgcctgagaggcaggaaggtcacctgctcaagaagaggaagtggcctctgaagggctggcacaagctagatatctgcaagctcttagcagaattgtga

SEQ ID NO: 129267 - DNA, 471 bp, Homo sapiens
gcggccgcccatcttcaccaggggtccacggcagcagcacccagacacctgcgcatgtgggcagttttccgggttgtggccccatccctccagatgctgccggagatccaagattcgcgggcctggagggtggggtggggtgggcggggccgtgatggcaggaacagcagggcctgaggaaccttccgtgccccttcttgttccttcccgggccttgagcagccgctccctctccgccatggcctgctgcaggagccgctccatgtgggcaatgtctggatggatggccccacagctattcccacggccacagttcagcagctggtagagggggtatctgccggagtcccccactgctggcgggagagctgaggcctccagggattcagtacaatggaaggacagaggtccgggggatcctctctggctccccctgtccccccttttccggggcaggctcccagtcctctg

SEQ ID NO: 129268 - DNA, 533 bp, Homo sapiens
ggccgcatcaagacctggaggaagcgatggttctgctttgaccgccaagcccgccgcttggcctactatgcggacaaggaagagaccaagctcaaaggtgtcatctacttccaggccattgaggaagtctattatgaccacttacgctgtgccttcaagagccccaacccccgcctgaccttctgcgtcaaaacctacgaacgccttttctacatggtgggctccgagccccgaagccatgcgcatttggatggacgtcatcgtgacagccgctgacgaaaaccacgccccctgagtgggccccgcactcttggggggaagtcccttcgaggctccgccggcgcggggcgcgggggcgttcctaggccccgcccactgccggaaaacttggacgcaccgctttggaactctcccgggaattccgcaggcgcggcagttcagctggcctgagctgctgcgttctgggttgcaggtgcctttgccccgacgggatcgccggcccctaaggccctgcccggggcaagaagaagatt

SEQ ID NO: 129269 - DNA, 1699 bp, Homo sapiens
ggttactcatcctgggctcaggtaagagggcccgagctcggaggcggcacacccaggggggacgccaagggagcaggacggagccatggaccccgccaggaaagcaggtgcccaggccatgatctggactgcaggctggctgctgctgctgctgcttcgcggaggagcgcaggccctggagtgctacagctgcgtgcagaaagcagatgacggatgctccccgaacaagatgaagacagtgaagtgcgcgccgggcgtggacgtctgcacctgaggccgtggtggcggtggagaccatccatggacaattctcgctggcagtgcgtgcgttgcggttcgggactccccggcaagaatgaccgcggcctggatcttcacgggcttctggcgttcatccagctgcagcaatgcgctcaggatcgctgcaacgccaagctcaacctcacctcgcgggcgctcgacccggcaggtaatgagagtgcatacccgcccaacggcgtggagtgctacagctgtgtgggcctgagccgggaggcgtgccagggtacatcgccgccggtcgtgagctgctacaacgccagcgatcatgtctacaagggctgcttcgacggcaacgtcaccttgacggcagctaatgtgactgtgtccttgcctgtccggggctgtgtccaggatgaattctgcactcgggatggagtaacaggcccagggttcacgctcagtggctcctgttgccaggggtcccgctgtaactctgacctccgcaacaagacctacttctcccctcgaatcccaccccttgtccggctgccccctccagagcccacgactgtggcctcaaccacatctgtcaccacttctacctcggccccagtgagacccacatccaccaccaaacccatgccagcgccaaccagtcagactccgagacagggagtagaacacgaggcctcccgggatgaggagcccaggttgactggaggcgccgctggccaccaggaccgcagcaattcagggcagtatcctgcaaaaggggggccccagcagccccataataaaggctgtgtggctcccacagctggattggcagcccttctgttggccgtggctgctggtgtcctactgtgagcttctccacctggaaatttccctctcacctacttctctggccctgggtacccctcttctcatcacttcctgttcccaccactggactgggctggcccagcccctgtttttccaacattccccagtatccccagcttctgctgcgctggtttgcggctttgggaaataaaataccgttgtatatattctgccaggggtgttctagctttttgaggacagctcctgtatccttctcatccttgtctctccgcttgtcctcttgtgatgttaggacagagtgagagaagtcagctgtcacggggaaggtgagagagaggatgctaagcttcctactcactttctcctagccagcctggactttggagcgtggggtgggtgggacaatggctccccactctaagcactgcctcccctactccccgcatctttggggaatcggttccccatatgtcttccttactagactgtgagctcctcgagggcagggaccgtgccttatgtctgtgtgtgatcagtttctggcacataaatgcctcaataaagatttaattactttgaaaaaaaaaaaaaa

SEQ ID NO: 129270 - DNA, 1986 bp, Homo sapiens
tttcgtcccagcggccatggggacgcgaagcagccccgaggaggggaccccgccgccgctggtcccggaatgcgacgtggaggtccagccccagggccatcccgaggagtcccgggaacaggaggcatccgaagtcctggcggaaccttcgagccgcgggggagctgagcagcaggcagaggaagaagaagtgggagaaggcagcagcactgagagcagccgcgacgcgcccgaggctacgcctccgatagctatggcggccacacctcccgcatccacctcttcgcgggaaggggtgcgaggggcggcgcggcgcctgcaaggacagcagctggaggcattgactcgtgtggccctgatggagcagcgagtgaaggagcccccagcgccagaggaaggagctgaggatcgaaatggaggtggaggtggccttgctgcggggtgagctggctggggagcgagtggccgctcgccgggaggaggagcagctgcgggagctgctggagcagcaggcggcctcggagcagcgcggccgccagcagcgggaacaggacccaggaatccaagtcctcagtcaccttcttcctctaccaggagtcccagccccagcccactactccctggggtcttagggattcggcctccaccctttttgtgttccgacctatagatgagggaacaactggatgtggcccaacgtgcctatgaggacctggagttccagcaactggagcggggagccggcaggaggaggaggatcgggacagccctgggccccaggtgccaaccccaagctgtgttcacccagaagacagaccgccagctgctggtgctccaggatgccgtggcccactccgctgccacccctacttcttcctgcctcttttctgtccacagctccctgcagggctccattggctccagaggactgggagcctgccccggaaaaggggggagagggggagccgagaggatccccccgacctctgtccttccattgtactgctgtggggccatccatccagacattgcccacatgagcggctcctgcagcaggccatggcggagagggagcggctgctcaaggccgggccgcgaatcttggatctccggcagcatctggagggatggggccacaacccgaaaactgcccacatgtgcaggtgtctgggtgctgctgccgtggacccctgtgaagatgggcggccgcatcaagacctggaggaagcgatggttctgcttgaccgccaagcccgccgcttggcctactatgcggacaaggaagagaccaagctcaaggtgtcatctacttccaggccattgaggaagtctattatgaccacttcgctgtgccttcaagagcttcgtgacattcagagaggattcacagaaagtgctaagcacagagagcgcaggccctggagtgctacagctgcgtgcagaaagcagatacggatgctccccgaacaagatgaagacagtgaagtgcgcgccgggcgtgacgtctgcaccgaggccgtgggggcggtggagaccatcctttctggatctggccacgcccctttaacgcggccccaccccccctttcagcctggccgggaccctacgacacagccttgcaggccaggcctctctattaacaattacaagcgcgaggagcagagagttgagaactggtccacggcaattctcgctggcagtgcggggttgcggttcgggactccccggcaagatgaccgcggcctggatcttcacgggcttctggcgttcatccagctgcagaatgcgctcaggatcgctgcaacgccaagctcaacctcacctcgcgggcctcgacccggcaggtacatcgccgccggtcgtgagctgctacaacgccagcgatcatgtctacagggctgcttcgacggcaacgtcaccttgacggcagagcccacgactgtggcctcaaccacatctgtcaccacttctacctcgccccagtga

SEQ ID NO: 129271 - DNA, 964 bp, Homo sapiens
atgaacgtgaaaggcgatacccaagggaacactcgcgttcgggttgataacattggcggcgtcggtgcacaaacggtcaacggtattgaactcattgaggttggcggtaattctgcaggtaacttcgcgctgaccaccggaactgtcgaagctggggcttacgtctacacgctggctaaagggaaggggaatgacgagaaaaactgccccatcagtttatcgcccggagccggaagctatatcagcaacattgccgcagccaactcgctgtttagccatcgtttacacgaccggcattcatgcctgcagcctttgaaaatacttgttactggtggcgcaggatttattggttcagctgtagttcgtcacattataaataatacgcaggatagtgttgttaatgtcgataaattaacgtacgccggaaaccgggaatcacttgctgatgtttctgattctgaacgctatgtttttgaacatgcggatatttgcgatgcacctgcaatggcacggatttttgctcagcatcagccggatgcagtgatgcacctggctgctgaaagccatgttgaccgttcaattacaggccctgcggcatttattgaaaccaatattgttggtacttatgtccttttggaagccgctcgcaattactggtctgctcttgatagcgacaagaaaaatagcttccgttttcatcatatttctactgacgaagtctatggtgatttgcctcatccagatgaagtaaataatacagaagaattacccttatttactgagacgacagcttacgcgccaagcagcccttattccgcatccaaagcatccagcgatcatttagtccgcgcgtggaaacgtacatatggtttaccgacaattgtgactaattgctcgaacaactatggtccttatcatttcccggaaaagcttattccactggttattcttaatgcactggaag

SEQ ID NO: 129272 - DNA, 597 bp, Homo sapiens
  misc_feature (1)...(597): n = a,t,c or g
cgcccgatagctcatgctctcagtcgccgtgtgcgcgggataggcgggcttcctgagagaatggctttttcttttcacaagaatagcgaacgggggaaaccggggaatgtacttatccgttaacggcaactataccggaaacaatggcctgatgacgttcaacgcgacgctgggcggcgataattcgcccaccgataagatgaacgtgaaaggcgatacccaagggcacgcctcgcgttcgggttgataacattggcggcgtcggtgcacaaacggtcaacggtattgaactcattgaggttggcggtaattctgcaggtaacttcgcgctgacccaccggaactgtcgaagctggggcttacgtctacacgctggcttaagggaaggggaatgacgagaaaaaactggtatctgaccagtaaatgggaacggcgtaacgccagcggatacacccgatcccatcaataatccccctgttgtggatccggaaggcccatcagtttcccgcccggaggccggaagctatatcagcaacattgccgcatcctactccccgtttaaccatcgcttacgcccccgtntgggtgactcgcagt

SEQ ID NO: 129273 - DNA, 456 bp, Homo sapiens
gactccaccaacctccaccccattccacacaaagatgtcttccccatcagcaatttcagtttcacacagtgtcagttcatccccgccaagtgactggtaaatgtgaagtcctgctggtacaagctttgcaacactaagaaccatgtctccttcccaaaattctaacagctgaaatattgactgctggagatctcctaaagtttttcttttatcaaaggtcaaatcccacacgctttctgtttgagagactactgggtgcagagccccattgaagaaatgatactgagggcccaggtgaagatgcaattcaaaagtattgtttgcagaatcacattctgcccttttggtttgcagttcaatgttagctgcatccatttcattcagtaaatgacatggaaccccatatcttggattagctcgagcttcagggggtctctgcaactggaattccacgac

SEQ ID NO: 129274 - DNA, 772 bp, Homo sapiens
cggcacgagaaaatggattggtgctatgaagctggagagcctttatgtgaagaagatgcaacactgaaagaacttctgatatgttctggagatactttgcttttaattgaaggacaacttcctcctctgggtttcctgaaggtgcccatctggtggtaccagcttcagggtccctcaggacactgggagagtcatcaggaccagaccaactgtacttcgtcttggggcagagtttggagagccacttccagccaaggtgcttctgggaacgagcctgcgcaagtttctctcctctacttgggagacatagagatctcagaagatgccacgctggcggagctgaagtctcaggccatgaccttgcctcctttcctggagttcggtgtcccgtccccagcccacctcagagcctggacggtggagaggaagcgcccaggcaggcttttacgaactgaccggcagccactcagggaatataaactaggacggagaattgagatctgcttagagccccttcagaaaggcgaaaacttgggcccccaggacgtgctgctgaggacacaggtgcgcatccctggtgagaggacctatgcccctgccctggacctggtgtggaacgcggcccagggtgggactgccggctccctgaggcagagagttgccgatttctatcgtcttcccgtggagaagattgaaattgccaaatactttcccgaaaagttcgagtggcttccgatatctagctggaaccaacaaataaccaagaggaaaa

SEQ ID NO: 129275 - DNA, 1455 bp, Homo sapiens
  misc_feature (1)...(1455): n = a,t,c or g
aaagcagacagccttattctcatgagaacaaatgggaaaatactttttttttctcatattaagttgaaagatataaaattgctgtttttagggcaaaaagggggtgaatattggtaattttagaggctccaacctaagtatatcagtaggggcttaaagtgatcccttcagaattagaacaagcagtttgggcctactgattgcagccaaagattttgaaatacttcagaatcaaaagctgattcatcggcagagcaaacactggtggaggattgcgcgggcacggaagaaggctgctgttgtgtcccttgttgtactgttagagcgggctctgccctggtgaattctactcccatggaagttaattccaaagtttcatttcttaaacatgatgattaaaaagaagcttttgactcagatttagagagagggaactcacttctttctcaaggtgatttcagtgcagaggaatatgaagaccgctcagggttagtgttatttaagagagagagagattcctgtgacttttaaaatgatgttatcattacttgagatactctttccttgagatgccactgtgtagtgcttcannnnnnnnnnctaaaacagtatgttttgaagagtgctttttaaaaccgttggagaaatgtctgtttttttttctaggccatgaccttgcctcctttcctggagttcggggtcccgtccccagcccacctcaaagcctggacggtggagaggaagcgcccaggcaggcttttacgaactgaccggcagccactcagggcagaatgtgattctgcaaacaatacttttgaattgcatcttcacctgggccctcagtatcatttcttcaatggggctctgcacccagtagtctctcaaacagaaagcgtgtgggatttgacctttgataaaagaaaaactttaggagatctccggcagtcaatatttcagctgttagaattttgggaaggagacatggttcttagtgttgcaaagcttgtaccagcaggacttcacatttaccagtcacttggcgctcagttgtttctgatggtcatgatgaatggtctcactggtgatctctttctaggggatgaactgacactgtgtgaaactgaaattgctgatggggaagacatctttgtgtggaatggggtggaggatgcaacactgaaagaacttctgatatgttctggagatactttgcttttaattgaaggacaacttcctcctctgggtggactggcctccttccccctatatgtgtgtctacggctgacctgtggctttgccgaggctgggaagctgctggtagtgcccatggatgggagccactggttcaccatgtggtcggtggtggagaaactcattctcagggggcatgaggtggttgtagtcaggccagagggagttcaagtgttgcaagtatccactcagtacgccgtgtga

SEQ ID NO: 129276 - DNA, 501 bp, Homo sapiens
atgactcgctctttactgagcgtgtttgaagaagatgctggcaccctcacagactataccaaccagctgctccaggcaatgcagcgcgtctatggagcccagcttaatcttctccatacagagctggctaaacagttggcagacacaatggttctacctatcatacaattccgagaaaaggatctcacagaccctcagcgctatgtggagaggcagggctgctcaggccatcagggtcactgggtgtggggcatggttgaagccgtatgttccaaagtaagcactttaaaggatctatttggactcgctagcaatgagcatgacctctcaatggcaaaatacagcaggctgcctaagaaaaaggagaatgagaagctggctgcgttcggacagccaacctggtgcgacccggcggagcgcgtgggcttcctggagcctgtgggccctgaccctggtgccaagagcgcacccagtcccagggaccgggcctctacgctgtga

SEQ ID NO: 129277 - DNA, 1227 bp, Homo sapiens
atggttaaaaagggtcaacttacagctcaggccatttcttcagagggtgcaaaccccaagccttggcgcctcccacttggtgttgagcctgcaggtgcacagaagtcaaggattgaggtttgggagcctctgcctagatttcagaggatgtacggaaatgcctggatgtccaggcagaagtctgctgcagcagtggagccctcatggagaacctctgctaggacagcttacgtcagtttacatactcagagctccttgaacaaagtaggcttaaagggacctgcatcaattgcactggcaaaaggaaacacccagacctttcaggattgtggcccttgctctgagcactctctaattcctagggattcagaataccaatatacagcacttaaaatggaaacttaccagactcaggaaagcagttcctcaccagcaacggaacaaagctggatggagaatgactttgacgagctgagagaagaaggcttcagacgatccaattactctgagctacgggaggacattcaaaccaaaggcaaagaagttgaaaactttgaaaaaaatttagaagaatgtataactagaataaccaatacagagaagtgcttaacagagctgatggagctgaaaaccaaggctcgagaactatgtgaagaatgcagaagcctcaggagaccaaatctacgtctgattggtgtacctgaaagtgacggggagaatggaaccaagttggaaaacactctgcaggatattatccaggagaacttcaccaatctagcaaggcaggccaaccttcagattcaggaaatacagagaacacaacaaagatactcctcgagaagagcaactccaagacacataattgtcagattcaccaaagttgaaatgaaggaaaaaatgttaagggcagccagagagaaaggtcgggttaccctcaaagggaagcccatcagactaacagcagatctctcggcagaaactctacaagccagaagacagtgggggccaatattcaactttcttaaagaaaagaattttcaacccagaatttcttatccagccaaactaagcttcataagtgaaggagaaataaaatactttacagaaaagcaaatgctgagagattttgtcaccaccaggcctgccataaaagagctcctgaaggaagcgctaaacatggaaaggaacaaccagtatcagccactgcaaaatcatgccaaaatgtaa

SEQ ID NO: 129278 - DNA, 1356 bp, Homo sapiens; identical to SEQ ID NO: 116174

SEQ ID NO: 129279 - DNA, 2583 bp, Homo sapiens
atgaccttagagagcacaaacgtgaagcttaaaggagaaatggatcacgcaggaaactttgccggctataattgtggagactgcaagtttggctggaccggtcccaactgcgagcggaagaaaccaccagtgattcggcagaacatccattccttgagtcctcaggaaagagagcagttcttgggcgccttagatctcgcgaagaagagagtacaccccgactacgtgatcaccacacaacactggctgggcctgcttgggcccaatggaacccagccgcagtttgccaactgcagtgtttatgatttttttgtgtggctccattattattctgttagagatacattattagattatgcattagatgcagtcatggccataaatctcactaatggccagtgctgtacggcatcttatggtcagcatctgagtgtgcaggctctctgtgctaatcctgggattccaaaattatgcactgacactttaggcctgccttacaaattgcacattggatttgcttatatcgttgaaccaaaaaaaattgtgagctatgttgtgctgtgtgtcacctgtcaggggtgctggactttcccagtgtgcaaggtgtggcctcctctgctggcagctgttgagttcaactctctcagtgccacattcaggcctttcccagggtaccagttatcccagggtttggcacctcttgttcctgaacaaactgatccctttcctgcagaaaaaggggaacgcagttcctcaccagcaatggaacaaagctggatggagaatgactttgacgagctgagagaagaaggcttcagacgatcaaattactctgagctacgggaggacattcaaaccaaaggcaaagaagttgaaaactttgaaaaaaatttagaagaatgtataactagaataaccaatacagagaagtgcttaaaggagctgatggagctgaaaaccaaggctcgagaactacaaatacaaactaccatcagagaatactacaaacacctctatgcaaataaactagaaaatctagaagaaatggataaattccttgacacatacactctcccaagactaaaccaggaagaaattgaatctctgaatagaccaataacaggatctgaaattgtggcaataatcaatagcttaccaaccaaaaagagtccagaaccagatggattcacagccgaattctaccagaggtacaaggaggaactgcatataaacagagccaaagacaaaaaccacatgattatctcaatagatgcagaaaaagcctttgacaaaattcaacaacccttcatgctaaaaactctcaataaattaggtattgatgggacgtatttcaaaataataagagctatctatgacaaacccacagccaatatcatactgaatgggcaaaaactggaagcattccctttgaaaactggcacaagacagggatgccctctctcaccactcctattcaacatagtgttggaagttctggccagggcaattaggcaggagaaggaaataaagggtattcaattaggaaaagaggaagtcaaattgtccctgtttgcagacgacatgattatatatctggaaaaccccattgtctcagcccaaaatctccttaagctgataagcaacttcagcaaagtctcaggatacaaaatcaatgtagaaaaatcacaagcattcttatacaccaacaacagacaaacagagagccaaatcatgagtgaactcccattcacaattgcttcaaagagaattaaatacctaggaatccaacttacaagggatatgaaggacctcttcaaggagaactacaaaccactgctcaaggaaataaaagaggatacaaacaaatggaagaacattccatgctcatgggtaggaagaatcaatatcgtgcaaaatggaccatactgcccaaggttctataaccctcgcctgcgtacgtccttgtgtagaaatggggaaagcctgagcagaatactcacttgctttccttggtttcttgatcaggtcacagacataaaagagaaattgaagctctctaaaaaggtctggtcagcattaccctacactatctgcaaggacgagagcgtgacagcgggcacgtccaacgaggaggaatgctggaacgggcacagcaaagccagggagcccctgctgtttttcaaggcacctgatcctgacagaaatattgtgtccccaaggaaatccttcccaaggccaagagggcaagccgcattggcaaaccatgacatccctgctcaactctccaggttgtcctcacttctggcttctcccaaggctggatccaccagatacttgcctgagatcatgaatgatgggctcaccaaccagatcaacaatcccgaggtggatgtggacatcactcggcctgacactttcatcagacagcagattatggctctccgtgtgatgaccaacaaactaaaaaacgcctacaatggcaatgatgtcaatttccaggacacaaagagaaccaccagaaaagaagagcaggtagacatagctggaaaatcgaagccccaattttctgacaaacaaaactag

SEQ ID NO: 129280 - DNA, 3120 bp, Homo sapiens
atgggccgcactcgggaagctggctgcgtggccgctggtgtggttatcggggctggtgcctgctactgtgtatacagactggcttggggaagagacgagaacgagaaaatctgggacgaagacgaggagtctacggacacctcagagattggggttgagactgtgaaaggagctaaaactaacgctggggcagggtctggggccaaacttcagggtgattcagaggtcaagcctgaggtgagtttgggactcgaggattgtccgggtgtaaaagagaaggcccattcaggatcccacagcggaggtggcctagaggccaaggccaaggcccttttcaacacgctgaaggaacaggcaagtgcaaaggcaggcaaaggggctagggtgggtaccatctctgggaacaggacccttgcaccgagtttaccctgcccaggaggcaggggtggaggctgccaccccaccaggagtggatctagggccgggggcagggcaagtggaaaatccaagggaaaggcccgaagtaagagcaccagggctccagctacaacatggcctgtccggagaggcaagttcaactttccttataaaattgatgatattctgagtgctcccgacctccaaaaggtcctcaacatcctggagcgaacaaatgatccttttattcaagaagtagccttggtcactctgggtaacaatgcagcatattcatttaaccagaatgccatacgtgaattgggtggtgtcccaattattgcaaaactgataaaaacaaaagaccccataattagggaaaagacttacaatgcccttaataacttgagtgtgaacgcagaaaatcagggcaagattaagacgtacatcagtcaagtgtgtgatgacaccatggtctgtcgcttggactcagctgtgcagatggctgggctaagactgttaaccaacatgactgtgactaatcattaccaacatttgctttcctattcttttccagacttttttgctttgttattcctgggaaatcacttcaccaagatacagattatgaaactaattataaactttactgaaaatccagccatgacaagagagctggtactgctgtcctttggcacacctctagtgctgaccactgaccttctccaggctctctcctctttgcctttcatggaatcagggctttttcaaggtgaaggagatgaaatacaaattaccagcatagaatactataaacacctctacgcaaataaactagaaaatctagaagaaatggataaactcctcgacacatacaccctcccaagactaaaccaggaaggagttgaatctctgaatagaccaataacaggatctgaaattgaggcaataattaatagcttaccaaccaaaaaaggtccaggaccagatggattcacagccaaattctgccagaggtacaaggaggagctgcacatcaaaaagcttatccaccatgatcaagtgggcttcatccctgggatgcaaggctggttcaacatacgcaaatcaataaacgtaatcgagcatataaacagaaccaaggacaaaaaccacatgattatcttaatagatgcagaaaaggcctttgacaaaattcaacaacccttcatgctaaaaactctcaataaattaggtattgatgggacgtatctcaaaataataagagctatctatggcaaacccacagtcaatatcatactgaataggcaaaaactggaagcattccctttgaaaactggcacaagacagggatgccctctctcaccactcctattcaacatagtgttggaagttctggccaaggcaattaggcaggagaaggaaataaagggtattcaattaggaaaagaggaagtcaaattgtccctgtttgcggacgacatgattgtatatctagaaaaccccatcatctcagcccaaaatctccttaagctgacaggcaacttcagcaaagtctcaggatacaaaatcaatgtgcaaaaatcacaagcattcttatacaccaataacagacaaacagagagccaaatcatgagtgaactcccattcacaattgcttcaaagagaataaaatacctaggaatccaacttacaagggatgtgaaggacctcgtaaaggagaactacaaaccactgctcaaggaaataaaagaggatacaaacaaatggaagaacattccatgctcatgggtaggaagaatcaatatcctgaaaatggccatactgcccaaggaacgcagttcctcaccagcaacggaacaaagctggatggagaatgactttgacgagctgagagaagaaggcttcagacgatcaaattactctgagctacaggaggacattcaaaccaaaggcaaagaagttgaaaactttgaaaaaaatttagaagaatgtataactagaataaccaatacagagaagtgcttaaaggagctgatggagctgaaaaccaaggctcgagaactacgtgaagaatgcagaagcctcaggagccgatgcgatcaactggaagaaagggtatcagcaatggaagatgaaatgaatgaaatgaaaccaaatctacgtctgattggtgtacctgaaagtgatggggagaatggaaccaagttggaaaacactctgcaggatattatccaggagaacttccccaatctagcaaggcaggccaacattcagattcaggaaatacagagaacgccacaaagacactcctcgagaagagcaactccaagacacataattgtcagattcaccaaagttgaaatgaaggaaaaaatgttaagggcagccagagagaaaggtcgggttaccctcaaagggaagcccatcagactaacagcggatctctcggcagaaaccctacaagccagaagagagtgggggccaatattcaacattcttaaagaaaagaattttcaacccagaatttcatatccagccaaactaaacttcataagtgaaggagaaataaaatactttacagacaagcaaatgctgagagattttgtcaccaccaggcctgccctaaaagagctcctgaaggaagcgctaaacatggaaaggaacaaccggtaccagccgctgcaaaatcatgccaaaatgtaa

SEQ ID NO: 129281 - DNA, 1263 bp, Homo sapiens
atggatccaaaccaagaagtaatctctgaattgccagaaaaagaattcagaaggttgattattaaactgctgaaagttcccgagagatcccatgatccagagacaaaggtggcagctttggagcaagtggagagccagaaaaggatccagaactggagtggaaggctccacctctgggggcagggcacagacaaacaaaaagacagcagtaacctctgcagacttaaatgtccctgtctggacagctttgaagagagcagtggttctccccagcatgcagctggagatctgagaacgggcagactgcctcctcaagaacgcagttcctcaccagcaatggaacaaagctggatggagaatgactttgacgagctgagagaaggcttcagacgatcaaattactctgagctatgggaggacattcaaaccaaaggcaaagaagttgaaaactttgaaaaaaatttagaagaatgtataactagaataaccaatacagagaagtgcttaaaggagctgatggagctgaaaaccaaggctcgagaactacgtgaagaatgcagaagcctcaggaggcgatacgatcaactggaagaaagggtatcagcaatggaagatgaaatgaatgaaatgaagcgagaagggaagtttagagaaaaaagaataaaaagaaatgagcaaagcctccaagaaatatgggactatgtgaaaagaccaaatctacgtctgattggtgtacctgaaagtgatggggagaatggaaccaagttggaaaacactctgcaggatattatccaggagaacttctccaatctagcaaggcaggccaacgttcagattcaggaaatacacagaacgccacaaagatactcctcgagaagagcaactccaagacacataattgtcagattcaccaaagttgaaatgaaggaaaaaatgttaagggcagccagagagaaaggtcgggttaccctcaaagggaagcccatcagactaacagcggatatcttggcagaaaccctacaagccagaagagagtgggggccaatattcaacattcttaaagaaaagaattttcaacccagaatttcatatccagcccaactaagcttcataagtgtaggaaaaataaaatcctttacagacaagcaaatgctgagagattttgtcaccaccaggcctgccctaaaagagctcctgaaggaagcactgaacatggaaaggaacaaccgataccagccgctgcaaaatcatgccaaaatgtaa

SEQ ID NO: 129282 - DNA, 2145 bp, Homo sapiens
atggccgctggcgtggactgcggggacggggttggcgcccggcagcacgtgttcctggtttcagcgccacctgcaggctctgagggtacaacaaggtttgacagcgactgcagtgcaacactagttctcaaacttgagggcatcatttacctggggagctgggcctcagttcccagagaagatgagaaatcagcctgcttagttacccattcgggagttggaaacgatatgcccttggctgagggagcaccatactccagtaaagctgggcccttaataaagaaaacaaagattattaaacatttttcaaaagtatttggcggaggcggcttgtattcggttttagaaaacttgggatctgaagaacttactttgtgtactgaaaactactgtgatggccggtataacgagggcacacaagctgtgaggctggggaagtttcagccccttgatcaagttgtggtggataacgtgtttccaaattgcatcttgttgctgaaacttcctggacttgagaagttacttcatcatgtgacagaggaaaaaggtaatccagaaatagacaacaagaaatattacaagtacagcaaagagaagacattaaagtggctggaaaaaaaggttaatcaaactgtggcagcattaaaaaccaataatgtgaatgtcagttcccgggtacagtcaactgcatttttctctggtgaccaagcttccactgacaaggaagaggattatattcgttatgcccatggtctgatatctgactacatccctaaagaattaagtgatgacttatctaaatacttaaagcttccagaaccttcagcctcattgccaaatcctccatcaaagaaaataaagttatcagatgagcctgtagaagcaaaagaagattacactaagtttaatactaaagatttgaagactgaaaagaaaaatagcaaaatgactgcagctcagaaggctttggctaaagttgacaagagtggaatgaaaagtattgataccttttttggggtttgtgcttctcggttctgcactgccaaagagactctcctctatggcagcacaaagacagaaaaggggcaagtgatggtggtggctccacgcaaggcttggcggttttccctgcaacttcagacactcccagaggactcggactttttcttctgcacttttttggaaaatcgccaggaacgcagttcctcaccagcaacggaacaaagctggatggagaatgactttgacgagctgagagaagaaggcttcagacgatcaaattactctgagctacgggaggacattcaaaccaaaggcaaagaagttgaaaactttgaaaaaaatttagaagaatgtataactagaataaccaatacagagaagtgcttaaaggagctgatggagctgaaaaccaaggctcgagaactacgtgaagaatgcagaagcctcaggagccgatgcaatcaactggaagaaagggtatcagtgatggaagatgaaatgaatgaaatgaagcaagaagggaagtttagagaaaaaagaataaaaagaaatgagcaaagcctccaagaaatatgggactatgtgaaaagaccaaatctacgtctcattggtgtacctgaaagtgatggggagaatggaaccaagttggaaaacactctgcaggatattatccaggagaacttccccaatctagcaaggcaggccaacactcagattcaggaaatacagagaacaccacaaagatactcctcgagaagagcaactccaagacacatatttgtcagattcaccaaagttgaaatgaaggaaaaaatgttaagggcagccagagagaaaggttgggttacccacaaagggaagcccatcagactaacagcagatctctcagcagaaaccctacaagccagaagagagtgggggccaatattcaacattcttaaagaaaagaattttcaacccagaattgcatatccagccaaactaagcttcataagcgaaggagaagtaaaatactttacagacaagcaaatgctgagagattttgtcaccaccaggcctgccctaaaagagctcctgaaggaagcactaaacatggaaaggaacaaccggtaccagccactgcaaaatcatgccaaaatgtaa

SEQ ID NO: 129283 - DNA, 1416 bp, Homo sapiens
atggcagaaggcaaggaggagcaagtcccatcttacatggatggcagcaggcaaagaaagaatgaggaagatgtaaaagcagaaacccctgataaaaccatcagctctcgggcagcactcaggagaggcacttcttctgatggaagaaaactgaatgggacatttgcagtaaggggtgctggtgggtactacatgtggggccacactcgagctgccttctcagtcaacccctttggcagcttgggccaagtctctttgaagaggaagactgtgatatctgaactcaaacaggcagtgcccagagagagaagcacaggtccacgcaggcagccaaagccatcttcttggttgaaagatactcttttcggggggaggagccaagatggccgagtaggaacagctccggtctacagctcccagcgtgagcgacaaagaagacgggtgatttctgcatttgcatctgaggaacgcagttcctcaccagcaacggaacaaagctggatggagaatgactttgacgagctgagagaagaaggcttcagacgatcaaattactctgagctacgggaggacattcaaaccaaaggcaaagaagttgaaaactttgaaaaaaatttagaagaatgtataactagaataaccaatacagagaagtgcttaaaggcgctgatggagctgaaaaccaaggctcgagaactacgtgaagaatgcagaagcctcaggagccgatgcgatcaactggaagaaagggtatcagcgatggaagatgaaatgaatgaaatgaagcgagaagggaagtctagagaaaaaagaataaaaagaaatgagcaaagcctccaagaaatatgggactatgtgaaaagaccaaatctacgtctgattggtgtacctgaaagtgatgcggagaatggaaccaagttggaaaacactctgcaggatattatccaggagaacttccccaatctagcaaggcaggccaacgttcagattcaggaaatacagagaacgccacaaagatactcctcgagaagagcaactccgagacacataattgtcagattcaccaaagttgaaatgaaggaaaaaatgttaagggcagccagagagaaaggtcgggttaccctcaaagggaagcccatgagactaacagcgaatctctcggcagaaaccctacaagccagaagagagtgggggccaatattcaacactcttaaagaaaagaattttcaacccagaatttcatatccagccaaactaagcttcataagcgaaggagaaataaaatactttacagacaagcaaatgctgagagattttgtcaccaccagacctgccttacaagagctcctgaaggaagcacgaaacatggaaaggaacaaccggtaccagctgctgcaaaattatgccaaaatgtaa

SEQ ID NO: 129284 - DNA, 4051 bp, Homo sapiens
atggggagaaaccagagcagaaaagctgaaaattctaaaaatcagagcacctcttctcctccaaaggaacgcacctccttgccagcaacggaacaaagctggatggagaatgactttgacgagttgagagaagacggcttcagacaatcgaccactagcaagactaataaagaagaaaagagagaagaattgaatagtcgcaataaaaatgataaaggggatatcatctccaatcccacagatatacaaactaccatcagagaatactataaacacctgtactcaaataaactagaaaatctagaagaaatggataaattcctcgacacatacaccctcccaaggctaaaccaggaagaagttgaatccctgaatagaccaataacaggctatgaaattaaggcaataattaatagcctatcaaccaaaaaaagtccaggacagatggattcacagccgaattctaccagagatattattttaaatttccgaacaacttatgtcagcaagtctggccaagttatctttgaagcaagatcaatttgcatccactatgtcacaacctggttcatcattgatttaatcgctgccctgccttttgatcttctgtatgctttcaacgtcacagtgaatgtttttgtagataaaccagcatttccggagtataaagtttctgatgcaaaaaagtccaaattcatacttctgcattttagcacttttaaagctggctgggactggtttattttgttggcaacgttttatgttgctgtgactgtaccttacaacgtttgctttattggcaatgacgacctgtccacaactcggagcacaaccgtcagtgacattgcagtggagattctttttattataggtcctctagatgttagggtgtctctcgtgcatcttctaaagacagtgcgcctcttgcgtcttttgcgtctgctgcagaagttagaccgctattcccaacacagtactatcgtcctgactctgctcatgtccatgtttgcactccttgcacactggatggcgtgtatctggtacgtcattggaaaaatggagagggaagacaacagccttctgaagtgggaagttgaaggaaaactaacaaacagaaaggacatccacaccaaaaacccatctgtacatcaccatcatcaaagaccaaaagtagataaaaccacaaagatggggaaaaaacagaacagaaaaactggaaactctaaaaaccagagtgcctctcctcctccaaaggaacggagttcctcaccagcaacggaacaaagctggatggagaatgactttgacgagctgagagaagaaggcttcagacgatcaaattactctgagctacgggaggacattcaaaccaaaggcaaagaagttgaaaactttgaaaaaaatttagaagaatgtataactagaataaccaatacagagaagtgcttaaaggagctggtggagctgaaaaccaaggctcgagaactacgtgaagaatgcagaagcctcaggagccgatgcaatcaactggaagaaagggtatcagcaatagaagatgaaatgaatgaaatgaagcaagaagggaagtttggagaaaaaagaataaaaagaaatgagcaaagcctccaagaaatatgggactatgtgaaaagaccaaatctatgtctgattggtgtacctgaaagtgatggagagaatggaactaagttggaaaacactctgcaggatattatccagaagaacttccccaatctagaaagggcaggccaacgttcagattcaggaaatacagagaaggccacaaagatactccttgagaagagcaactccaagaaaaagagagaagaatcaaatagacacaataaaaaatgataaaggggatatcaccaccgatcccacagaaatacaaactaccatcagagaatactacaaacacctctacgcaaataaactagaaaatctagaagaaatggatacattcctcgacgcatacactctcccaagactaaaccaggaagaagttgaatctctgaatagaccaataacaggagctgaaattgtggcaataaccaatagtttaccaaccaaaaagagtccaggaccagatggattcatagccgaattctaccagaggtacaaggaggaactggtaccattccttctgaaactattccaatcaatagaaaaagagggaatcctccctaactcatttcatgaggccagcatcattctgataccaaagccaggcagagacacaaccaaaaaagagaattttagaccaatatccttgatgaacattgatgcaaaaatcctcaataaaatactggcaaaccaaatccagcagcacatcaaaaagcttatacaccatgatcaagtgggcttcatccctgggatgcaaggctggttcaatatacgcaaatcaataaatgtaatccagcatataaacagaaccaaagacaaaaaccacatgattatctcaatagatgcagaaaaagcctttgacaaaattcaacaacccttcatgctaaaaactctcaataaattaggtattgatgggacgtatttcaaaataataagagctatctatgacaaacccacagccaatatcatactgaatgggcaaaaactggaagcattccctttgaaaactggcacaagacagggatgccctctctcactgctcctattcaacatagtgttggaagttctggccagggcaatcaggcaggagaaggaaataaagggtattcaattaggaaaagaggaagtcaaattgtccctgtttgcagacgacatgattgtttatctagaaaaccccatcatctcagcccaaaatctccttaagctgataagcaacttcagcaaagtctcaggatacaaaatcaatgtgcaaaaatcacaagcattcttatacaccaataacagacaaacagagagccaaatcatgagtgaactcccattcacaattgcttcaaagagaataaaatacctaggaatccaacttacaagggatgtgaaggacctcgtaaaggagaactacaaaccactgctcaaggaaataaaagaggatacaaacaaatggaagaacattccatgctcatgggtaggaagaatcaatatcctgaaaatggccatactgcccaaggaacgcagttcctcaccagcaacggaacaaagctggatggagaatgactttgacgagctgagagaagaaggcttcagacgatcaaattactctgagctacaggaggacattcaaaccaaaggcaaagaagttgaaaactttgaaaaaaatttagaagaatgtataactagaataaccaatacagagaagtgcttaaaggagctgatggagctgaaaaccaaggctcgagaactacaaagggtatcagcgatggaagatgaaatgaatgaaatgaagcgagaagggaagtttagagaaaaaagaataaaaagaaatgagcaaagcctccaagaaatatgggactatgtgaaaagaccaaatctacgtctgattggtgtacctgaaagtgatggggagaatggaaccaagttggaaaacactctgcaggatattatccaggagaacttccccaatctagcaaggcaggccaacattcagattcaggaaatactgagaataccacaaagatactcctcgagaagagcaactccaagacacataattgtcagattcaccaaagttgaaatgaaggaaaaaatgttaagggcagccagagagaaaggtcgggttaccctcaaagggaagcccatcagactaacagtggatctctcggcagaaaccctacaagccagaagagagtgggggccaatattcaacattcttaaagaaaagaattttcaacccagaatttcatatccagccaaactaagcttcataagtgaaggagaaataaaatactttacagacaagcaaatgctgagagattttgtcaccaccaggcctgccataaaagagctcctgaaggaagcgctaaacacggaaaggaaccaccggtaccagccgctgcaaaatcatgccaaaatgtaa

SEQ ID NO: 129285 - DNA, 384 bp, Homo sapiens
atgctgatgcttaatattggttttaagaattttcagtttgagcatctgaaatgttctcatggcagctattcggaggacattggtttccctaatgctggtgccctgtcaggggccatgtttctgttggaagagaagcacctgctctttgggctgaaagaagaagaacgtttgagggcttccatacgtagggaatctcagcagcgccgaatgagagagaaacagcaccagcgggggctgagcgccagttacctggaacctgatcgatacgatgaggaggaggaaggcgaggagtccatcagcttggctgccattaaaaaccgatataaagggggcattcgagatcagaagccttcttatgatagccttaatctctgcatgacctga

SEQ ID NO: 129286 - DNA, 467 bp, Homo sapiens
gatcacagctcctcaccagcaagggaacaaaactggatggagaattgagtttgatgaattgacagaagtaggcttcagaaggtgggtaataacaaactcctctgagctaaagaagcatgttctaacccaatgcaaggaagctaagaaccttgaaaaaaggttaggtgaattgctaactagaataactagcttagagaagaacataaatgacctgatggagctgaaaaacacagcacgagaacttcatgaagcatacacaagtatcaatagctggatcaatcaagcagaagaaaggctatcagagattgaagatcaacttaatgaaataaagcgtgaagacaagattacagaaaaaatgaagaattccaccacagtgcgggtcgctgcaagcatgcagagcaaactgctgcagggggtagctgaagagggacctctccggctcacccggagtgcttctttctctgcag

SEQ ID NO: 129287 - DNA, 1143 bp, Homo sapiens; identical to SEQ ID NO: 121076

SEQ ID NO: 129288 - DNA, 2643 bp, Homo sapiens
acactccaatccaaaagccattatatgggccaagcaaggcaagcatctggagcgtctgtgtggagggcagggtgtggccatggccaacagcaggtgttggagcctaaatgggatgaacggggctcctccattgaggaggaacatgaacaggaacataagcaagctagatctggcatggtcaaccggtatcacgatggtcccagcagcactccattctcaggcatttattctcagggcccagtcaatgtcataagtggggccgacagacacctcatacagaagagctctagctggcatctgttgggtgcccttctgggacaaagcttccagagaaaggaacaggcagcaatctttgctgttctgcagcctctgctggtgatacccaggcaaacagggtctggagtggacctccagcaaactccagctgacctgcagaagaggggcctgactgtcagagggaaaactaacaaacagaaaggaatagtagcaacatcagcaaaaaggacgtccactcagagaccccatccaaaggatcacaactccttgccagcaagggaacaaaactggatagagaatgagtttgatgaacggacagaagtaggcttcagaaggtgggtaataacaaactcctccaagctaaaggagcatgttctaacccaatgcaaggaagctaataacgcctggcttctagttgagtttgttcagtgggacctattagcaagagatggagggtggaaagagaaattggggtatctcttcctccttttctacccactttggtgtcatagttccggtagtgactgtgtccctgtgcaggtctacctgatcaaccatacaggcattcctttctcagcacattgccaggaagacaggcacagggccttcctcctaaaggattcagacccctctgctctcatccgctccaggcagttgcaagtttttgtcaagacattagacattagacaaggatcccagttgagaaatgtatgtggacagtgcccctctcaggaacacagctccgagtcctggggctctgtaatggctctcacgtgcccttctcagagagcatgcagaggagccagagtgacaggatccaaagttcctgggccaggctgggaagagctccccctggaagtagctatggctccccagaacattcatgcaagtgggaggggctgtggcatgaccagaactggggagaccaggccctgcttttcccctgccatcctggtcctaaggccacttcacacccagagcacagcttgctctagaagacttttctcccagaaaaatttctgggaacacactgaggtcaggatcagcttggatccagggggaacttcttcctatgaggaaaagctgataagcaacttcagcaaagtctcaggatacaaaatcaatgtacaaaaatcacaagcattcttatacaccaataacggacaaacagagagccaaatcatgagtgaactcccattcacaattgcttcaaagagaataaaatacctaggaatccaacttacaagggacgtgaaggacctcttcaaggagaactacaaaccactgctcaaggaaataaaagaggatacaaacaaatggaagaacattccatgctcatgggtaggaggaatcaatatcgtgaaaatggccatactgcccaaggtaatttacagattcaatgccatccccatcaagctaccaatgcctttcttcacagaattagaaaaaactaccttaaagttcatatggaaccaaaaaagagcccgcatcgccaagtcaatcctaagccaaaagaccaaagctggaggcatcacactacctaacttcaaactatactacaaggctacagtaaccaaaacagcatggtactggtaccaaaacagagatatagatcaatggaacagaacagagccctcagaaataacgccgcatagctacaactatctgatctttgacaaacctgaggaaaaaaagcaatggggaaaggattccctatttaataaatggtgctgggaaaactggcgagccatatgtagaaagctgaaactggatcccttccttacaccttatacaaaaatcaatttgagatggattaaagacttaaacgttagacctaaaaccataaaaaccctagaagaaaacctaggcattaccattcaggacataggcatgggcaaggacttcatgtctaaaacaccaaaagcaatggcaacaaaagacaaaattgacaaatgggatctaattaaactaaagagtttaattaaactaaagagcacagcaaaagaaactaccatcagagtgaacaggcaacctaaaaaatgggagaaaattttcccaacctactcatctgacaaagggctaatatccagaatctacaatgaactcaaacaaatttacaagaaaaaaacaaacaaccccatcaaaaagtgggcgaaggacatgaacagacgcttctcaaaagaagacatttatgcagccaaaaaacacatgaaaaaatgctcaccatcactggccatcagagaaatgcaaatcaaaaccacagtgagataccatctcacaccagttagaatggtgatcattaaaaagtcaggaaacaacaggtgctggggaggatgtggagaaataggaacacttttacactgttga

SEQ ID NO: 129289 - DNA, 717 bp, Homo sapiens
atggataaattcctggacaattacaccctccgaagactaaaccaggaagaagtcaaatccctgaatagaccaataacaagttctgaaattgaggcagtaattaatagcctaccaaccaaaaaaagcccagaaccagaaagattcacagctgaattcttccaaaagtacaaagaggagctgtccaccatccgtttagtcccacacttcatgttcagaacttctccttacgctcctccaattttaagtcaaaggctgccagcgaagttcagcacgtgggctttggattccaacagaccagctgtgtctcttgaaaggggcctacctgtgacaatatcgttaactgaagctcaattgatgaatcccattaaaggaaagctgctattgctaaatcaaagcatggagtctctgccctccccagtaggctatgccatccaggatcacaactcctcaccagcaaggaaacaaaattgcatggagaatgagtttgatgagttgacagaagtagggttcagaaggtgggtaataacaaactcctctgagctaaaggagcatgttctaacccaatgcaaagaagctgagaactttgaaaaaaggttacatgaattgctaactagaataaccagtttagagaagaacataaatgacctgatggagctgaaaaacacagcacgagaacttcgtgaagcatacacaagtatcaatagccaaactgattaa

SEQ ID NO: 129290 - DNA, 546 bp, Homo sapiens
atgaaacagcccaacaggaaaaggaagcttaatatggattccaaagagcgtttggatcaggacggacgcttggtgaagatgtcattctttgtgttctgctgtgtcgtgtcctctgaggaatcagagcacgaggagactcaggatttgatgtgttcagagttattctgggtacttctccacatgtggtccctggaccagcagcatcagcatcacctggaggatcacaactcctcgccagcaaggggacaacactggatggagaatgagtctgatgaattgacagaagtaggcttcagaaggtgggtaataacaaactcctctgagctaaaggagcatgctctaacccaatgcaaggaagctaagaaccttgaaaaaaggttagacaaattgctaactagaataatcagtttagagaagaacataaatgaactgatggagctgaaaagcacagcacgagaacttcgtgaagcatacacaagtatcaatagccaaattgatcaagtagaaaaaggatatcagagattgaagatcaacttaatgaaataa

SEQ ID NO: 129291 - DNA, 735 bp, Homo sapiens
atggttattgcggaacaggtggtgtttggttacattagtaaatcagagatttcttcttggtttggagccattgctgggagacacctcccagtaggggccgacagacacctcatacaggagagcactggctggcatctggcaggtgcccctctgggatggagcttccagaggaaggaacagacagcaatctttgctgttctgcagcctctgctggtgatacccaggcaaacagggtatggagtggacctccagcaaatgccagcagacctgcagcagaggttcctgactgttagaaggaaaactaacaaacagaaaggaatagtatcaacatcaacaaaaaggacgtcatccgaaggtcaccaacatcaaagacgaaaggtagataaattcacagagatggggagaaaccagcacaaaaaggctgaaaattccaaaaaccagaatgcctcgtctccttcaaaggatcacaactcctcgccagcaagggaacaaaactggatggagaatgagtttgacgaattgacagaagtaggcttcagaaggtcagtaataacaaactcctccaagctaaaggagcatgttctaacccaatgcaaggaagctaggaaacttgaaaaaaggttagatgaattgctaactagaaaaaccaatttagagaagaacataaatgacctgatggagctgaaaaacacagcacaagaacttggtgaagcatacacaagtatcaatagctga

SEQ ID NO: 129292 - DNA, 1603 bp, Homo sapiens
cagcattactcacaatagccaaaaggtagaaaccaccaaatgtccacgaatggatgaatggataaacaaaagacagtatatccatacaatggaatattattcagccttaaaaaggaaggaaagtctgttacatgctgactctgaaaacattatgctaagtgaaagaagccagacacaaaaggacaaaagtgccattgccaagatttataagaagaaagtcaattcagctaaagaggtgctaaataaagagcccaagagaagatctgaaggtagtcgttcaaacccgctcctgcagaagttaaaattaaatcataaacaaaaggcaaatggcacctggaacaccagcaagtcagaaccgttcactcccctggaaagggggctgaagccagggagccaaatggtatggctcgttgggtcccacccccatagagcccagcaaactaagatccactggcttgaaattcttgctgccagcacagcagcagtctgggatcgacctggggtgcttgagctcgagcacctgggggaaggggcagctgttaggcgcagcttcagcagacttaaacgtccctgcctgacagctctaaagagagcagtggacctcccagcacagcgttcgagctctgctaagggtcagactgcttcctcaagtgggtccctgatccccgtgtatcctgactgggagacacctcccagtcacaaacatcgaagaccaaaggtagataaatccacaaaaatggggagaaaccagcgcaaaaaggctgaaaattccaaaaacaagaatgcttcttttcctccaaaggatctcaactcctcgccagcaagggaacaaaactggatggagaatgagtttgatgaattgacagaagtaggcttcaaaatgtgggtaataacaaactcctccgagctaaaggagcatgttctaacccaatgcaaggaagctaagaaccttgaaaaaaggttagatgaattgctaactagaataaacagtttagagaagaacataaatgacctgatggagctgaaaaacacagcatgggaacttcgtgaagtatacacaacacgtcatcacacttattctaaaattgacaacataattggaagtaaaacactcctcagcaaatgcaaaagaacggaaatcaaaacaaacagtctcccagaccacagtgcaagcaaattagaactcaggattaagaaactcactaaaaactgcacgactacacagaaactgaacaacctgctcctgaatgactgctgggtaaataacgacatgaaggcagaaataaagatgttctttgaaaccaatgagaacaaagacacaacgtaccacaatctctgggacacatttaaagcagtgtgtagagggaaatttatagcactaaatgcccaaaagagaaagcaggaaagatctaaaactgacaccctaacatcaaaattaaaagaactagagaagcaacagcaaacaaattcaaaagctagcagaagacaagaaataactaagatcagaacagaaccgaaggagatagagacacaaaaaacccttcaaaaaatcaatgaatccaggagctggatttttgaaaagatcaacaaaatagaccactag

SEQ ID NO: 129293 - DNA, 2223 bp, Homo sapiens
ggggccgccgcccccgcgtgcgcgcatgagccgccggccccccgagcgccacggccggagctgcggcggcggcatcatggccccgaccctgctccagaagctcttcaacaaaaggggcagcagcggcagctccgcggcggcgtctgcccagggcagggctcctaaggaaggacccgcctttagttggtcatgttcggagtttgacctgaatgagattcgcctgatagtttaccaggactgtgacaggagcggccgacaagtcttgtttgactctaaagctgttcaaaagattgaggaggtgacagctcagaaaacagaggatgttcctattaaaatatcagccaagtgctgccagggaagcagcagtgtcagcagcagtagcagcagcagcatctcttcccacagttcttctgggggatcttcacatcatgctaaggaacagcttccaaagtaccagtacacaagaccagcttccgatgtcaacatgttaggggaaatgatgtttggctcagttgccatgagttacaaaggctccaccttaaagatacactacatacgttctcctccacaactgatgattagtaaagtcttctctgctagaatgggcagcttctgtggaagtacaaataacttgcaagacagctttgagtacatcaaccaagatcctaatttgggaaaactgaacacaaatcaaaatagtttgggtccttgtcgtactggaagtaacctaggtctgctgcaagcatgcagcagcaaactgctgcagggggtagctgaaggaggacctctccggctcacccggagtgcttctttctttgcagcacacagcacaccagttgatatgccaagcagaggacagaatgaagacagggacagtggcattgctcgatcaggtacttgtactctgtttattggtttaactaacagagtgaactatctacagtggtgtggaagaaattttcaagtagggtcttgggagagaagagggttgggtgtcagccatactaggaggttgcatcagcaaagttcagtgattaatgggacacaggttatggaggaggaaggaggaaccaaggatgcatctccagtttctaacctgagaaagcgagtggaagcctcactaagcagtcttttgatcacacctttcccatctccaagctcctctacatcttcttccagcagttaccagcgccgctggcttcgaagtcagacaacaagtttggaaaatggcatcatcccaagaagttgagttgcaagtttcctcttgctgagaaaacctccgctggtgatacccaggcaaacagggtctgtagtgtacctccaacaaaccacagcagacctgcagcagacaggcctgttagaaggaaaattaacaagcagaaaacagccacatcaacatcaacaaaaaggacgtccactcagagaccccatccgaaggtcaccaacgtaaaagaccaaaggatcacagctcctcaccagcaagggaacaaaactggatggagaattgagtttgatgaattgacagaagtaggcttcagaaggtgggtaataacaaactcctctgagctaaagaagcatgttctaacccaatgcaaggaagctaagaaccttgaaaaaaggttaggtgaattgctaactagaataactagcttagagaagaacataaatgacctgatggagctgaaaaacacagcacgagaacttcatgaagcatacacaagtatcaatagctggatcaatcaagcagaagaaaggctatcagagattgaagatcaacttaatgaaataaagcgtgaagacaagattacagaaaaaatgaagaattccaccacagtgcttgtgtccacttggggcagccaactagaacaaaataaccttccccacataatttcccctttatttcacagcacccatgacctaaatattagcttttatggaggctgtctgctgcaagcatgcagcagcaaactgctgcaggggttagctgaaggaggacctctccggctcacccggagtgcttctttctttgcagctaaactgtgtttaaccaaacacttccttcctacggaaatgatccttatcaaaagcaggaaaacaacccctgatacacaaccaaggcgattgtacttgttacaaggtgttgtggatcaaactagtagaaaaggccctaccgccttgaatattcggcaaaagaccttcgccgctgctccgccacatcgatga

SEQ ID NO: 129294 - DNA, 1995 bp, Homo sapiens
atgcttgcaggccagcagcgcgagttcccggtgggcgtgggctccgcggaccccgcactcggagccgccggctggccccagcggcctgggcaggctcgggacctgcagctcgccatgcctgagcctcctatcccctccatgggctcctgtgcggctggagcctcgcctacgagcaccgccccctgctccaaggcgcccagtcccatcgaccacccaagggctgcggagtgcaggcgcagggcgcgggactggcaggcagctccacctgcagcccccgtgcgggatccactgggtgaagccagcagggctcctgagtctggtggggcctcggagaacctttatgtctagctcagggattgtaaatacaccagttggcactctatctgtagctcaagctaatctggtggggacatggagaacctttgtgtctagctcagggattgaaaacgcaccaatcagcgccctctcagaccactgggctctaccaatcagcaggatgtggagctgtattccaattttcgctgctcttaaaattttttttaatatcattgcttcccaattgactcacaataacgcagacatagggactgctggagactgtgaccttaaacagttaaagatgtctgcatatacgacatcatgtttgatgggggtgcagggcggtttgccgctgccaccctcggcaccatctctgaactgcccgcttttccggaggagcggaaaagttggaagccgaaaagacaggcgcccggagccctggtctaggtatcaggtgatccggagccctagtcggtgcccactaagaacaccccttctcccatcgggggttcggaggagtgttaagcctgcgggtctgccagtccctaaggcggaactgaaagcgaagatcagccaagagcacagtcggaggcggcagagacggtggcggcctgacctggctctttcgcccctcggagaaccggatcacaactcctcacaagcaagggaacaaaactggatggagaatgagtttgatgaattgacagaagtgggcttcagaaggtggggtaataacaaactcctccctcctgagcctaaagaagcctggttcctaccccaatgccaggaagcctaagaacccttgaaaaaagggttagggtgaattgcctaacctagaataacctagccttagagaagaaccataaatgaccctgatggagctgaaaaacacagcacgagaaccttcatgaagcatacacaagtatcaatagcccaagccgatcaagcggaagaaaggatatcagagattgaagatcaacttaatgaaataaagtgtgaagacaagattagagaaaaaagaatgaaaaaggaacaaacaaagcctccaagaaatatgggactatgtgaaaaagaccaaaactacgtttgattggtgtacctgaaaatgacagggagaatggaaacaagttggaaaacacacttcaggatactattcaggaaaacttccccgaactagcaagataggccaacattcaaattcaggaaatacagagaacaccacaaagatacaccttgagaagagcgaccccaagacacataattttcagattcaccaagattgaaatgaaggaaaaaatgttaagggcaaccagaaagaaaggtcgggttacccacaaagggaagcccatcagactaacagtggatctcttgggtgaaactctacaagccagaaaagagtggggaccaatattcaacattcttaaagaaaagaattttcaacccagaatttcatatccagccaaactaagcttcataagcaaaggagaaataaaatcctttacagacaatcaaatgctgagagattttgtcaccaccaggcctcccttacaagagctcctgaaggaagcactaaatatggaaaaactggtacctcccactgcaaaaacataccaaattgtaaagaccatcaacactatgaagaaactgcatcaactaatgggcaaaataaccacctag

SEQ ID NO: 129295 - DNA, 473 bp, Homo sapiens
  misc_feature (1)...(473): n = a,t,c or g
ttcatctcctccntgagctccagcntgatggtgtcctcctcccagtgctgcatctttggcacggccccctggttctgataaaaggtggtccataaagctgctctggagccaaaatattgcagtcacatctcggcagcgacctgccctcaggtggcattttcaagtcatggagaaggtggagagagaagcaatcagcagccacccacttgcaggtgggagaccccagaacttggtgtctgcctcccatggcactgggaaggctggagacaggaagaggaagacagagctcttaccagggggaggcagagatggcacagcaagagacatgcccccagaatgccaccaatgccccaggacaggcccacccatgggaccaggttatcggggccctgaggggatggggtggaatctgaagggtgagccttcttccagcagtcatgttgcaaggaaacgaaatcacgttacttcttcca

SEQ ID NO: 129296 - DNA, 371 bp, Homo sapiens
ctgaacccttgcccccggagcccccagcagtgccctctgaggtggagctgcagcacctgaggaaggaactagagagagtggcaggagagctccagtcccaggtcaaaaacaatcagcacataagtctcctgaaccggcgacaagaagagaggattcgggaacaggaagagaggcttcggaagcaggaggagaggcttcaggagcagcacgagaagcttcggcagctggccaagccacagagcgtggagttgaaagagccaagaggttcagagtttgcagcagcagccagaccatttccctgggtcacctggcagcagtacgttggccaccctatcagcagcaaggtgggccgcctatcagcagctggacct

SEQ ID NO: 129297 - DNA, 558 bp, Homo sapiens
cagatgtgcacattaaagaaagagaagcagcaagatatgcgtcgggtagagcagctggagtggagcttgtccaaactcaaaaaccagacgggtaagatggggctggcatgacctgggagcaggactggcatcagagggctgtgagggtggcttagagtgccccagggaggtgggtggatggaagggctttgaggcagagggaaagagatctgtgccaggagaccgcaagtcttgtcatctcagtgagtctcagtgtctcagtgtccccatcagcaaagagggcccgttgtcagccacccgcagtgctctttctctgaaagtgctttggaagactggctaccatctgggtgcgaggaatcattagcagtgaggccaagtttgaggagcctgagaggagctgtgcgccaagaggagggtttttcttttccgagaatccagaggcccttattatctgcttcctttgtcagctgaacccttgcccccggagcccccagcagtgccctctgaggtggagctgcagcacctgaggaaggaactagagagagtggcaggagagct

SEQ ID NO: 129298 - DNA, 784 bp, Homo sapiens
tcagcaacaggtatccacggggagggccctacatcatctgctaccctgaaggatctggagagcccgtgccaagagccagcagtagtcctgaacccaaggtccgtaaaaatcagtcaactgaagaacaccatcaaatctttgaaacaacagaagaaacaagtggaacatcagctggaagaagtaacgtgatttctttatttgctcgcgacacgactgctggggtccctgataacctggtcccatgggtgggcctgtcctggggcattggtggcattctgggggcatgtctcttgctgtgccgtctctgcgtctccctggtaagagctctgtcttcctcttcctataggaaaagcaaacgagaaacaaaaagccaaaagggagctagagttctcgagccgcagcagagcacatacggagtgggagttagagcagtccctacaggagaaggcacggctgaaggcatagctaacacaggtgaggttttgcagagggagggatgtggaaggaagatgaccccaggtggccaggagcaggtgaggaccagtgacagcccttcctaacttctgtgcccattcttgcagttgaaggagtcatttcaacaactccaattagaaagagatgagtgtgctgaacatatagaaggagagagggcccggtggcatcagaggatgagtaaaatgtcgcaggaggtgagatctgacccttcagcccccccacattagataggtcactggatctttctgggcatctgtaaaatgggaatagtaaagccagaggtggtccg

SEQ ID NO: 129299 - DNA, 654 bp, Homo sapiens
cccgggtcgacgatttcgtggagccagaggcagccagaggccctggagccccagggcctgggggcgagtctgtgagtggggagacccactgtgccctgcaggaagtcacggagaagctggcccatgccaggactcacctccgccttctccatgacttgaaaatgccacctgagggcaggtcgctgccgagatgtgactgcaatattttggctccagagcagctttatggaccaactggaggagaaggcagacctgagtgagctggtgaagaaaaaagaactttgcttcatccaccactggcgagatagatgccatcaatgagtgggaggccagggcacggcagggggagctgcacgaccgtcggaggggccccagcgtctgagccctgtcctcccgcaggaaaatccatcaccttttatcagaaccaggggggccgtgccaaagatgcagcactgggaggaggacaccatcaggctggagctcagggaggagatgaaggtgaagctgctggagctgcagcagatggtattgcggcttacagcaactacaacaatgggcacagaaaattcctggccgctgcccacaaccctgctgatgagcccggtccaggagccccagccccccaggagcttggggctgcagacaagcatggtg

SEQ ID NO: 129300 - DNA, 1270 bp, Homo sapiens
atgaagaaagttctggagatggatggtggtgatggctgcacaacactcacaagcagctcagggccagcggcgcaggaaaaccccagggtccagccaggtcacgggcacaggcctgcactcacgggtcactgcagtgaggatggaggtgtcactgcaaatgcggctggggaccctcaggaaagtcaggtgtccctgagaaacacccggcaacatgcagaaccacagagacaggaggcaaggttccagacaaatacacccagtagacagttaaagatttcagagctggagagagcttccaacccaacacagcacaaagacgtcttccccaacaaccgcacatcccacttgcaaaacgatgacacgctcctctccaggggctcagaatctagcagtcaggccaggtgggaagtgcagggacctgtggccaaaatcggcccactcatcactcagctgacagctttcacgcgtactagccagaatcagttagaggctggaggtagtgccaggtgtctgaaacccagcaggcaggttggtaaaacactcacacatcctaaccctggtgactgcactgactgcgtgctttactgtagcagaacagttgcacacatctcatctcctccatccatagtaactcagtggctggcacccctactcgagtccttgctacacacgccctggggttgttgcctcttggggaagtgctggcctgactggttgtcaggggccccgtatttctgccatgactcagtccctaatttgctctttgattctggacaagccacctctcctttttgggctcgtgtttccagaggaggtagtgagtatcaaagggtccctgataacctggtcccatgggtgggcctgtcctggggcattggtggcattctgggggcatatctcttgctgtgccttctctgcctccccctggtaagagctctgtcttcctcttccttttcagtgcctctttcagcgacatgaagttaaacccaggtactgtgagtcctcgcctaatttttggttcttatgatgatggttttctggtggaaacagttgttaaatttgattttcaattatggcagaagacacctcttcacagggcagcaggagagagaaggagagccgagcaaaggggaaagctgtctttcgtaatgccttaaatccgtcctcagttaaaccggcggttggcgctggttttttccagggcaggattctgggagacggaggagcagacgccagcatttcgccccggcacctccagcgggctgcggtc

SEQ ID NO: 129301 - DNA, 1808 bp, Homo sapiens
atggcagaagaaactcaacacaacaaattggctgcagccaagaaaaagtcagcaacaggtttccacagggaaggccctacatcatctgctaccctgaaagatctggagagcccgtgccaagaacgagcagtagtcctggattcaacgtccgtaaaaatcagtcgactgaagaacaccatcaaatctttgaaacaacagaagaaacaagtggaacatcagctggaagaagtaacggcccctgataacctggtcccatgggtgggcctgtcctggggcattggtggcattctgggggcatgtctcttgctgtgccatctctgcctccccctggaaaagaaagcaaacaacgagagacagaaagccgaaagggagctagaggttcaaatccagacattgatcatacagaaagaggaactaaatacggacctgtaccacatggaacgttctctcagatactttgaagaagagtccaaggacctggctgtccgcctgcaacattcattgcagtgtaaaggagagttagagagcgctctgtctgctgtcatcgccacagagaagaagaaggcaaaccagttgtccagccgcagcaaagcacgtacggagtggaagttagagcagtccatgcgggaggaggcactactgaaagtgcagctgacacagttgaaggagtcttttcaacaagtccaattagaaagagatgagtattctgaacatctaaaaggagagagggcccggtggcagcagaggatgagaaaaatgtcgcaggagatttgcacattaaagaaagagaagcagcaagatatgcgtcgggtagaggagctggagaggagcttgtccaaactcaaaaaccagatggctgaacccttgcccccggagcccccagcagtgccctctgaggtggagctgcagcacctgaggaaggaactagagagagtggcaggagagctccagtcccaggtcaaaaacaatcagcacataagtctcctgaaccggcgacaagaagagaggattcgggaacaggaagagaggcttcggaagcaggaggagaggcttcaggagcagcacgagaagcttcggcagctggccaagccacactgcgcgttttcgaggagctgaacaatgagaacaagagcacacttgcagttggagcagcaagtaaaggagctacaggagaagccttggcgagggtcttcctgcaggtggagctgaagagccaagaggctcagagtctgcagcagcagccagaccattacctgggtcaccctgcagcagagcacctggaagcggccagccagcagaaccagcagctaacggcccagctgagcctcatggctctccctggggaaggacacggaggagaacatctggacagtgagggggaggaggcacctcggcccatgccgagtgtcccagaggacctggagagcagggaggccatggtggcatttttcaagtccgctggagctagtgcccaggagaagcaggcacagttacaagagcaggtgaaagagcagagggtgtgctgccagcgcctggctcacccggtggcctcggcccagaaggagccagaggcagccagaggccctggagccccagggcctgggggcgagtctagcagctttatggaccacctgaaggagaaggcagacctgagtgagctggtgaaaaaaggactctgcttcatccaccactggcgagacagacgccatcagaaaacccatcaccttttatcagaaccagggggctgtgccaaagagcagcactgggaccaggacaccatcaggctggagctcagggaggagatgaag

SEQ ID NO: 129302 - DNA, 2700 bp, Homo sapiens
atgaaactgcagattcaggaagctcatagaacaggaaacaggataaatactaagaagtatacatctatgtacatattcaaactgcagaaaatcaaagagaaaaaaaatcttgaaagaagctggaggaaaaacaagtgtgagagaaatcctttctctgtctatcctctcaacacttggccgcctagcgtgacccctgaaagggaaatgcacagcaatgtgaggacacaaaagacttaccttctagctagaggatcagagaaagtccccagggacccagtgagcttgggaaaaaccactgagagtagcgaatgttggttaaagtctagaaaaaaacccagcaagttagactctggaaaaataatttatctgaaagggtacactcgccagcagttttgccatgagagtacaccaaacaaaggagacagggtcatttataacctgacatgtccaccctactgctgtgtctggtttccattggctggaacgggacctcacattctttatttgtcccgattggctagcaacttagagctttttaaaagaggcaaaggtagaggagaacaaaggaaggaggaagtaacttgtggaatgctgagaaagaaagggtacactcgccagcagttttgccacgagaatacaccaaacaaaggagacagggtcatttatgacctgacgcatccaccctactgctgtgtccggtttccattggctggaacgggacctcacattctgtattcgtcccgaatggctagcaacttaggagtttttagaagaggcaaagtttttagactagtcattggagaacagatgattgatgtcttagggccggagaaacgcagacggcgtaccacacaggaaaagatcgcaattgttcagcagagctttgaaccggggatgacggtctccctcgttgcccggcaacatggtgtagcagccagccagttatttctctggcgtaagcaataccaggaaggaagtcttactgctgtcgccgccggagaacaggttgttcctgcctctgaacttgctgccgccatgaagcagattaaagaactccagcgcctgctcggcaagaaaacgatggaaaatgaactcctcaaagaagccgttgaatatggacgggcaaaaaagtggatagcgcacgcgcccttattgcccggggatggggaacgaaccgatgactggatggatggccgccgcagtcgtcacactgatgatacggatgtgcttctccgtatacaccatgttatcggagagctgccaacgtatggttatcgtcgggtatgggcgctgcttcgcagacaggcagaacttgatggtatgcctgcgatcaatgccaaacgtgtttaccggatcatgcgccagaatgcgctgttgcttgagcgaaaacctgctgtaccgccatcgaaacgggcacatacaggcagagtggccgtgaaagaaagcaatcagcgatggtgctctgacgggttcgagttctgctgtgataacggagagagactgcgtgtcacgttcgcgctggactgctgtgatcgtgaggcactgcactgggcggtcactaccggcggcttcaacagtgaaacagtacaggacgtcatgctgggagcggtggaacgccgcttcggcaacgatcttccgtcgtctccagtggagtggctgacggataatggttcatgctaccgggctaatgaaacacgccagttcgcccggatgttgggacttgaaccgaagaacacggcggtgcggagtccggagagtaacggaatagcagagagcttcgtgaaaacgataaagcgtgactacatcagtatcatgcccaaaccagacgggttaacggcagcaaagaaccttgcagaggcgttcgagcattataacgaatggcatccgcatagggagggactggcaggagtggagctactctttcttcctctgaaaagaggatgcccaagatggacattaactcgacccaggtgtacaactgaggtcctaagaattggtcaatttggtctgccactctcaaggcaagttacttctataaaagggtatgcccttacagatggagcaatgcctcctcgggtgattgatacccaggcaaacggggtctggagtggacctaggcaaactccaacagacctgcagctgaaggtcctgacgaaatgcagctccttgccagcaacagaacaaagctggatggagaatgactttgacgagttgagaaaagaaggcttcagacgatcggtaataacaaacttctccaagctaaaggaggatgttcaaacccatcgcaaagaagctaaaaatcttgaaaaaggattagatgaatggctaactagaataaacagcatagagaagaccttaaatgacctgatggagatgaaaaccatggcatgagaactacatgacacatgcacaagcttcagtagccgagttgatcaagtggaagaaaggttatcagtgatttaagatcaaatgaatgaaatgaagtgagaagagaagtttagagaaaaaaagagtaaaaagaaatgaacaaagcctccaagaaatatggaactatgtgaaaagaccaaatcttcatctgattggtgtatctgaaattgacagggagaatggaaccaagttggaaaacactcttcaggatattttccaggagaacttcacctacctagcaaggcaggccaacattcaaattcaggaaataca

SEQ ID NO: 129303 - DNA, 2128 bp, Homo sapiens
atgggcatgggacctgccaagccaggcatgggagggaatctcctggtctgctggttgcaaagaccatgggaaaagcgcagtatttgggcagaagtgtaccgttcctccaggtatagtcactcatggcttcccttgtctaggaaaggttgtgattttagtggaacctgcaggcagactttaagtatcttaacccagccattgagacagtggggcttagaaggtatcaagaaaccaaacagctggattataagtgaagagtcagtcagtaatggagggcctccgctgctgatacccaggcaaacagcgtctggagtggacctccagcaaactccaacagacctgcagctgagggtcctgactgttagaaggaaaactaacaaacagaaaggaatagcatcaacatcaacaaaaaggacatccacaccaaaaccccatctgtacgtcaccatcatcaaagaccaaagttacataaaaccacaaagatggggaaaaaacatagcagaaaagctgaaaattctaaaaatcagagtggctctctccctccaaaggaatgcagctcctcaccagcagtggaacaaagctggacggagaatgagtttgatgagttcacagaagaaggcttcagaagtgattgaaagtcaaatgaatgaaataaagggagaagagaagtttagagaaaaaagagtaaaaagaaacgaacaaagcctacaagaaatatgggactatgtgaaaagaccagatctacgtctgattggtgtacctgatagtgacggggagaatggaaccaggttggaaaacactctgcaggatattatccgggagaatttccccaacctagcaaggcaggccagcattcaaattcaggaaatacagagaacgccacaaagatactcctcaagaagagcaactccaagacacataattgtcagattcaccaaagttgaaatgaaggaaaaaatgttaagggcagccagagagaaagaactcaagattaagaaactcactcaaaactgcttaactacatggaaactgaacaacctgctcctgaatgactactgggtacataatgaaatgaagggagaaataaagatgttctttgaaaccaatgagaacatagacacaacataccagaatctctggcatacatttaaggcagtgtgtagagggaaatttatagcactaaatgcgcacaagagaaagcaggaaagatctaagattgacaccctagcatcacaattaaaagaaatagagaagcaagagcaaacacattcaaaagctagcagaagacaagaaataactaagatcagagtagaactgaaggagatagagacacaaaaaagccttcaaaaaatcaatgaatccaggagctggttttttgaaaagatcaacaaaattgatagaccactaccaagactaataaagaagaaaagagagaagaatcaaatagacacaataaaaaatgataaaggggatatcaccaccaatcccacagaaatacaaactatcagcagagaatactataaacacctctatgcaaataaactagaaaatctagaagaaatggataaattcctggacacatacaccctctcaggactaaacaaggaagaagttgaatctctgaatacatcaataacaggctctgaagttgaggcaataattaatagcataccaaccaaaaaaaagtccaggaccagatggattcacagccgaattctaccagaggtacaaggaggagctgcctgactgggaaacccctgccagtaggggctcacggacacctcaaacaggcaggtgcccctccgggatgaaccttccagaggaaggatcaggcagcaatatttgctgttctacaatatttgctgttctgcagcctccgctggtgatacccaggcaaacagggtctggagtggacctccagcaaactccaacagacctgcagctgagggacctgactgttaaaaggaaaactaacaaacagaaaggaatagcatcaacatcaacagaaatggacatcaacaccaaaaccccatctgtaggtcaccatcatcaaagaccaaaggtagataaaaccacaaagatcggggagaaaccagagcagaaaagctgaaaattctgtttttttttt

SEQ ID NO: 129304 - DNA, 1272 bp, Homo sapiens
atgagtgctttggagaaaataaagaaggatacggagtggagaaaatggttacagggacttgtcttttcctatttccaggatttggatgctgaggaagaagacattttgttctgccggagatggtccaggactcacagctggtttcctgaaaggctgccacaagatggcgacaacgtcacagtggagaatggccaattgcttctgctggacactaacacaagcatcctcaacttactgcacattaaagggaaagggaattccacaggcttcctcgactatccatttgactatttaataattgaaagggatgcagtccaagttggtctggtgtctggaatgagactggggcctaataaaaaggagcgtcttatacaggagctcaaatgggctgtaccttgtagcattccgagttcaggcctgaattctgagaagggcaagtggcttccgaggcaatcgggcagtatcagtcttcagctgcttatccaagaagatctgggaaggagtcagtcagagagccttgggccagagttccaggggctctggaagtggcttccagggggcaagctgattttcatggccccaggacccatcgagctcagggcacacgccatccttgtttctgatggtggagagctccggattggatccgaagacaagcccttccaaggcagagctcagatcacactctacgggagttcctactcaactcccttctttccctatggagtcaagttcctggctgtgaggaatggaactctttctctgcacgctgggtgcccctctgagatgaagcttccagaagaaggatcaggcagcaacatttgctgttctgcaatatttgctgttcttcagcctctgctggtgatacccaggcaaacagggtctggagtggacctccagcaaactccaatagacctgcagctgagggtcctgactgatagaaggaaaactaacagaaaggaacagcatcaacatcaacaaaaaagacatccacaccaaaaccccatctgttggtcaccatcatcaaagaccaaagatcgcagctccttgccagcaatagaacaaagctggatggagaatgactttgatgagttgacagaagtaggcttcagaagatcggtaataacaaacctctccaagctaaaggaggatgttcgaatccctcacaaagaagctacaaaccttgaaaaaagattagatgaatggctaactagaataaacagcatagagaagaccttagatgacctgatggagctgaaaaccatggcatga

SEQ ID NO: 129305 - DNA, 694 bp, Homo sapiens
gtcctgtcggcaaagattattgatttacttcaagagttaagagtggcagtttggggatagcaccaggagatatcagctgtgatggcttggagaaacagtgtaaaccggcagtgtaaacaagagcagggcatgtatgagtagttgagaacggtgaatacgagtatgaactagacagaagccagtagggatgacaagtttttttttgggcacagtctaagttggtctggtgtctggaatgagactggggcctaataaaaaggagcgtctatacaggaccttaaatgggctgtaccttgtagcattctgaggacaggccagaattctgagaagggaaagtggtaaaaagtattgtccagtcctttttaagctggtggctgagcttggtgaggtgtgtttttaaaagacctttagtccgttctacttttcttgaagaaggaggaccgtaagggatataaatggtttcactgaatactaagagcctgaaaaactgcttggctgatttgactaataaaggctcgtctgttatcagactgtattgaaggtgggaaggctaaactgaggaattatgtctgacagaatgggaagaaatgactgcggtggccttctcagaccctgtaggaaaggcctttacttattcagtgaaagtgtctatttagactaagaggtattttagtttcctgactcagggcatgtt

SEQ ID NO: 129306 - DNA, 972 bp, Homo sapiens
gaaagtttaggaaccactgacctcaccaataccactttttccacagcaaataggttagaggaggcagaatccaaatccaggatgctatgaatcaaaaggtcaaccctttctcttctgccacggtgcacccccttccctcccccggccaaggccccagcggggtctgcaccctgcctcaggcccattctcttcttctgtgccccactccaccccacccaggatgacttgttcgcggacctggccaacctgagccacctcttcctccacgggaaccgcctgcggctgctcacagagcacgtgtttcgcggcctgggcagcctggaccggctgctgctgcacgggaaccggctgcagggcgtgcaccgcgcggccttccgcggcctcagccgcctcaccatcctctacctgttcaacaacagcctggcctcgctgcccggcgaggcgctcgccgacctgccctcgctcgagttcctgcggctcaacgctaacccctgggcgtgcgactgccgcgcgcggccgctctgggcctggttccagcgcgcgcgcgtgtccagctccgacgtgacctgcgccacccccccggagcgccagggccgagacctgcgcgcgctccgggagggccgattccaggcgtgtccgcccgcgggacccacgcggccgggcagccgggcccgcgggaacagcttctccaaccacctgtacggtccatccagaggctttacagtgtacatatcaacccatgtgtcattccctatatttatcgggttacagaaccggtttacgcagtttcggcttagtgaaacaaaagaaatcaccaatccgtatgccatgcgtttatacgaatccctgtgtcagtatcgtaagccggatggctcaggcatcgtctctctgagagtcgactggatcatagagcgttaccagctgcctcaaagttaccagcgtatgcctgacttccgccgccgcttcctgcag

SEQ ID NO: 129307 - DNA, 1479 bp, Homo sapiens
atgggtatcatcgtcatcatcggcgtcagcattgtcaagcagacattgggctgtgagctcagtagtatctcctttaatcctcacaacccctgctcgccaagggcgctcgccgacctgccctcgctcgagttcctgcggctcaacgctaacccctgggcgtgcgactgccgcgcgcggccgctctgggcctggttgcagcgcgcgcgcgtgtccagctccgacgtgacctgcgccacccccccggagcgccagggccgagacctgcgcgcgctccgcgaggccgacttccaggcccgcgcccgcggcaacagctcctccaaccacctgtacggggtggccgaggccggggcgcccccagccgatccctccaccctctaccgagatctgcctgccgaagactcgcgggggcgccagggcggggacgcgcctactgaggacgactactgggggggctacggggcccagacagacccacggacgcccatcacgtgcacacccacactcccgagctctcacacacactcgcaccaagcagagccatgtagcacgtgcaagcacaccaaccacccacgggtcccacaaacaggcagctttttctttccaaccccaaagatgtctctggctattgcttcgaaggtgaatctgggcctcctgctattctcactcctgggattcctgttgccttcctacctcttctattaccgtgcccggctccagcaggagtacgccgccaatgggatgggcccactgaaggtgcttagcggctctgagaatgtctgcagcagatgctacggaggcaaccttgtctctatccatgacttcaacttcaactatcgcattcagtgctgcactagcacagtcaaccaagcccaggtctggattggaggcaacctcaggggctggttcctgtggaagcggttttgctggactgatgggagccactggaattttgcttactggtccccagggcaacctgggaatgggcaaggctcctgtgtggccctatgcaccaaagagcaccaacaatataggaagttccttaatataagcatctccactaatctcatgaagactatactgttgttgagtcattgtacagatgaggagacagataatgatattagtaataataacagcggctgtgaccagcaggacgagatgctcaacctgggcttcaccattggttccttcgtgctcagcgccaccaccctgccactggggatcctcatggaccgctttggcccccgacccgtgcggctggttggcagtgcctgcttcactgcgtcctgcaccctcatggccctggcctcccgggacgtggaagctctgtctccgttgatattcctggcgctgtccctgaatggctttggtggcatctgcctaacgttcacttcactcacggtgagtgtcacaggcctggcctggcagcagagttcccccgagtgggagcccatgaatgtccatggagctctgttctag

SEQ ID NO: 129308 - DNA, 2425 bp, Homo sapiens
atgaatgggaagaataagaccaacatttatcaagagccgactgtatgccaggcactgcattggaccctggcacggataggaaaggaggagccgcggcgcgggcagcggggcgaggggcttctgtgctcgcgggagcggcagcccagggggctcagcagccccggcaccgccgcacctgcggctccagcagccccaaccccgccagcgctgcctggccaccgtacccgaagcggctcccccgagggccccgagcctatcctacgccggggcggctccgcggacgcgccgggccgagtcaagacctgggtcaaccgccctgcagcctttgtagggaagtgcctaggtgatgggtctgctgataccgcctgtgaccaggccatgaagggccagaggggctccaatcgcaagcgcaaaacctcgcacagcctcacgtttcccaccagctcagacatgcacgctggcggactttcagcggctcacccgtgtgcacactcacgtgcccccccccccgcttccccaagcccgtacaaaggcagcctgggcacacggacagacggactgacggactctcgagcggacagcgcagctagcggggcgcgggcgctgggcgtcgacggccagccccagccttccccgccccgtcgcgccccgccccgtcccgtcggggccgatggctcctcccgaggcccgcagcccgggcggcgcagggtagagcgccgcggcccggccacgcagcccggggactcccgggccctcccggagccccgcggggtccccgccgtgcatccggcgggctcagggagcgagtgggagcgccctccccccgctgccccctcccccgagcatcgagacaagatgctgcccgggctcaggcgcctgctgcaagcatctgcccgcaggccccagcccttccctgaagcagcccgttgggtgtggagcccttgcttctcgtctgggaccctgtgcccctccttccagagcgagaggcctctgctgcctttccagggagcatcctttcctgggaccactctgcaccagcgactctgccctgtggctgctttgcacggcagtggcaagggccagaaatggcaacagagtcactgttatgcagcagctgttatggaggagcccccagcaccgggtcgctcttcagagagcctgcagggaccactatcatgggctgggggagctcccgcctcggcctgcctcctgctgatgctcctggccctgcccctggcggcccccagctgccccatgctctgcacctgctactcatccccgcccaccgtgagctgccaggccaacaacttctcctctgtgccgctgtccctgccacccagcactcagcgactcttcctgcagaacaacctcatccgcacgctgggggccaggcacctttgggtccaacctgctcaccctgtggctcttctccaacaacctctccaccatctacccgggcactttccgccacttgcaagccctggaggagctggacctcggtgacaaccggcacctgcgctcgctggagcccgacaccttccagggcctggagcggctgcagtcgctgcatttgtaccgctgccagctcagcagcctgcccggcaacatcttccgaggcctggtcagcctgcagtacctctacctccaggagaacagcctgctccacctacaggatgacttgttcgcggacctggccaaccttgagcccacctctttcctccacgggaaccgcctgcggctgctcacagagcacgtgtttcgcggcctgggcagcctggaccggctgctgctgcacgggaaccggctgcagggcgtgcaccgcgcggccttccgcggcctcagccgcctcaccatcctctacctgttcaacaacagcctggcctcgctgcccggcgaggcgctcgccgacctgccctcgctcgagttcctgcggctcaacgctaacccctgggcgtgcgactgccgcgcgcggccgctctgggcctggttccagcgcgcgcgcgtgtccagctccgacgtgacctgcgccacccccccggagcgccagggccgagacctgcgcgcgctccgcgaggccgacttccaggcgtgtccgcccgcggcacccacgcggccgggcagccgcgcccgcggcaacagctcctccaaccacctgtacggggtggccgaggccggggcgcccccagccgatccctccaccctctaccgagatctgcctgccgaagactcgcgggggcgccagggcggggacgcgcctactgaggacgactactgggggggctacgggggtgaggaccagcgaggggagcagatgtgccccggcgctgcctgccaggcgcccccggactcccgaggccctgcgctctcggccgggctccccagccctctgctttgcctcctgctcctggtgccccaccacctctga

SEQ ID NO: 129309 - DNA, 501 bp, Homo sapiens; identical to SEQ ID NO: 118345

SEQ ID NO: 129310 - DNA, 636 bp, Homo sapiens; identical to SEQ ID NO: 119153

SEQ ID NO: 129311 - DNA, 894 bp, Homo sapiens; identical to SEQ ID NO: 115010

SEQ ID NO: 129312 - DNA, 478 bp, Homo sapiens; identical to SEQ ID NO: 123661

SEQ ID NO: 129313 - DNA, 1677 bp, Homo sapiens; identical to SEQ ID NO: 118348

SEQ ID NO: 129314 - DNA, 2093 bp, Homo sapiens
  misc_feature (1)...(2093): n = a,t,c or g
tttagattcaaatgtgaatgattggtcggttggccaatcagactggttaacaataacattactcgggaaccaatggactccaaggggtggagacggcgtagaacgaccgaaggaatgacgttacacagcaatgtggcaccacaggccaatagcagggggaagcgatttcaagtatccaatcagagctgttccagggcggagtctaccaatgccgaaagcgaggaggcggggtaaaaaagagagggcgaaggtaggctggcagatacgttcgtcagcttgctcctttctgcccgtggacgccgccgaagaagcatcgttaaagtctctcttcaccctgccgtcatgtctaagtcagagtctcctaaagagcccgcaacagctgaggaagctcttcattggagggttgagctttgaaacaactgatgagagcctgaggagccattttgagcaatggggaacgctcacggacctgtgtggtaatgagagatccaaacaccaagcgctccagggggctttgggtttgtcacatatgccactgtggaggaggtggatgcagctatgaatgcaaggccacacaaggtggattggaagagttgttggaaccaaagagagctgtctccagagaagattctcaaagaccaggtgcccactttaactgtgaaaaaggatatttgttgggtggcattaaagaaagacaaccttttgggggggaaaaaaaaaaagggnaaaaaaacatcacctaagagattattttgaacagtatggaaaaattggaagtgattgaaatccattgactggaccggaggccagtggccaagaaaaaggggctttgcctttgtaaccttttgacgacccttgactccgtggataagattgtcattcagaaataccatactgtgaatggccacaactgtgaagttaagaaaagccctgtcaaagcaagaagatggctagtgcttcatccagcccaaagaggtccgaagtggctctggaaactttggtggtggtcgtggaggtgggtttcggtgggaatggacaacttcggtccgtggaggaaacttcagttggtccgtggtggctttggtggcaccccgtggtggtggtggatatggtgggcagtgggggatggctataatggatttggtaatgatggaagcaattttggaggtggtggaaagctacaatgattttgggaattacaacaatcaagtcttcaaattttggacccatgaaagggaggaaattttggaaggcagaagctctgggccctatgggcggtggaggccaatacttttgctaaaccccgaaaaccaaggtggctatggcggttccagcagcagcagtagctatggcagtggcaggaggttctaattacagccaggaaacaaagcttagcaggaagaggagagccagagaagtgccaggggaagctacaggtttacaacagatttgtgaactcagcctaagcacagtggtggcagggcctagcctgctacaaagaagacatgttttagacaaatactccatggtgtaatgggcaaaaaactccgaggactgtatttgtgactaattgtataacaggttattttagtttcctgttcctgtggaaagtgttaagccattcccaccaaagggttttaatgtagattttttttttttgcaccccatgctgttgattgctaaatgtaacagtctgatcgtgacgctgaataaatgtcttttttttaatgtgctgtgtaaagttagtctactcttaagccatcttggtaaatttccccaacagtgtgaagttagaattccttcagggtgatgccaggttctatttggaatttatatacaacctgcttgggtggagaagccattgtcttcggaaaccttggtgtagttgaactgatagttactgttgtgacctgaagttcaccattaaaagggattacccaagcaaaatcatggaatggttataaaagtgattgttggcacatcctatgcaatatatctaaattgaataatggtaccagataaaattatagatgggaatgaagcttgtgtatccattatcatgtgtaatcaataaacgatttaattctcttgaa

SEQ ID NO: 129315 - DNA, 911 bp, Homo sapiens
atgcgaaggctcgcattgcgaattttagctccagagcgactgcaagaacaaaccaacaatcccaagaggacccacagaccctctgaaggaagtagactgctcctgcaggaccacagagacaccacaaatactgtgagtgccccaactgcagaagtgggaaagcctccaccacctccactagaacaggtgctggtattcacggctgagagacccatagacggttcacatcacaggactctgtgtggacaaccaccagtaccagcccggagtcagattatccaccatgatcaagtgggtttcataccggggatgcagggatggtttcacgtactcaagccaataaatgtcacacatgacataaacagaattaaaaacaaaaatcacatgatcatctcaatagatgcagaaaaagcattcaacaaaatccagcatctctttatgattaaaactttcagcaaaatcggcatacaagggacacactttaatgataataaaagccatctacgacaaacccacaaccagcataataatgaatgaggaaaagttgcaagcattccctctgagaactggaacaagacaaggatgcccaatctcaccacccctctgcagcatagtactggaagtcctagccagagcaatcagacaagagaaagaaataaagggcatccaaatcagtaaagagaaagtcaaactgtccctgtttgctgatgatatgattgtttaccttgaaaaccctaaggactcctctagaaagctcctagaactgataaaagaattcagcaaagtttccagatacaagattaatgtaaacaaatcagtagctcttctatacaccaacagtgatcctagctgagaatcaaatcaataattcatccccttttacaatagctgcaaaaaaaaaaaatacttag

SEQ ID NO: 129316 - DNA, 539 bp, Homo sapiens
  misc_feature (1)...(539): n = a,t,c or g
caagatgcggcagagggaaagagcccaaggaaagaaggtgctccggccccagctgtcgtgaagagcaggaggctaagaaagtggtgaatcccctgtttgagaaaaggcctaagaattttggcattggacaggacatccagcccaaaagagacctcacccgctttgtgaaatggcnccgctatatcaggttgcagcggcagagagccatcctctataagcggctgaaagtgcctcctgcgattaaccagttcacccaggccctggaccgccaaacagctactcagctgcttaagctggcccacaagtacagaccagagacaaaggcgctttggctaagctggtggaagctatcaggaccaattacaatgacagatacgatgagatccgccgtcactggggtggcaatgtcctgggtcctaagtctgtggctcgtatcgccaagctcgaaaaggcaaaggctaaagaacttgccactaaactgggttaaatgtacactgttgagttttctgtacataaaaataattgaaataataaaaaaa

SEQ ID NO: 129317 - DNA, 906 bp, Homo sapiens
cgccgcccaagatgccgaaaggaaagaaggccaagggaaagaaggtggctccggccccagctgtcgtgaagaagcaggaggctaagaaagtggtgaatcccctgtttgagaaaaggcctaagaattttggcattggacaggacatccagcccaaaagagacctcacccgctttgtgaaatcggccccgctatatcaggttgcagcgggcagagagccatcctctataagcggctgaaagtgcctcctgcgattaaccagttcacccaggccctggaccgccaaacagctactcagctgcttaagctgtggcccacaagtacagacccagagacaaagcaagagaagaagcagagactgtttggcccgggccgacgaagaaggctgcttggcaaaaggggacgtccccaacgaagagaccacctggtccttcgaagcaggaagttaacacccagtcaccaccttggtggaggaacaagaaagcttcagctgggtggtggattgcacaccgacgtggattcccatcgagcttggtggtcttcttgccttgccctgtgtcgtgaaaaatgggggtccccttacttgcattatcaagggaaaggcaagacttgggacgtctagtcaccaggaagacctgcaccactgtcgcctttcacacaggtgaacctcggaagacaaagggcgcttttgcttaagctggtggaagctatcaggaccaattacaatgacagatacgatgagatccgccgtcactggggtggcaatgtcctgggtcctaagtctgtggctcgtatcgccaagctcgaaaaggcaaaggctaaaagaacttgccactaaactgggttaaatgttacactgttgagttttctgtacataaaaataattgaaataatacaaattttccttca

SEQ ID NO: 129318 - DNA, 5799 bp, Homo sapiens; identical to SEQ ID NO: 128377

SEQ ID NO: 129319 - DNA, 6249 bp, Homo sapiens
atgccaagagtggagaaaaacattccaggcagaaggaacagcaaaggctttgaggatccgctggaagttactcaagatgtgaccagagaatgggctaaaaaagttgtttggaagagagaaaaggctagtaagatcaatggtgcttatttctgtgaagggcgagttcgaggagaggcaatcaggatacgaaccatgaagatgcgtcaacaagctactttaactatgactgtggacaagggagataacgtgaacatatctttcaaaaaggtattgattaaagaagaagatgcagtgatttacaaaaatggttccttcatccattcagtgccccggcatgaagtacctgatattctagaagtacacctgcctcatgctcagccccaggatgctggagtgtactcggccaggtatataggaggaaacctcttcacctcggccttcaccaggctgatagtccggattcttcctcctcaaccagaaaacatcaagatttccaacattacacactcctcggctgtgatttcttggacaatattggatggctattctatttcttctattactatccgttacaaggttcaaggcaagaatgaagaccagcacgttgatgtgaagataaagaatgccaccatcactcagtatcagctcaagggcctagagcctgaaacagcataccaggtggacatttttgcagagaacaacatagggtcaagcaacccagccttttctcatgaactggtgaccctcccagaatctcaagcaccagcggacctcggaggggggaagatgctgcttatagccatccttggctctgctggaatgacctgcctgactgtgctgttggcctttctgatcatattgcaattgaagagagcaaatgtgcaaaggagaatggcccaagccttccaaaacgtgagggaagaaccagctgtgcagttcaactcagggactctggccctaaacaggaaggtcaaaaacaacccagatcctacaatttatccagtgcttgactggaatgacatcaaatttcaagatgtgattggggagggcaattttggccaagttcttaaggcgcgcatcaagaaggatgggttacggatggatgctgccatcaaaagaatgaaagaatatgcctccaaagatgatcacagggactttgcaggagaactggaagttctttgtaaacttggacaccatccaaacatcatcaatctcttaggagcatgtgaacatcgagaaaggggtgacagacggcacctggaaaatcaggtcactcccaccctaatactgcgcttttccaacactcttagcaaacggcacaccagaagattatatcccgagcctggctcagagggtcctacacccacggagcctcgctcattgctagcacagcagtctgagatcaaactgcacggtggcagcgagcctccactgctgatattcaggcaaacagggtctggagtggacctccagcaaactccaacaaacctgcagctgagggtcctgactgttagaaggaaaactgacaaacggaaaggacatccacaccaaaaacccatctgttcatcaccatcatcaaagaccaaagaaggcttcagacgatcaaactactccaagctaaaggaggaagttcaaacccatggcaaagaagttaaaaaccttgaaaaaaaattagacaaatggctaactagaataacaaatgcagagaagtccttaaaggacctgatggagctgaaaaccaaggcacgagaactatgtgatgaatgcgcaagcctcactagccaattcgatcaactggataaaagggtatcagtgatggaagatcaaatgaatgaaatgaagcaagaagagaagtttagagaaaaaagaataaaaagaaatgaacaaagcctccaagaaatatgggactatgtgaaaagaccaaatctatgtctgattggtgcacctgaaagtgatggggagaatggaaccaagttggaaaacactctgcaggatattatccaggagaacttccccaatataacaaggcaggccaacattcaaattcaggaaatacagagaacaccacaaagatactcctcgagaagagcaactccaagacacataatagtcagattcaccaaagttgaaatgaaggaaaaaaatgttaagggcagccagagagaaaggagctggttttttgaaaagatcaacaaaattgatagaccgctagcaagactaataaggaagaaaacagagaagaatcaaatagatgcaataaaaaatgataaaggggatatcaccaccaatcccacagaaatacaaactaccatcagagactactataaacacctctatgcaaataaactagaaaatctagaagaaatggataaattcctcgacacatacaccctcccaagattaaaccaggaagaagttgaatctctgaatagaccagtaacaggctctgaaattgaggcaataattaatagcttaccaaccaaaaaaagtccaggaccagatggattcacagccgaattctaccagaggtacaaggaggagctggtatcattccttctgaaactattccaatcaacagaaaaagagggaatcctccctgactcattttatgaggccagcatcatcctgataccaaagcctggcagagacacaacaaaaaaagagaattttagatcaatatccctgatgaacattgatgcaaaaatcctcaatataatactggcaaaccgaatccagcagcacatcaaaaagcttatccaacatgatcaagtgggcttcatccctgggatgcaaggctggttcaacataagcaaatcaataaacgtaatccagcatataaacagaaccaacgacaaaaaccatatgattatctcaatagatgcagaaaaggcctttaacaaaattcaacaacccttcatgctgaaaactctcaataaattaggtattgaagggatgtatctcaaaataataagagctgtctatgacaaccccacagcctatatcttactgaatgggcaaaaactggaagcattccctttgaatactggcacaagacaaggatgccctctctcaccactcctattcaacatagtgttggaagttctggccagggcaatcaggcaggagaaagaaataaagggtattcagttaggagaagaggaagtcaaattgtccctgtttgcagatgacatgattgtatatctagaaaaccccattgtctcagcccaaaatctccctaaactgataggcaacttcagcaaagtctcagtatacaaaatcaatgtgcagaaatcacaagcattcttatacaccaataacacacaaacagagagccaaatcatgagtgaactcccattcacaattccttcaaagacaataaaatacctaggaatccaactcaaaagggatgtgaaggacctcttcaaggagaactacaaaccactgctcaatgaaataaaagaggatacaaatacatggaagaacaattccatgctcatgggtaggaagaatcaacaatgtgaaaatggccatagtgcccaagaattggaaaaaactactttaaagttcatatggaaccaaaaaagagccctcattgccaagtcaatcctaagccaaaagaacaaagctggaggcatcacactacctgacttcaaactatactacaaggctacagtaaccaaaacagcatggtactgttaccaaaacagagatatagaccaacggaacagaacagagccctcagaaataacgccgcatatctacaaccatctgatctttgacaaacctgacaaaaacaagcaatggggaaacaattccctatttaataaatggtactgggaaaactggctagccatatgtagaaagctgaaactggatcccttccttacaccttatacaaaaattaattcaagatggattaaagacttaaatgtcagacctaaacccataaaaaccctagaaggaaacctaggcaataccatgcaggacataggcatgggcaaggacttcatgtctaaaacaccaaaagcaatggcaacaaaagccaaaattgacaaatgggatctaattaaactaaagagcttctgcacaggaaaagaaactaccattggagcgaacaggcaacctacagaatgggagaaaatttttgcaatctactcatctgacaaagggctaatatccagaatctacaatgaactcaaacaaatttacaagaaaaaaaacaaacaaccccatccaaaagtggccaaaggatatgaacagacacttctcaaaagaagacgttatgcagccaaaagacacatgaaaaaatgctcatcatcactggccatcagagaaatgcaaatcaaaaccacaatgagataccatctcacaccagttagaatggcgatcattaaaaagtcaggaaacaacagtgtccagaaaccccataccatcatcgaccaaactctactgccagtagtaggggccagagaagtcaccgaaacagcaattcagaaattaaagatgttcttgggcaagggttttggtgctgtccacccccagcccagccagaaatgtggcttctgtacttctgctgcagttcaagccacttttccagcacatctgtatggttttcgaatagaacgcttctctgaacaccttggcactcccacactcagtctcctttttctcgatgtttcctattatataaggtgtggcagtccaggtcagtatgcaagagatgtagtagctgcagtcagctctgcagcagaaagaaatgacgagcaggatgtgtcactaatgctccacctcaccctttggaagaaaggaaagctgtttcctcctggtgccctgagcgggcaggagagagcagcagatctcccagcacagcacttgagctctgctaaaggacagactgcttcctcaagtgggtccctgacccccatgcctcctgactgggagatacctctcagaagggatcaacagacacctcatgcaggagagctccagctggcatctggagggtgccactctgggatgaagctaccagaggaaggaacaggcagcaatctttactgttctgcatcttccgctggtgatacccaggcaaacagggtatggagtggaccctccagcaactccggcagacctgcacagaggggcctgaccgttagaagaaaaactaacaaatggaaaggaatagcatcaacatcaacaaaaagaacatccacacaaaaaccccatctgaaggtcaacaacagcaaagaccaaaggaggaaattacaattcatccatgggctgtttacccttgaaaatgaatgggcccaggaacaatccataatacaaaagaaatatgcattatggattggaaccaagcagatctgggtggcacaagatcaagcatgcaaaggcaagtctccacattggctcatttaccttttctctcccatctcatctggaataatcctacttcatgttttgtttcggcacctaagaagctctgttgtcgatgtggaaaaatatatgtcctcagtggctttgaatctcaatacggctgttgtggaggtttccttggatcgccccggtgtcaggtcgccaagggtttctacagagagatccgctgttagtctgatcggcttccctttgtgggtaacccaacctttccctctggctgcccttaacattttttctttcatttcaaccttggtgaatctaacagttacgtgtattggggttgctcttatcgaggagtatctttgtggatcaaccccaaacgtgcctgcattttggacaatgttagctaaagctataaatggaacagcagtggtcatggatgataaagatcaattatttcacccaattccagagtctgatgtgaatgctacacagggagaaaatcagccagatctagaggatctgaagatcaaaataatgctgggaatctcgttgatgaccctcctcctctttgtggtcctcttggcattctgtagtgctacactgtacaaactgaggcatctgagttataaaagttgtgagagtcagtactctgtcaacccagagctggccacgatgtcttactttcatccatcagaaggtgtttcagatacatccttttccaagagtgcagagagcagcacatttttgggtaccacttcttcagatatgagaagatcaggcacaagaacatcagaatctaagataatgacggatatcatttccataggctcagataatgagatgcatgaaaacgatgagtcggttacccggtga

SEQ ID NO: 129320 - DNA, 743 bp, Homo sapiens
cctccactgctgatattcaggcaaacagggtctggagtggacctccagcaaactccaacaaacctgcagctgagggtcctgactgttagaaggaaaactgacaaacggaaaggacatccacaccaaaaacccatctgttcatcaccatcatcaaagaccaaagaaggcttcagacgatcaaactactccaagctaaaggaggaagttcaaacccatggcaaagaagttaaaaaccttgaaaaaaaattagacaaatggctaactagaataacaaatgcagagaagtccttaaaggacctgatggagctgaaaaccaaggcacgagaactatgtgatgaatgcgcaagcctcactagccaattcgatcaactggataaaagggtatcagtgatggaagatcaaatgaatgaaatgaagcaagaagagaagtttagagaaaaaagaataaaaagaaatgaacaaagcctccaagaaatatgggactatgtgaaaagaccaaatctatgtctgattggtgcacctgaaagtgatggggagaatggaaccaagttggaaaacactctgcaggatattatccaggagaacttccccaatataacaaggcaggccaacattcaaattcaggaaatacagagaacaccacaaagatactcctcgagaagagcaactccaagacacataatagtcagattcaccaaagttgaaatgaaggaaaaaaatgttaagggcagccagagagaaag

SEQ ID NO: 129321 - DNA, 621 bp, Homo sapiens
atgactcttggctatggtcagagaggagctaataaagatttaagaactggtttcgacccagacttgtgcaccatggacaattttgctgagggagatttcactgtggcggattatgccttgttagaagattgccctcacgtggatgattgtgtctttgctgctgaatttatgagcaatgattatgttcgtgtgactcagctttactgtgatggggtgaatgattcattccttattggaggcttattgagaattggttgtaaaatagaaaatgaacgcagctcctcaccagcaatggaacaaagctggacggagaatgactttgacgagttgagagaggaaggcttcagaagatcaaactactccgagctaaaggaggaagttcgaaccaatggcaaagaagttagaaactttgaaaaaaaattagatgaatggataactagaataaccaatgcagagaagtccttaaaggacctgatggagctgaaaaccacggcacgagaactatgtgacaaatgcacaaacctcagtaaccgatgcgatcaactggaagaaagggtatcagcgatggaagatgaaatgaatgaaatgaagcatgaagataagtttagagaaaaagaataa

SEQ ID NO: 129322 - DNA, 621 bp, Homo sapiens
atgactgttcagtgccagccctggagtctgcacagaaaagtgagtcctttagtgctacttgcaacagttaaaaaccagtttggtatatgtcagaccatcaggacagaaaacagagtctgcaatgaacatgcttatggcccacactttccagtcaaagagaatcaagacctacacaaatgggtgagggcttgctacatgagaagtaagcaggaacaatacgagaaccaagacaagctacaagcaggacatgaacacatcaaaaggcttctgaaaagacacgtctacctagcctgtgaccaggaacgcagctcctcaccagcaacggaacaatgctggacggagaatgactttgacgagttgagagaagaaggcttcagaagatcaaactactccgagctaaaggaggaagttcgaaccaatggcaaagaagttaaaaaccttgaaaaaaaattagatgaatggctaactagaataaccaatgcagagaagtccttaaaggacctgatggagctgaaaactatggcacgagaactatgtgacgaacgcacaagcctcagtagccgatgcgatcaactggaagaaagggtatcagtgatggaagacgaaatgaatgaaatgtag

SEQ ID NO: 129323 - DNA, 597 bp, Homo sapiens
atgtctctaggccatgcagactggctttgtgctgggttctttaaagcctgcacaaagtgtatgttcactcttgcactgagtgaagttcaagttcactcttgcgcagagcttgcactgaggggagggatcggccaagacaaaatttccagaggaatgatcaggcagcagcatttgctgctcaccaatatccactgttctgcagccaccgctgctgacacccaggcaaacagggtctggagcgacctccagcaaaatccaacagacctgcagctgagggaatgcagctcctcaccagcaaaggaacaaagctggatggagaatgactttgacgagttgagagaaggcttcagaagatcaaactactctgagctaaaggaggaagttcaaacccatggcaaagaagttgaaaaccttgaaaaaaaaatagatgaatggctaactagaataaccaatgcagagaagtccttaaaggacctgatggagctgaaaaccatggcacgagaacaatgtgatgaatgcacaagcctcagtagccgacgcgatcaactggaagaaagggtatcagtgattgaagatcaaattaatgaaatgaagtga

SEQ ID NO: 129324 - DNA, 1453 bp, Homo sapiens
ctctgtctgatctggagctcgcagcccagtcaataatcttcatttttgctggctatgaaaccaccagcagtgttctttccttcactttatatgaactggccactcaccctgatgtccagcagaaactgcaaaaggagattgatgcagttttgcccaataaggaacgcagctcctcaccagcaacggaacaaagctggacggagaatgactttgacgagttgagagaagaaggcttcagacgatcaaactaccctgagctaaaggaggaagttcgaacccatggcaaagaagttagaaaccttgaaaaaaagattagacaaatggctaactagaataatcaatgcagagaagtccttaaaggacctgatggagctgaagaccatggcacgagaactacgtgatgaatgcacaagcctcagtagccaattcaatcaactggaagaaagggtatcagtgatggaagatcaaatgaatgaaatgaagaaagaagagaagtttagaagaaaaagaataaaaagaaaggaacaaagcctccaagaaatatgggactatgtgaaaagaccaaatctacgtctgattggtgtacctgaaagtgacggggagaatagaacgaagttggaaaacactctgcaggatattatccaggagaacttccccaatctagcaaggcaggccaacattcaaattcaggaaatacagagaacgccacaaagatactcctcgagaagagcaactccaagacacataattgtcagattcaccaaagttgaaatgaaggaaaaaatgttaagggcagccagagagaaagaaatacaaactaccatcagagaatactataaacacctctatgcaaataaactagaaaatctagaagaaatggataaattcctcgacacatacactctcccaagactaaaccaggaagaagttgaaactctgaatagaccaataacaggttctgaaattgaggcaataattaatagcttaccaaccaaaaaaagtccaggaccagatggattcaccgccgaattctaccagaggtacaaggaggacctggtaccattctttctgaaactattccaatcaatagaaaaagagggaatcctccctaactcattttatgaggccagcatcatcctgataccaaagcctggcagagacacaaccaaaaaagagaattttagaccaatatccctgatgaacagtgatacaaaaatcctcaataaaatactggcaaaccgaatccagcagcacatcaaaaagcttatccaccatgatcaagtgggcttcatccctgggatgcaaggctggttcaacatacgcaaatcaataaacataatccagcatataaacagaaccaacgacaaaacccacatgattatctcaatagatgcagaaaaggcctttaacaaaattcaacagcccttcatgctaaaaactctgaataaattag

SEQ ID NO: 129325 - DNA, 538 bp, Homo sapiens
acctgagtccgggagtttgagaccagcttgatcaacatgggataacctcgtctctactaaaaacacgttaaaattagctgggcgtggtggcgcatgcctcattcacgtacatgggagagtctacaaagtcacacgtatttaataggttaagccacatgctgacaaaatgtcataagaagacccttacacttttaccttggccgatcccctcccctcagtgcaagctctgtgcaagagtgaacttgaactrtcactcagtgcaagagtgaacacacactttgtgccggctttaaagaacccagcacaaagccagtctgcatggcctacagacatattttggctgggacaatgattacttgcttttctttttgtttttcttgtatttgcctgtttgattgggctcctgacataccagaaaatcactgtcaaaacattagcttaacatttgttaaggaaacaaaaagacttcggtgaccacaccttataaaccaaacagttttgtaaatcactttggaaaatttcactaaaaactcgtgcc

SEQ ID NO: 129326 - DNA, 5466 bp, Homo sapiens
cgggcccggtgctgaagggcagggaacaacttgatggtgctactttgaactgcttttcttttctcctttttgcacaaagagtctcatgtctgatatttagacatgatgagctttgtgcaaaaggggagctggctacttctcgctctgcttcatcccactattattttggcacaacaggaagctgttgaaggaggatgttcccatcttggtcagtcctatgcggatagagatgtctggaagccagaaccatgccaaatatgtgtctgtgactcaggatccgttctctgcgatgacataatatgtgacgatcaagaattagactgccccaacccagaaattccatttggagaatgttgtgcagtttgcccacagcctccaactgctcctactcgccctcctaatggtcaaggacctcaaggccccaagggagatccaggccctcctggtattcctgggagaaatggtgaccctggtattccaggacaaccagggtcccctggttctcctggcccccctggaatctgtgaatcatgccctactggtcctcagaactattctccccagtatgattcatatgatgtcaagtctggagtagcagtaggaggactcgcaggctatcctggaccagctggccccccaggccctcccggtccccctggtacatctggtcatcctggttcccctggatctccaggataccaaggaccccctggtgaacctgggcaagctggtccttcaggccctccaggacctcctggtgctataggtccatctggtcctgctggaaaagatggagaatcaggtagacccggacgacctggagagcgaggattgcctggacctccaggtatcaaaggtccagctgggatacctggattccctggtatgaaaggacacagaggcttcgatggacgaaatggagaaaagggtgaaacaggtgctcctggattaaagggtgaaaatggtcttccaggcgaaaatggagctcctggacccatgggtccaagaggggctcctggtgagcgaggacggccaggacttcctggggctgcaggtgctcggggtaatgacggtgctcgaggcagtgatggtcaaccaggccctcctggtcctcctggaactgccggattccctggatcccctggtgctaagggtgaagttggacctgcagggtctcctggttcaaatggtgcccctggacaaagaggagaacctggacctcagggacacgctggtgctcaaggtcctcctggccctcctgggattaatggtagtcctggtggtaaaggcgaaatgggtcccgctggcattcctggagctcctggactgatgggagcccggggtcctccaggaccagccggtgctaatggtgctcctggactgcgaggtggtgcaggtgagcctggtaagaatggtgccaaaggagagcccggaccacgtggtgaacgcggtgaggctggtattccaggtgttccaggagctaaaggcgaagatggcaaggatggatcacctggagaacctggtgcaaatgggcttccaggagctgcaggagaaaggggtgcccctgggttccgaggacctgctggaccaaatggcatcccaggagaaaagggtcctgctggagagcgtggtgctccaggccctgcagggcccagaggagctgctggagaacctggcagagatggcgtccctggaggtccaggaatgaggggcatgcccggaagtccaggaggaccaggaagtgatgggaaaccagggcctcccggaagtcaaggagaaagtggtcgaccaggtcctcctgggccatctggtccccgaggtcagcctggtgtcatgggcttccccggtcctaaaggaaatgatggtgctcctggtaagaatggagaacgaggtggccctggaggacctggccctcagggtcctcctggaaagaatggtgaaactggacctcaaggacccccagggcctactgggcctggtggtgacaaaggagacacaggaccccctggtccacaaggattacaaggcttgcctggtacaggtggtcctccaggagaaaatggaaaacctggggaaccaggtccaaagggtgatgccggtgcacctggagctccaggaggcaagggtgatgctggtgcccctggtgaacgtggacctcctggattggcaggggccccaggacttagaggtggagctggtccccctggtcccgaaggaggaaagggtgctgctggtcctcctgggccacctggtgctgctggtactcctggtctgcaaggaatgcctggagaaagaggaggtcttggaagtcctggtccaaagggtgacaagggtgaaccaggcggcccaggtgctgatggtgtcccagggaaagatggcccaaggggtcctactggtcctattggtcctcctggcccagctggccagcctggagataagggtgaaggtggtgcccccggacttccaggtatagctggacctcgtggtagccctggtgagagaggtgaaactggccctccaggacctgctggtttccctggtgctcctggacagaatggtgaacctggtggtaaaggagaaagaggggctccgggtgagaaaggtgaaggaggccctcctggagttgcaggaccccctggaggttctggacctgctggtcctcctggtccccaaggtgtcaaaggtgaacgtggcagtcctggtggacctggtgctgctggcttccctggtgctcgtggtcttcctggtcctcctggtagtaatggtaacccaggacccccaggtcccagcggttctccaggcaaggatgggcccccaggtcctgcgggtaacactggtgctcctggcagccctggagtgtctggaccaaaaggtgatgctggccaaccaggagagaagggatcgcctggtgcccagggcccaccaggagctccaggcccacttgggattgctgggatcactggagcacggggtcttgcaggaccaccaggcatgccaggtcctaggggaagccctggccctcagggtgtcaagggtgaaagtgggaaaccaggagctaacggtctcagtggagaacgtggtccccctggaccccagggtcttcctggtctggctggtacagctggtgaacctggaagagatggaaaccctggatcagatggtcttccaggccgagatggatctcctggtggcaagggtgatcgtggtgaaaatggctctcctggtgcccctggcgctcctggtcatccaggcccacctggtcctgtcggtccagctggaaagagtggtgacagaggagaaagtggccctgctggccctgctggtgctcccggtcctgctggttcccgaggtgctcctggtcctcaaggcccacgtggtgacaaaggtgaaacaggtgaacgtggagctgctggcatcaaaggacatcgaggattccctggtaatccaggtgccccaggttctccaggccctgctggtcagcagggtgcaatcggcagtccaggacctgcaggccccagaggacctgttggacccagtggacctcctggcaaagatggaaccagtggacatccaggtcccattggaccaccagggcctcgaggtaacagaggtgaaagaggatctgagggctccccaggccacccagggcaaccaggccctcctggacctcctggtgcccctggtccttgctgtggtggtgttggagccgctgccattgctgggattggaggtgaaaaagctggcggttttgccccgtattatggagatgaaccaatggatttcaaaatcaacaccgatgagattatgacttcactcaagtctgttaatggacaaatagaaagcctcattagtcctgatggttctcgtaaaaaccccgctagaaactgcagagacctgaaattctgccatcctgaactcaagagtggagaatactgggttgaccctaaccaaggatgcaaattggatgctatcaaggtattctgtaatatggaaactggggaaacatgcataagtgccaatcctttgaatgttccacggaaacactggtggacagattctagtgctgagaagaaacacgtttggtttggagagtccatggatggtggttttcagtttagctacggcaatcctgaacttcctgaagatgtccctgaatgtgcagctggcattccctcgacttctctcccgcccgagcttcccagaacatcacatatcactgcaaaaatagcattgcatacatggatcaggccagtggaaatgtaaagaaggccctgaagctgatggggtcaaatgaaggtgaattcaaggctgaaggaaatagcaaattcacctacacagttctggaggatggttgcacgaaacacactggggaatggagcaaaacagtctttgaatatcgaacacgcaaggctgtgagactacctattgtagatattgcaccctatgacattggtggtcctgatcaagaatttggtgtggacgttggccctgtttgctttttataaaccaaactctatctgaaatcccaacaaaaaaaatttaactccatatgtgttcctcttgttctaatcttgtcaaccagtgcaaggtggaccgacaaaattccagttatttatttccaaaatgtttggaaacagtataatttgacaaagaaaaatgatacttctctttttttgctgttccaccaaatacaattcaaatgctttttgttttatttttttaccaattccaatttcaaaatgtctcaatggtgctataataaataaacttcaacactctttatgataacaacactgtgttatattctttgaatcctagcccatctgcagagcaatgactgtgctcaccagtaaaagataacctttctttctgaaatagtcaaatacgaaattagaaaagccctccctattttaactacctcaactggtcagaaacacagattgtattctatgagtcccagaagatgaaaaaaattttatacgttgataaaacttataaatttcattgattaatctcctggaagattggtttaaaaagaaaagtgtaatgcaagaatttaaagaaatatttttaaagccacaattattttaatattggatatcaactgcttgtaaaggtgctcctcttttttcttgtcattgctggtcaagattactaatatttgggaaggctttaaagacgcatgttatggtgctaatgtactttcacttttaaactctagatcagaattgttgacttgcattcagaacataaatgcacaaaatctgtacatgtctcccatcagaaagattcattggcatgccacaggggattctcctccttcatcctgtaaaggtcaacaataaaaaccaaattatggggctgcttttgtcacactagcataggagaatgtgttgaaatttaactttgtaagcttgtatgtggttgttgatcttttttttccttacagacaaccataataaaata

SEQ ID NO: 129327 - DNA, 1832 bp, Homo sapiens
  misc_feature (1)...(1832): n = a,t,c or g
atagattccggaagggccggagatccagtctgcacaaggttctggggggtttttcttccagccagggtaggacgggaccctgaaggtatgggggcccaaaatttttaaaacccagggtatttaggttttttttcccccttttccccttaaaaannnnnnnnnncccctgagggcttaaaatttggtgggggggtgggcccaattgggcccccccccaaaaaaaggtttctttccaaaaattcccaggagggttttaattgggcccccataaggggaaaaactatggccttgccaggcccgggtaaaattgggccccccaaggggtcttttaaaagggcccccccnnnnnnnnnnnnnnnngtcttttttnnnctagaacaactcagccaaaataaaattccctgtttattgttggacaacatatgtttcaaaacatacatcaaaacaggccaaaaaaaaataaacagcaacttcatagacagaaagaaaaggaaaaaaaaaaatctttttatctttcggcctttttaacccatctccatacaaacccaactacttataggtacaggctaaggtacatacacaaaaaaagttacttggaatgcctccggaataaagattggtttttctgttggtccatttttggctttttttaccaaggtttttttttttctcctttgaggattataatggaacatgggtcaccacccacaaggtaaaggtcaggaaggtaggggccggaggaaccgcttccggaaaggctgggtttgggtccatcccgaggatccattaaaaaatggggctggaccccttaacaattatgtaccaaaaaatataaaaatgtaaaaataaaaaaatacaaaacaaaatttcccctttttaaagtaccttttaagaaaaaaaagcaggggcctttggaagttttgggttccttttttccctcccctgttgcaaaattctcatggtttgggtttgggtggtggagagcgccgttgtcatctgcggggtgggcactgcccacgggtgggcggggccgggcctctcttactcgaaggtgaccaacgtttagattctgaggacggggaagtgggaggggtgaatagggtcacgggcggccttttttttttttagttttaacttttcgcttttttgctgtcttagttcatccccgtcgggtcttctggcttcttgggtatcggacatcgtcatcctcatcatccttcagctgcccgcttgcccggtagctgactcagcttcctcaatcttcaatctcccatcctcttcctcaaccaatcaaccttccttccttccctccctccctccttccctccccaaccttccttccctccttcttcgtctaacctccatttgtccagcctcccttgcttccccaattttccctcattctcagcattccccgttaagcaagggcggtcttcttcccattttctgccttcttccacaacttccttcttctccctttaaagtcccttggtgggtgatttcggagcctggtgtctacggctggcgtctggacatggtggggcacgccgggtgatccgatgcagggggattaaaaagaaaagcgagagttcagggactctgggcgataaagactgccggagatscgcggcggcggaggaaggcgcgcgaacggaggcggcttgcggccgagcaaggaaggcggatgaaggaacaatgcaaagatggcttttcagagcagccagtggggccctgaagctgatggggtcaaatgaaggtgaattcaaggctgaaggaaatagcaaattcacctacacagttctggaggatggttgcacgaaacacactgggga

SEQ ID NO: 129328 - DNA, 422 bp, Homo sapiens
tctttaataggatgctttaatctggatcccaatagagtcttggatgtcattttagaagtgtttgaatgcaggccagaacacgatgacttctttatatctttgttagaatcttacatgagtatgtgtgaaccgcaaacactgtgtcatattcttgggttcaaattcaagtcttaccaggaaccaaatggcgagacaccatcatctttatacagagttgcagcggtacttctacaatttaatcttattgatttagatgatctttatgtacatcttcttccggctgataattgcattatggatgaacacaaacgagaaattgcggaagctaagcaaattgttagaaagctaacgataatagagtaagtcttctgaaaaaatggatgagcgagagaaagaaaaggaaaaagaagaggagaacagag

SEQ ID NO: 129329 - DNA, 1782 bp, Homo sapiens
ttttttttttagagaaagaaaaaagggggcccaggggaccggcgttcagcatacggaggacccatgccggcactggcctctgagttcccttagtatttattgatcatttttaggtgtttctcggagaggggggtgtggcagggtcatagaataatagtggagagaaggtcagcagataaacacgtgaccaaagttcttggcatcatagccaatgtaaaggattaagtgctgtgcttttagatatgcatacacataaacatctcaatgccttaaagagcagtattgctgccagcatgtcccacctccagtcctaaggcggttttctcctatctcagtagatggaatatacaatcgggctttacaccgagacattccattgcccagggacgagccggagacagatgccttcctcttatctcaactgcaaagaggccttccttcctcttttactaatcctcctcagcacagaccctttacgggtgtcgggctgggggacggtcaggtctttcccttcccacgaggccatatttcagactttcacatggggagaaacgttggacaatacctggctttcctaggcagaggtccctgcggccttccgcagtttttgtgtccctgggtacttgagattagggagtggtgatgactcttaaggagcatgctgccttcaagcatctgtttaacaaagcacatcctgcaccgcccttaatccattcaactctgagtggacacagcacatgtttcagagagcacggggttgggggtaaggtcatagattaacagaatctcaaggcagaagaatttttcttagtacataacaaaatggagtctcctatgtctacttctttctacacagacacagtaacaatctgatctctcttgcttttccccacatttcccccttttcttttcgacaaaaccgccatcgtcatcatggcccgttctcgatggtcgctgtctcttcggagctgttgggtacacctgcagacaccattgatacaatcatcaaggctgcaagcagcatactctctggggtttgtttcacctttgtgttctctagatattttgtagctaactgcgtcagcttctttagttgtgcccaagttggcggctctgccttcttggtggatggcaacttcatctgttcttctgacgtcaccattttgttcatcttgtgagtcaacggtgctcgattgcgatgtctccgtctccgcggaggtgcttttctttgcatctctgatgggttcattgtagaacttcaaatgtcgtaaggctgactgtagatgtactcgggatctctcgtcgacttgtcctcaatgaccacgctcgagcgtaccttcaccctagagaaaagcctccacgttgggcaccagatgtaggggtgggttgcccctacacacctgtgggtgtttctcgtaaggtgggacgagagatttggaaaagaaaaagacacagagacaaagtatagagaaagaaagaaggggacccggggaaccagcgttcagcatatggaggatcccgccagcctctgagttcccttagtatttattgatcatctgtgggtgtttctcaaagagggggatgtgtcagggtcacaagacaattgtggggagagggtcagcagacaaacacgtgaacaaaggtcttggcatcatagacaatgtaaaggattaagtgctgtgcttttggatatgcatacacataaacatctcaatgctttacaaagcagtattgctgcccgcaggtcccacctccagccctaaggcggtttttccctatctc

SEQ ID NO: 129330 - DNA, 1167 bp, Homo sapiens
gcggccgcggctgtggtggttcccgcagagtggataaagaactgggagaaatcagggagaggcgaatttttgcatttatgtcggatcctcagtgaaaataaaagccatgatagttcaacatacagagatttccagcaagctctctatgagttgtcatatcatgtaattaaaggaaatctaaagcatgaacaggcatctaatgttcttagtgacattagtgtaagaatttcgtgaggatatgccctccattcttgctgatgtattctgcatattagacattgagacaaattgtttagaagaaaaaagcaagagagactattttacacagttggtattagcatgtttgtatttagtttcagacacagttctaaaggaacgcctggatccagaaacactggaatcattagggcttatcaaacaatcacagcaattcaatcaaaagtcagttaaaatcaagacaaaactcttttataaagcagcaaaaattcaattttggttaaagaagagaatgaaggttatgccaagctgattgctgaattggggcaagatttatctggaagtattactagtgatttaatcttagaaaatatcaaatctttaataggatgctttaatctggatcccaatagagttttggatgtcattttagaagtgtttgaatgcaggccagaacacgatgacttctttatatctttgttagaatcttacatgaccctaaggcggttttcccctatctcagtagatggaatatatgatcgggttttacaccgagacattccattgcccagggaggagcaggagacagatgccttcctcttgtctcaactgcaacgaggcgttccttcctcttttactaatgctcttcagcacagaccctttacgggtgtcggactgggggacgagaggaatgtacatggcgcattgtctgcttacaagcgaatctgtgatgaaacaaacaaaccaggcaaaccatcgtggcatggacatatttctgaaaagagtgacacctcctcaagaagagcctcaggtccttcaggaggtattccagaagaagacattgtcatcatagatgaccgcttcatgagtgttattgcccctaaacatcttctagtgggacaagatgtggagatggaagacagtgatactgatgattctgatcctgtgtag

SEQ ID NO: 129331 - DNA, 379 bp, Homo sapiens; identical to SEQ ID NO: 115771
  misc_feature (1)...(379): n = a,t,c or g

SEQ ID NO: 129332 - DNA, 994 bp, Homo sapiens
gctcgacttttttttttttttttttttttttggcgttcaggtttccatttaatggccaagccagcactgccaagatgtcctcctgcctgagaagcccacccacgctggcacccctcagcctcactagcggcatcccagtccagtcctggtgtggggcctcatctcagctccttcagcaagctgttgacagagcccagcagctcctggaagtagccctcgtcctcaccatcctgcagctccaggctggccagcacctggtactcagcctgcaggctggccaagtgtcctgccgaagctgggggtcctgacggtagcggtcccgggcaggtggtcagggaggacgcccagtgtctgcagcaccttctcacgggcatcatgctcgggcagcgccaggaggtgggccgtgatctcgcaccagccctgttcccacaggcctggcaggaggtgtacctggcgatactgctgcagcttctctggggacatctcctgggtcagctcagcctcctcctcggcgaacatctgtgcttcctgcggcagcaggaagtcgtggggctgattggggctggcagaggaaactgaggaggggtgcaatcctgcatccttctccgtgaccaggtcgtagagcagtgtgaccacgcgcacggcgagcacctccgtgcccttctcctgcaccagggtcctcaggacctgcagccccccgagcttcaggaactgccgctgggcataggggaagtggcgcagcagggagcacagtgcaaacaggaccttcttctttgcagtgagcggctgctccgtggccaggatgaccagcagcttctgcagggctcccccttcgatggcctccacctggaccttggggttgctggggaagaagcacaggacagcatgactacccttttgtaaattgctgaaatcaggttcataaggcaataaattcatgttttcacccacagccaagtctgtgggtacggcaggaccatgggccaaacatggg

SEQ ID NO: 129333 - DNA, 1329 bp, Homo sapiens
ggaattcccgggtcgacgatttcgtcggaggccgaaggtccctgactatggctccccagagcctgccttcatctaggatggctcctctgggcatgctgcttgggctgctgatggccgcctgcttcaccttctgcctcagtcatcagaaccgtgaaggagtttgccctgaccaacccagagaagagcagcaccaaagaaacggagagaaaagaaaccaaagccgaggaggagctggatgccgaagtcctggaggtgttccacccgacgcatgagtggcaggcccttcagccagggcaggcttgtccctgcaggaatcccacgtacgggctgaatcttcagactggggaaagagaggcaaaactccaatatgaggacaagttccgaaataatttgaaaggcaaaaggctggatatcaacaccaacacctacacatctcaggatctcaagagtgcactggcaaaattcaaggagggggcagagatggagagttcaaaggaagacaaggcaaggcaggctgaggtaaagcggctcttccgccccattgaggaactgaagaaagactttgatgagctgaatgttgtcattgagactgacatgcagatcatggtacggctgatcaacaagttcaatagttccagctccagtttggaagagaagattgctgcgctctttgatcttgaatattatgtccatcagatggacaatgcgcaggacctgctttcctttggtggtcttcaagtggtgatcaatgggctgaacagcacagagcccctcgtgaaggagtatgctgcgtttgtgctgggcgctgccttttccagcaaccccaaggtccagggtgggaggccatcgaagggggagccctgcagaagctgctggtcatcctggccacggagcagccgctcactgcaaagaagaaggtcctgtttgcactgtgctccctgctgcgccacttcccctatgcccagcggcagttcctgaagctcggggggctgcaggtcctgaggacccttggtgcaggagaagggcacggaggtgctcgccgtgcgcgtggtcacactgctctacgaccttgtcaccgagaaaaatgttcgccgaggaggaggctgagctgacccagggagatgtccccagagaagctgcagcagtatcgccaggtacacctcctgccaggcctgtgggaacagggctggtgcgagatcacggcccacctcctggcgctgcccgagcatgatgcccgtgagaaggtgctgcagacactgggcgtcctcctgaccacctgccgggaccgctaccgtcaggacccccagctcggcaggacactggccagcc

SEQ ID NO: 129334 - DNA, 480 bp, Homo sapiens; identical to SEQ ID NO: 125599
  misc_feature (1)...(480): n = a,t,c or g

SEQ ID NO: 129335 - DNA, 798 bp, Homo sapiens
  misc_feature (1)...(798): n = a,t,c or g
gtagaagcttgggttgaatctttcaatctgctgccatccgcggcttgggggtcgaaggtccgggcggcgcgggtgcattccttccctaggtctctggcggctacgtatccgatcctgtcctgcgagcagggccctcggcggccttgaccaaggcgacagtgaacacagtctgaagttccggcccaagacctgggcttgctggcaggagtcagcttctgggcatctttggctttccggatttttaagtggcccttttctccttgctctctgcagaaatgggccaagttcaatgaaaccctgggaaaggtggtgccttgtcctgggctggacggcttactccgggaccgcaaagctgtccatcgtggaagaaccattgaatgatgggcacctccagatcgcccctacgagcccatgctactggtggctggaattgaccggttanccccgcaaagtgacaagcgtccatgggcaaaagagaagatagccgaggagatcaaagatgaaatcttttggtgaaagtgtataactacaatcaccgtaatgcccacaaaggtactctgtggagtatccccttgggacaaaactgtccgtcgaataaggatgtctttcagagaatccctgctctttaaacggcaaggccccgacgggaaggcccaaggttcaagtttgaaagagagagtacgagacagggcaaggaacaagttggttcttcccagaaacttgcgggttttaagaatgcctttggttttgattcattaaaaattataaagaaaaaaaaaaaaaaaaaaaaagtcgagc

SEQ ID NO: 129336 - DNA, 1326 bp, Homo sapiens
atggatgccaagatctcagtcagtacgacatctcgactcgactcacatcatatcactgctacgatatggtcgaatcgacatacgacattgcgtctgcatcgagcacacctagatcagcatgacgtccgatacatcgatcgatctcgactcgctcatgacgaattaacgtctgataggcgatacagtctgttagtcagttcacatcgacgttctcgccagacacacgacacgatcaacgtcaccatctcctatcgagcagttacacagcaacaacacaacggccgcatcctctggcaaaaagcttcacacggcgtcttaacacagtcggcatcctcacagccggcccgccgttcgtcagtagcatcagctcggtcgctctgcgttactagacacacgaactgtctctatgcagaaagcaaaaaatggagacgctgtcacagaaccacaggtggcagaaatgaggccaatggcaaagacaccgcagaagtggatttgctgaccaaggagctagaggactttgaaatgaagaaagctactgctcgagctgtcactggcatcctggcctcccatccctgcagtactgacgttcacattatcaacctctcactcacctttcacggtcaagagctgcccagtgacaccaaactggaattgaactcagtccgtcattatggcctcattggcttaaatggaactgaaaattccatgctgctctctgctgttgggaaacatggagtgcccatccctgagcacatcgacatctaccatctgactcgagagatgccccctagtgacaagacacccttgcactcactcgtcacagtctcatcgccgcgacaacgtgacgacatgagcgatggccatctctgcacagcacgacgtcatacagacatacgagacgatcgctctcctgacgcacccgatactgcacgatctctcgctcgctcgaccatcactacacgacgcatattcgcactcgcgacaccgagccgtaccttgcagcaagtctgcagcgcactcgcatacacatctcatccggctgcacgcacgcagcctctcgcctcaactgctctcacacgccgttacatgttaccaagccctcagctgccttctttacgcgaccatcgccgcactaatccactccactccgcggtagccacaattccacacacgactaccggagaagcagacgtctcgctcctgtgcatcggactcagtacgcttcactacgcgctcgtctatcatgtgagcgtactgactgcattgagtgctcagtctatgtcagcaactgatgcaagtatcatcttcttcgagccgaagaggtag

SEQ ID NO: 129337 - DNA, 537 bp, Homo sapiens
agaaaccctacaaatgcaatgaatgtggtaaagcctttaactggtcctcaactcttactaaacataagagaattcatactggagagaaaccctacaaatgtgaagaatgtggcaaagcttttaaccagtcctcaacccttactagacataagatagttcatactggagagaaaccctacaaatgtgaagaatgtggtaaagcctttaaacggtccacaactcttactaaacataagagaatttatactaaagagaaaccatacaaatgtgaagaatgtggaaaagcctttagtgtattctcaacccttactaaacataagataattcatactggagcaaaaccttacaaatgtgaagaatgtggcagtgcctttagggcattctcaacccttactgaacataagagagttcatactggagagaaaccttacaaatgcaatgaatgtggtaaagcctttaactggtcctcaactcttactaaacataagagaattcatactggagagaagccctacaaatgtgaagaatgtggcaagc

SEQ ID NO: 129338 - DNA, 457 bp, Homo sapiens
atgcccaggccagaaaaactgggaaaaacacaggttcccccacttgctgaatgtttgacaaaagattcttttttgggccaaaaacaggcatcactgggaccattgacatttagagatgtgaccatagaattctctctggaggagtggcaatgcctggacacggttcagcagaatttatatagggatgtgatgttagagaactacagaaacctggtcttcctggttattagttctcatttacacaagacttttggccagatcagagcataaaagattctttccaagaataatattgagaacatatgcaagatgtggacataagaatttacgattagaaaagattgtgaaagtgtcaatgaggaaacatcagataattcatactggaaagaaaccctacaaatgtgaagaatgtgcaaagcttttagccagtcctcaacccttagaaaacatgagataa

SEQ ID NO: 129339 - DNA, 397 bp, Homo sapiens
tttgccgtcctcatggcccactacgatgtgcaggaggaggatcccgtgctgactgtcatcacctacatggggctgagcgtctctctgctgtgcctcctcgctggcggccctcacttttctcctgtgtaaagccatccagaacaccagcacctcactgcatctgcagctctcgctctgcctcttcctggcccacctcctcttcctcgtggcaattgatcaaaccggacacaaggtgctgtgctccatcatcgccggtaccttgcactatctctacctggccaccttgacctggatgctgctggaggccctgtacctcttcctcactgcacggaacctgacggtggtcaactactcaagcatcaacagattcatgaagaagctcatgttccctgtgggc

SEQ ID NO: 129340 - DNA, 1335 bp, Homo sapiens
atggcgctgcaaaagattgtggacaaatttgagtcacttctcaccaatcagactttatggagaacagaagggagacaagaaatctcatccacagctaccactattctccgggatgtggaatcgaaagttctagaaactgccttgaaagatccagaacaaaaagtcctgaaaatccaaaacgatagtgtgagctattgaaactcaagcgattacagacaattgctctgaagaaagaaagacattcaacttgaacgtccaaatgaactcaatggacatccgttgcagtgacatcatccagggagacacacaaggtcccagtgtcattgcctttatctcatattcttctcttggaaacatcataaatgcaactttttttgaagagatggataagaaagatcaagtgtatctgaactctcaggttgtgagtgctgctattggacccaaaaggaacgtgtctctctccaagtctgtgacgctgactttccagcacgtgaagatgacccccagtaccaaaaaggtcttctgtgtctactggaagagcacaggggcaggggcagccagtggtccagggatggctgcttcctgatacacgtgaacaagagtcacaccatgtgtaattgcagtcacctgtccagcttcgctgtcctgatggccctgaccagccaggaggaggatcccgtgctgactgtcatcacctacgtggggctgagcgtctctctgctgtgcctcctcctggcggccctcacttttctcctgtgtaaagccatccggaacaccagcacctcactgcatctgcagctctcgctctgcctcttcctggcccacctcctcttcctcgtggggattgatcgaactgaacccaaggtgctgtgctccatcatcgccggtgctttgcactatctctacctggccgccttcacctggatgctgctggagggtgtgcacctcttcctcactgcacggaacctgacagtggtcaactactcaagcatcaatagactcatgaagtggatcatgttcccagtcggctatggcgttcccgctgtgactgtggccatttctgcagcctcctggcctcacctttatggaactgctgatcggatgctggctttcaaagcaacagctcagctcttcatcctgggctgcacatggtgtctgggcttgctacaggtgggtccagctgcccaggtcatggcctacctcttcaccatcatcaacagcctccaaggcttcttcatcttcttggtctactgcctcctcagccagcaggccaaacacaaattcacgcccatggaagttcccaggcagaatcaccgatgcttacagcagaattaa

SEQ ID NO: 129341 - DNA, 397 bp, Homo sapiens
ctccctcctctctgttttctcctcactctcctgccccacctcgacatccacagcgaggcaatgaagaagcccctgccaaggaagagcccgcttctcagtgggacaccgggaaggtagacacccaacagtcaccgctagtgggaggcgattgtgcagaagcacgagggttgttacaggatcgggcaggtcccctaccccagtctcggactcagggtcctgtctgaggcggccaccccgaagcgtggggtttgcggagacgtagggccgacctcccgcccccgctgcgcgcgtttctggccctgccagtgtctccgccggttgaaagcgcgtgtctgcgtcgggttctgttggagtgcgttcgatgcgccgtgggtccgcgctgcttccacccaacttc

SEQ ID NO: 129342 - DNA, 278 bp, Homo sapiens
atgaagtttcatgacagaggccaaatgcagcccaaacccagcccagcagaggctgtcaactcagcgccccagcgagagccggaaggttccatcctcagagctgcagaccctctcgtgtgggctgcaaaggccatgtctgcatcccgggcggaagttgggtggaagcagcgcggacccacggcacaccgaacgcactccaacagaacccgacgcagacacgcgctttcaaccggcggagacactggcagggccaaaaacgcgcgcagcgggggcgggag

SEQ ID NO: 129343 - DNA, 800 bp, Homo sapiens
atgaagtttcatgacagaggccaaatccagcccaaacccagcccagcagaggctgtcaactcagcgccccagcgagagccggaaggttccatcctcagagctgcagaccctctcgtgtgggctgcaaaggccatgtctgcatcccgggcgccctgggcccgacccctactacgcctctgcctcgacgcgaacgcggagcccgagcgcgcgtcacgccgtgtggggccgaagaggctgctacccagaggcggagtgcgggctcgcgagggtccccaccccactctcgctcccgccagcacctacggactcgcgtccccgccgcgcgccgactcggcgcaccgcccccggcacaggagcctcacgcgcctcttacctaacaggaagttgggtggaagcagcgcggacccacggcacaccgaacgcactccaacagaacccgacgcagacacgcgctttcaaccggcggagacactggcagggccaaaaacgcgcgcagcgggggcgggagggcagccctgggattcggcaaacgccagtcctccctgagatgcttccccatccttccctccgccaggccctacgtctccgcaaaccccacgcttcggggtggccgcctcagacaggaccctgagtccgagactggggtaggggacctgcccgatcctgtaacaaccctcgtgcttctgcacaatcgcctcccactagcggtgactgttgggtgtttaccttcccggtgtcccactgagaagcgggctcttccttggcaggggcttcttcattgcctcgctgtggatgtcgag

SEQ ID NO: 129344 - DNA, 824 bp, Homo sapiens
gtctccgccggttgaaagcgcgtgtctgcgtcgggttctgttggagtgcgttcggtgtgccgtgggtccgcgctgcttccacccaacttcctgttaggacccacccgaggacgggtcaccatggctttggagcacctggtagtgtggcatgtccacagtgaagaccagagtttcgttgtccttaagactgacctggggagacgtggctgcaggcatttgaggaagacggcaccgaaagcgaagaaggaagctcctgccccttctaaagctgaagccaaagcgaaggctttaaaggccaagaaggcagtgtttgaaaggtgttccgcagccacacgcaaaaaagaagatccgcattttcaattcaactttcaaggcggcccaagacactgcggactgccggagacagcccaaaatatcctctggaagagcgctcccagggagaaacaagccttgaccccacctatgcctatccatccaagtttccccgctgacccactgatctgcctctgccgtgaagaagataggaagacaaccaacacacttgtgttccattgtgggatgtttaaaggccaacaaggcaccaggtttaaaacagggctgtgaaagaagctgtatgacattgattgtggccaaaggtcaacacccctgattccggcctgatggagagaagaatggcatatgttccgactgggctcctgatttacgatgcttttgggatgtttgccaacaaaattggggttcatcttaaacttgagtccagcttgcctaattcttgaatatatatatatatatatatctttttcacccataaaaaaaaaaaaaaa

SEQ ID NO: 129345 - DNA, 1311 bp, Homo sapiens
atgctgcgaatggtgggtatcgagatttccaatggtcagtggtcaactcctccttgccaagtcctccacctagagggtaatgatatctataaccctaaagaacaaggattaggtaacacctgcagatggggctggatggctgctggtactagaagaaacctgtgctgggcaccgttccccttccttaacccagtggcttccctggtactgcattcaaccatccaaatcgccctacaagaatccaaggacagagttctgggaaccctgattaatagcccgttggtcacaagcacagataaagccaactggagcttgcgattggcattggaagtgggtgacgggggcggtcttgtaggactgagccctcaacctgtgggatctggtgctatgtccaggtgtccaaattgtacaagaaaattaataggaagtggaatttcaccaacttcttcaaccctggctgaagaacaaggttccgttgtcaaaactcattcacaccaaggtggtgctcgatgctcaaaagagaagggttggcagatacttcttatcttagttgctggcctctgccagttggtagtggttgtccagaatgttggagtaagaaagattccaaggaagtacctggctgcactcagagtggccataggacatgctttggccattgaaagaaggagaattcgagtggacgttgctgatcaagcacaggatacagacagggacgatcgttcttttggccgtgatagaaatcgggattctgacaaaacagatacagactggagggctcgttctgccacagacagctttgatgactacccgcctagaaggggtgatgataggtttggagacaagtatcgagatcgttatgattcagaccagtatggccgtgggtattggtatgagtatcgggatggcccatgccgggatatggatcgatatggctggcggcagtggcagaagggcatttggcagtgggtacccagggacaatgactacagaggaggcagggaccgctatgaagaccgatacaacagatgggatgatgggtcgtgcagctccagagatgatttctctcgggatgattgtaggtataatgatagacgtccccctcaaagacccaaactgaatctaaagcctcataatactcctaagggagatgattcttctgctagtacctcccagtccagtcgagcttcttttgtctttggaggggcaaagcccgttgatagagctgctagagaaacaaaagtagaagaatggctacagaaggaacaagataagttgcagcatcagctggatgaggcaaaactagaatga

SEQ ID NO: 129346 - DNA, 328 bp, Homo sapiens; identical to SEQ ID NO: 126749

SEQ ID NO: 129347 - DNA, 305 bp, Homo sapiens
gcgttcttttatctccgtccgccttctctcctacctaagtgcgtgccgccacccgatggaagattcgatggacatggacatgagccccctgaggccccagaactatcttttcggttgtgaactaaaggcaactttgaaaatgtgtgtacagccaacggtttcccttgggggctttgaaataacaccaccagtggtcttaaggttgaagtgtggttcagggccagtgcatattagtggacagcacttagtagctgtggaggagatgcagagtcagaagatgaagaggaggaggatgtgaactctta

SEQ ID NO: 129348 - DNA, 273 bp, Homo sapiens; identical to SEQ ID NO: 120637

SEQ ID NO: 129349 - DNA, 1344 bp, Homo sapiens
agtgtggtggaattcattccgtcctgcgcggttgttctctggagccagcgttcttttatctccggtccgccttctctcctaccataagtgcgtgccgccacccgatggaagattcgatggacatggacatgagccccctgaggccccagaactatcttttcggttgtgaacctaaaggccgacaaagattatcactttaaggtggataatgatgaaaatgagcaccagttatctttaagaacggtcagtttaggggctggtgcaaaggatgagttgcacattgttgaagcagaggcaatgaattaccgaaggcagtccaattaaagtaacactcggcaactttgaaaatgtcttgtacagccaacggttttcccttggggggcttttgaaataacacccacccagtggtctttaaggttgaagtgtgggttcagggccagtgcatattaagtggacagcactttagtaagctgttggaggaagatgcagaagtcagaagatgaagaggaaggaggatgtgaaactctttaagtatatctgggaaagcggtctgccccatggaggtggtagcaaggttccacagaaaaaaagtaaaactttgctgctgatgaaagatgatgacgatgatgatgaagaggatggatgatgaagatgatggatgatggatggattttggatggatggaggaagctgaagaaaaagcgcccagtgaaagaaatcctatacgagatactcccagccaaaaatgcacaaaagtcaaatcagaatggaaaagactcaaaaccatcatcaacaccaagattcaaaaggacaagaatccttcaagaaacaggaaaaaactcctaaaacaccaaaaggacctagttctgtagaagacattaaagcaaaaatgcaagcaagtatagaaaaaggtggttctcttcccaaagtggaagccaaattcatcaattatgtgaagaattgcttccggatgactgaccaagaggctattcaagatctctggcagtggaggaagtctctttaagaaaatagtttaaacaatttggtaagagaatttaccgtcttatttcatttctgtaacagttgatatctggctgtccttttttataatgcagagtgagaactttccctaccgtgtttgataaatgttgtccaggttctattgccaagaatgtgttgtccaaaatgcctgtttagtttttaaagatggaactccaccctttgcttggttttaagtatgtatggaatgttatgataggacatagtagtagcggtggtcagacatggaaatggtggggagacaaaaatatacatgtgaaataaaactcagtattttaataaagt

SEQ ID NO: 129350 - DNA, 1107 bp, Homo sapiens
atgggcgccttgctggatcaggagcacagtgaacaccctgccggatccagagagatggaagtcagtggtgggtctgtgacagtggcaaacagcagtcgtggacaacgagcgaaagctcaggcattcaccacagtggcagatgcaagaaaactctgggggatgcagggggctcctgttggagactgtgtgcaccattgcactgaaggtggtgttggtttgggttggagtgctggctggcactggtctgggtgtcctttctgtgacctgcaagcagttgtgattactcaggttgtaaaaagacagagaatggaacagcttggagggcttagaaaaagacaggaagatgtggaaggtttggaacttcctagagtcttgttgaatggttttgaccaaaatgctgatagtgatatgagtaatgaagtccagactgaggtggttttgggtgaagaagaggctatcagtgtgggtagaggggcaaaatcaggtgtgggctgggtcagagagatccatgctctgactctccatatgtggggcaatctgcagccactgtgggagttgagggacagttacctcaccactgatgtaatgtaccagagtggagaaaagctgcctctactgcacagaatagtttgtgcaagaagtggggcacagcaggcatcagtaagccccacccagatcccatgcacttggcaagttaatactgatagactcgccccagtatccaaaaagaaggaaataatcttaccagataccatcccagttaccctgggttccgtggactcactggatgtgggggtgaaggatcccgggcaccctcagtcttccattgtcagtgccagcagtgaagagatttcctcctgtaatgaccttggtcaaagtgaaacaattcatgggggttcgggccttgataaaccacctgaccacaaggtggacaaaggcccaactgaagaaagagcctgcctcttatcatattctgctgggagaaagtacaaggagtaccacattctgccggaacaagggtcagaaccacctcatcatggggacatcttatcaatatccttccaggcagcaagccatattgctcagacccctcctgcccatacctag

SEQ ID NO: 129351 - DNA, 1968 bp, Homo sapiens
atgttggcatctatgggagttgtggccaaggaaatgaaatatctgagctcaccttatccccagcatgcatttcataccaggatcaaatcactaatgaccgtgaatttccaggctcaactatggctgcctaatgaggctggccccactggggatggggactggggaggggacacacacgggtgcccaagcttcagtccacatctccctcggttcatccagaagcagccatggggcacaggaagacgtctgcttcaagagcatttcagctgcaaaagtctggttcctgtaattccctcccgggatattgaggcattccacttgcatgcggaccttatcctcaacactctgccaagtctggtcatcataataggtcagatagagtcacattctgaggaactgcgggctagagtttcaacatatgaatctggggaagatacaattcagtgcataacagtgacctggaagccaaaatatggagccacaagatggaaggatcctggatccccagatggccccttggaagagagaagactagaagacctctcaactaggaacaacagcattagactttttagaggctgcggctatcgggtgaaacagaactcctcacagagaccaaacaaggtttgtgggttaccagacactggtgttctcttacagacaaagtgtggtcttgtcagaaatagccaaagatcagcacaaacaaacacaaagcagcatgaagaactgttttctactgctggaataccagaaaatctgagcaggagacaagaagtgttgccaggacatggctttactggttgggttggttggacatggaaattgacatctggagaaggagtgactttccaccatctctcagcaacacacaagctgagtcatgccagctgccggcagggcaattttaagcccaaaggggccatgtccgtcacccgatccacagtacacccacacctagctttcctgtctgcagagataaacggcaaatgcgggaggccatgtgtctttctgggtatctgggccatcaactgtggaatggccattttatatgagcgtttatcagccttggtttgtgtatcagtgtcggagagacacctggattatacaatgcggtttctctttgacattcccccttccactttggaggctcgcattggcagccccctgtgggccctctcactgcatccccttagaagctccacagtgacttcctctgtggagctgattctccctgaatgcacagtggctgtgttagagattcaatatgtctttttgggggacacaattctcttcactacagtgggcaaagccagaagtggcacaagagacagagatggaggcagggcccagatcatgcaggttttgcaaggcaaaggccgggagctggacgctgccgcgcagcccgagggccagctgctccgggaggtgcgcgtgctcggggtccccttcatccctcgcgcccgggtggatgcgtggctggtgcacaccgtggctgtcgggagcgcggacgaggcccacgggctgctcggcgccgccgccgcctcgtccaccggaggagctggcgccagcgtggacggcggcagccaggctgtgcaggggggcggcggggatccccgagcggctcggagtggtcccttggacgccggggaagaggagaaggcacccgcggaaccgacggctcaggtggcggacgctggcggatgtgcgagcgaggagaacgaggtactaagagaaaagcacgaagctgtggatcatagttcccagcgtgaggaaaatgaagaaagggtgtcagccctgaaggagaactcacttcagcagaataatgatgatgaaaacaaaatagcagagaaacctgactgggaggcagaaaagacctctgaatctagaaatgagagacatctgaatggggcagatacttctttctttctctctggaagacttattccagttgctttcatcacagcctga

SEQ ID NO: 129352 - DNA, 2583 bp, Homo sapiens
atgaagcacctgaagcggtggtggtcggccggcggcggcctcctgcacctcaccctcctgctgagcttggcggggctccgcgtagacctagatctttacctgctgctgccgccgcccaccctgctgcaggacgagctgctgttcctgggcggcccggccagctccgcctacgcgctcagccccttctcggcctcgggagggtgggggcgcgcgggccacttgcaccccaagggccgggagctggaccctgccgcgccgcccgagggccagctgctccgggaggtgcgcgcgctcggggtccccttcgtccctcgcaccagcgtggatgcatggctggtgcacagcgtggctgccgggagcgcggacgaggcccacgggctgctcggcgccgccgccgcctcgtccaccggaggagccggcgccagcgtggacggcggcagccaggctgtgcaggggggcggcggggacccccgagcggctcggagtggccccttggacgccggggaagaggagaaggcacccgcggaaccgacggctcaggtgccggacgctggcggaatgtgcgagcgaggagaatggggtactaagagaaaagcacgaagcgtgtggatcatagttcccagcatgaggaaaatgaagaaagggtgtcagcccagaaggagaactcacttcagcagaatgatgatgatgaaaacaaaatagcagagaaacctgactgggaggcagaaaagaccactgaatctggaaatgaagagacatctgaagtgggacagatacttctttctctcttggaagacttattccagttgctttcatcacagccctgaaaattcacttggagggcatctccatttggggagatattcctcttcccaggcagtatcagtgatgggcatgaattcttcaagcacatttatcatgtaaactttcagcccaggcttataagtccaggatggtgaatcttcatgaggccatcttgctttgtcccaacaatacatttagaagagatccaacagcaaggacttcacagtcacaagaaccatttctgcagttaaattctcataccaccaatcctgagcaaacccttcctggaactaatttgacaggatttctttcaccggttgacaatcatatgaggaatctaacaagccaagacctactgtatgaccttgacataaatatatttgatgagataaacttaatgtcattggccacagaagacaactttgatccaatcgatgtttctcagctttttgatgaaccagattctgattctggcctttctttagattcaagtcacaataatacctctgtcatcaagtctaattcctctcactctgtgtgtgatgaaggtgctataggttattgcactgaccatgaatctagttcccatcatgacttagaaggtgctgtaggtggctactacccagaacccagtaagctttgtcacttggatcaaagtgattctgatttccatggagatcttacatttcaacacgtatttcataaccacacttaccacttacagccaactgcaccagaatctacttctgaaccttttccgtggcctgggaagtcacagaagataaggagtagataccttgaagacacagatagaaacttgagccgtgatgaacagcgtgctaaagctttgcatatccctttttctgtagatgaaattgtcggcatgcctgttgattctttcaatagcatgttaagtagatattatctgacagacctacaagtctcacttatccgtgacatcagacgaagagggaaaaataaagttgctgcgcagaactgtcgtaaacgcaaattggacataattttgaatttagaagatgatgtatgtaacttgcaagcaaagaaggaaactcttaagagagagcaagcacaatgtaacaaagctattaacataatgaaacagaaactgcatgacctttatcatgatatttttagtagattaagagatgaccaaggtaggccagtcaatcccaaccactatgctctccagtgtacccatgatggaagtatcttgatagtacccaaagaactggtggcctcaggccacaaaaaggaaacccaaaagggaaagagaaagtgagaagaaactgaagatggactctattatgtgaagtagtaatgttcagaaactgattatttggatcagaaaccattgaaactgcttcaagaattgtatctttaagtactgctacttgaataactcagttaacgctgttttgaagcttacatggacaaatgtttaggacttcaagatcacacttgtgggcaatctgggggagccacaacttttcatgaagtgcattgtatacaaaattcatagttatgtccaaagaataggttaacatgaaaacccagtaagactttccatcttggcagccatcctttttaagagtaagttggttacttcaaaaagagcaaacactggggatcaaattattttaagaggtatttcagttttaaatgcaaaatagccttattttcatttagtttgttagcactatagtgagcttttcaaacactattttaatctttatatttaacttataaattttgctttct

SEQ ID NO: 129353 - DNA, 394 bp, Homo sapiens
aagacgacgatttcgtgtggcggctgcggcagtagggacagcatgagcagtggtgctgtcagcgcggccgtcggagacatgggagacccggggtcggagataatagaatctgtccctccagctggccctgaggcatctgagtcaacaacggatgaaaatgaagacgacattcagtttgtcagtgttctctttggtttccagcaagatgcatcaaaccttaccatagcatggctaggacccaacccggtaccagaaataaagaaaatggccctgcaggacccacagccctggacaatgtggcttcctcagatgacacaggccgacacaggccccagacgtaatgctgaagaagacaagtcagatgactgaggcgaatctgccccgacacagacac

SEQ ID NO: 129354 - DNA, 1832 bp, Homo sapiens
atgcagaggaaaaccatgagtcagccagagctcatcaaagatacctgggtgacttccagctgtgatgagccaagcctgactcagaccagaccaagtgcccaactgggcaagcccagatcaccaacccacggaattagagacccatattcgggaaatgcctttctgcctggtgaaagctccagtgaggatgaagagcctttagcagaattgtcaaaggaagaattgtgcgccaaaataaaaagcctgaaagaaaaacttaacaaacacccgggaaaggaaaacagccgactttcgacagtctttgggtcatgctttcaagtgtttaccacaaggcagttcacccagtttgaagaattggttggtatggccgaggctctgcttaagggtgggggaaccatgtctacatctgcatccaccctctggagagcaacaaacaactcctcgccagattcatttgcctcaacatgcagtaattctaattctaactccagttcaccagtttccttaaagcctgaggaagagcatcagactgatgagaaacagttccagattgaaaaatggcagattgcccgttgtaacaagagcaagcctcagaagtttattaatgatttaatgcaagtactttacacaaatgaatacatggccactcacagcctgacaggggcaaaatcctctacttcaagggacaaagctgtaaaaccagctatgaatcagaatgaagtccaaggaaatcatagcaagatgcatcaaaccttaccatagcatggctaggacccaacccggtaccagaaataaagaaaatggccctgcaggacccacagccctggacaatgtggcttcctcagatgacacaggccgacacaggccccagacgacccagctggcccctggcttcgcccacccactgcagctggcgtcttttaggcgcatggttcttttcctctccggcgaggggcggtctcggggcggacccgaactacaattcccagcatcctgccggcgcggggagggaagcccgggagtgagagaaagcggctccgggggcatagcggccactagcactccaaactacccacccaaccaagattccaaagagcatgacattcgaggcgccgaacaccagaaacaagaacagccggccaaaccaccccatacagcacgatcggcttaccccccacagaagagctcataccccgcaaacgcaaaagcaacccgccactcccccgaaaccgccgcagcaaaggaagcgcgcgccccagccgcagcccagccgcaacgacaccagccgaacccctcgccggcgccccacacccgccccgccacagcagccacgcgccagcctgagcgccgcgtcccctccccgacccacaggcaccccgcggcaacaaggctgagcccacgccgtcagtcgccctcgcctcgcccgcaccatgatcgccgcggctttcctcgtcttgctgagaccctacagcatccaatgtgccctcttcctcttgttgcttctgctgggcaccatcgccaccatcgtcttcttctgctgctggcaccgcaagctccagaaagggaggcatctgatgaaatcggtcttctcgggtcgttcaagaagccgaggatgtcccaccgaattccaggagtctgcgatgtgctttcccaaccctggtctcccagattcctgtggtgaaagtcaggctgtgacaatcctgattttaaggaaatttcagaaagtgatatgggtaattgaggtaccattagattataagaaagggtcttgggagtacttcagtagaatggagactattataatgccctttgagaatatccagagtgaatag

SEQ ID NO: 129355 - DNA, 1044 bp, Homo sapiens
atgtctacagctcaaatccgaacaaataaaaaccatgttttgctgtttattttatatgattgtcgaagacaaatgaattccaagctgcgtcgtctccgggatcgccgccgccttccacccgggctcgcctctgatgcccctgccagagccagctcctggtggacccatgtggagatgggaccaccagatcccatccttggagtcaccgaaggctttaagagggacaccaatagcaaaaagatgaatctgggagttagtgcctacagggaccacaacggaaagccttacagcatccacaaggcagaggcccagattgcagccaaaaatttggacgaggactacctctccattgggcggctggctgaattttgcaaggcatctgcagaagtagccttgggcgagaatagcgaagtctcgaaaagtggccggtttgtcactgtgcagaccatttctggaactagtgccttaaggatcagagctagttttctgcaaagatttcttaagttcagccaagatgtctttctgcccaaaccaacctggggaagtcgcacacccatcttcagggatactggcatgcagctacaaggttatcgatactatgaccgcaagacttgcggttttgacttcacagacactgtggaggacatttcaaaaacaccagagcaaagtcttcttcttctgcatgcttgctcccataatcccacaggagtggaccctggtcccaagcagcagaaggaaatagcaacagtggtgaagaaaacaaaaatctctttgcactcttcgacatggcctaccaaggctttgccagtggcaatggtaacaaggatgcctgggctgtgcgccactctgccaattatacgccattgtcgctgccaatcatacaccaagaacatggtcttacacagtgagggtgtggcaggcttcaccatggtttgcaaagacgcagatgaagccaagagggtagagtcacatttgaagatcttgatgtgtcccatgtattccaaccctcccctcaatgggacccgtttgcttctaccattctga

SEQ ID NO: 129356 - DNA, 1266 bp, Homo sapiens
atgaagaagaaccatgaagaggaagtaaaaggcctacaagaccagattgccagctctgggttgactgtggaggtagatgcccccaaatctcaggaccttgccaagatcgtggcagacatccaggctcaatatgatgagctggctcggaagaaacgacaggagctggacaagtactggtctcagcagattgaggagagcaccacagtggtcaccatgcagtccactgaggttggaactgctgagatgacaatcacggagttgagacggccagggtcacccttggcctccaggcccacaggaatctcaggcctaattggtcttccaggggctcctcctccagcacctgagtcggaaagccagtcagttcacatcactctaggaatgtttgctgggggattgaaggagatggaacaggaagaggtcctgatccacggtgtgtcctacaatgctatgtgccaaatcctacatttcatatacacctccgagctggagctcagcctgagcaatgtacaagagacactggtggctgcctgccagcttcagatcccagaaattatccatttctgctgtgatttcctcatgtcctgggtggacgaagagaacattctcgatgtctaccggctggcagagctgtttgacttgagccgcctgactgagcaactggacacctatatcctcaaaaactttgtggccttctctcggactgacaagtaccgccagcttccattggagaaggtctactccctcctcagcagcaatcgcctggaggtctcctgcgagaccgaggtatatgagggggcccttctctaccattatagcctggagcaggtgcaggctgaccagatctcgctgcacgagcccccaaagctccttgagacagtgcggtttccgctgatggaagctgaggtcctgcagcggctgcatgacaagctggaccccagccctttgagggacacagtggccagcgccctcatgtaccaccggaacgagagcctacagcccagcctgcagagcccgcaaacggagctgcggtcggacttccagtgcgttgtgggcttcgggggcattcactccacgccgtccactgtcctcagcgaccaggccaagtatctaaaccccttactgggagagtggaagcacttcactgcctccctggccccccgcatgtccaaccagggcatcgcggtgctcaacaacttcgtatacttgattggaggggacaacaatgtccaaggatttcgagcagagtcccgatgctggaggtag

SEQ ID NO: 129357 - DNA, 1146 bp, Homo sapiens
atgacgggtcggcaaagcctgagtcctgtcctctcactctcctccctggatagcatgagcttcaccactcgctccatcttctccaccaactacctgttcctgggctctgtccaggtgtccaactacggcgcccggccggccagctgcatggccagcgtctatgcaggcgccgggggctctggttcccggatatccgtgtcccgctccaccagcttccggggtggcatggggtccggggacctggccgcggggatggccgggggtctggcaggaatgggaggcatccagaataagaaggagacaatgcaaagcctgaatgaccgtctggcctcctacctggacagagtgaggagcctggagaccaagaaccggaagctggagagcaaaatccgggagcacctggagaagaagggactccaggtcagagactggagtcattacctcaagaccatcgaggacctgagggttcagatcttcgcaaatactgtggacaatgccggcatcgttttgcagattgacaatgcctgtcttgcagccgatgactttagagtcaagtcactgatgaccaatgtcacttggctgccactggagacagagatggaggctctcaaggaggagctgctcttcatgaagaagaaccacgaagaggaagtaaaaggcctacaagcccagattgccagctctgagttgaccgtggagattgagaagagcaccacagtggtcactacgcagtccaccaaggttggagatgctgagatgacgctcacggagctgagacgtacagtccagtccttaaagatggacctggactccatgagaaatctgaaggccagcttggagaacagcctgagggaggtggaggcccgctacaccctgcagatggagcagctcaacaggatcctgctgcacctggagtcagagatggcacagagccgggcagagggacagcaccagatcggggagtacgaggctctgctgaacatcaaggtcaagctggaggctgagagcgccacctaccaccgcctgcttgatgatgatgacttcaatcttggtgatgccctggacaacagcaactccatgcaaaccatccaaagaccaccacccgccgcaaagtggtgtctgagaccaatgacaccaaagttctaa

SEQ ID NO: 129358 - DNA, 454 bp, Homo sapiens
tttccaagaagccttcttgctgcagaccagtaattaatggtcccgctgctcctctctttcattggtgccttcttcttcttcagggaatgctgattcattctggcctttcagatgcttaaccccttttatggtgggtggtgtgtacacactctgcttcctttgcttaggggatgcattctgtaattccccttgtgtgttgggccccctcttgtcatctatttctttttagatgtctttcaaaagagaatcttgaagagagaaaacattctggacagagtgaggagcctggagaccaagaaccggaagctggagagcaaaatccgggagcaccttttgtcagttgtgatgattctgacgtctcttaactcttgatcagatatcagaggtttctgaagtttcttggttcgtggctctccaaggtctcggtacattttctcgtgccgaattcttggcc

SEQ ID NO: 129359 - DNA, 1436 bp, Homo sapiens
  misc_feature (1)...(1436): n = a,t,c or g
aagaagacctggaagccttaggcctcgatacgcatgtgacggggcgacccacgcgtgcggcgacgtacgcaaagcctgagtcctgtcctttctctctccccggacagcatgagcttcaccactcgctccaccttctccaccaactaccggaccctgggctctgtccaggcgcccagctacggcgcccggccggtcagcagcgcggccagcgtctatgcaggcgctgggggctctggttcccggatctccgtgtcccgctccaccagcttcaggggcggcatggggtccgggggcctggccaccgggatagccgggggtctggcaggaatgggaggcatccagaacgagaaggagaccatgcaaagcctgaacgaccgcctggcctcttacctggacagagtgaggagcctggagaccgagaaccggaggctggagagcaaaaatccggagcacttggagaagaagggaccccaggtcagagactggagccattacttcaagatcatcgaggacctgagggctcagatcttcgcaaatactgtggaacaatgccccgcnaccgttctgcaagaatcgacagtgccctgtcttgcctgctgatgactttagagtcaagtatgaagacagaagctggcccatgtgcccagtctgtggagaacaacatccatgggctttgcaaggtcattgatgacaccaatgtcactcggctgcagctggagacagagatcgaggccctcaaggaggagctgctcttcatgaagaagaaccacgaagaggaagtaaaaggcctataagcccagattgccagctctgagttgaccgtggaggtagatgcccccaaatctcaggacctcgcggagatcatggcagacatccgggcccaatatgacgagctggctcggaagaaccgagaggagctagacaagtactggtctcagcagattgaggagagcaccacagtggtcaccacacagtctgctgaggttggagctgctgagacgacgctcacagagctgagacgtacagtccagtccttggagatcgacctggactccatgagaaatctgaaggccagcttggagaacagcctgagggaggtggaggcccgctacgccctacagatggagcagctcaacgggatcctgctgcaccttgagtcagagctggcacagacccgggcagagggacagcgtcaggcccaggagtatgaggccctgctgaacatcaaggtcaagctggaggctgagatcgccacctaccgccgcctgctggaagatggcgaggactttaatcttggtgatgccttggacagcagcaactccatgcaaaccatccaaaagaccaccacccgccggatagtggatggcaaagtggtgtctgagaccaatgacaccaaagttctgaggcattaagccagcagaagcagggtacccttt

SEQ ID NO: 129360 - DNA, 1452 bp, Homo sapiens
atgaagctgctggcccgtactccgcatgaacagaaggacggctgtgggacctctagaaaacagcggtgttcctccaacgacagttctagaattcctctaagacgagcacaggaaggtggaggttccaaggtggacgaactgacggtagccatgcctcctcaggtcaggttcggagccaacactgctgctttccccacacagcgaccagctctcaatggagtctttgatgagcagcccgcatttggcatcgtggtgtctggcctgcagggaggacccgggggatccagcagcagccggaccacctgtacgggagcagccagcatgtggcagaggaggtttcatgccacctcttgccatcagggaagacctgccttgagaagctgctcactgagggccctgggagatgctaatgaccataaagagtcatccagatgcagagaggcagccccaaagggtgaaaaagctaactcaggtcttctggtccagcgcatccctccgggaaagagaaagacctatttgttttggcctaaactgaagaaggcagctgaaattccagctgcctacagagaagcactcgatgaagcccttggaatttcagggggtgggagggatgttggggagagggtatacaaagggccttccatgatggcaaatccacagaaaccagtactagaggccctttcatccaacaagtatttgcatatattatgtgccaagcactgtgataggcacgaaggatacaaagatgaaattaaagttaaagaggcaagctccagagtgaacggctgcgttgaggcgatgctgagtgcacccttaccattggacaggcgaaatgagcacgtggagagtaaggggaagccttttaccatgggccttagtcccagagtcctctctgcttccaggcgcgatggtttaagggaaaggaaaggaagtttctttagaacagtggttctccatgataccaagactgacagcaacagcgacactgagaccaacagcagcacaccacctagaaccctgttagaaatgcaaattctcagtcccacctggacctatgaaatcagcagctctaggactcttggatgtggtccatctgtgtttcagcaaagggcttcttactccccttctgtgtcaggcccaaggctaggctgtcccttaatggatggtggaagaatgaggtgcccaccaggaaacccagagagctgtgtcagcgaggctaacctaattcccattagcgttcctgttgctccacatgctcaccagcatttggtgttgtcagtgttttggaaaatcaccattgtaatagggggaaaaacctgtgtggctcagaatcacagtaatgaagccaaaatgaaacaaagacctgaaatcaatcatgcatcaccaccaggagccttcgcctggagccaaagtggagaacccatcgcatcagcaatgactgtgccagcctag

SEQ ID NO: 129361 - DNA, 787 bp, Homo sapiens
atgtgggatgtggggcaggactccagcctgctccgtggagcgggaggccccggtctgcagctgtggtttgggcggctgcagctgcacctgggagggctccgagagcacagggatgcctgggtccacagccgtggcttgggcagctgcagcggcatgcagggagctgccaccccgactcagaatgggagaggctcctgcctgtccccagctcctgccagttccatggaacatgcagccccagccgtgcctccctgctgcagctggtgtgacagcagcagccgctccagatggcctgccactgccaccactgagacaggtccccgcacagtcccttctgcacaggagagcgccgtgggtttgctgaccgcgtccctgctgaaaggcgactccgggagcacaggcttctgccctctcctgatgtccctagcagcgccgggcacgcagcagtgctcgctgggtttttgttgcacctttgagaggaaaaggagctcggtgtcccctgcagcccctggaactgcggccccggaacttgcagctgcattgatgttgatgcctaggaagaaccagattgccgtttatgaactcctttttaagcagggagtcatggtggctaaggagggtgtccacctgcctaggcacccggagctggcagacaagaatgtgcccaaccttcacatcatgaaggccatgcaggtctctcaagtcccaaggccacagggaggaacagtttgcctggagacatttctactggcaccttacccgtgagggtatccagagtatccaatga

SEQ ID NO: 129362 - DNA, 392 bp, Homo sapiens; identical to SEQ ID NO: 8505

SEQ ID NO: 129363 - DNA, 716 bp, Homo sapiens; identical to SEQ ID NO: 114736

SEQ ID NO: 129364 - DNA, 372 bp, Homo sapiens
tcacaatccccagattggagataggaaccgaccagggaaaacacattcgccaaagcccacagcggcaagtgcagggccaccaggtctgcgaggtcggggtggggggagcacactccgggcgtaaaagtctgctaaacacctttccataacggaggagcaacgagtggggtgtccccgtgcccgtgcctgctcgaactggcggcggtctgggcagaaaacgcctccctctcctcctcttcctccttcttcccctcctccttctccctctcctcctcctcctcccgcgggccccggcgaagatcccgccgccactgcctctgcctccgctgccccccagggaggcaccgccggcgcccggcccggcgctgccat

SEQ ID NO: 129365 - DNA, 740 bp, Homo sapiens
tttttttttttttttcggcggagatgcctcgttggggctgggaaactcctgcaaaactcgagaccaggaagccagcccgcaccccaacccccaccaaagccacctactcttcttctgtgggaggccagtccacatccgctctcacccgatgagagatattcagctggatccaaagtgactgatgaagggaaggaaatcatgtcaagcgaagccttgaaaaagctgccctgagacggtgtcccgccgaaagaatgttggctcaattaagaaacatcagggagataaattcaacccagtgtgtctaaaaatgactaccaaaacggagtttgttttgtgcggttgggtaccatgtcgctgtctacggagggggaagaggagactgtcactactcttgattattctcattgcagctttagaacaagttccggaaagagatttttacttttgaaaaaaccttggaggaactctatttagatgctaatcagattgaagagcttccaaagcaactttttaactgtcagtctttacacaaactgagtttgccagacaatgatttaacaacgttaccagcatccattgcaaaccttattaatctcagggaactggatgtcagcaagaatggaatacaggagtttccagaaaatataaaaaattgtaaagttttgacaattgtggaggccagtgtaaaccctatttccaagctccctgatggattttctcagctgttaaacctaacccag

SEQ ID NO: 129366 - DNA, 337 bp, Homo sapiens
gtcgacgaggaggcgttcttgtgttgtgataaagatggagaggttaaaggagccacttattagtaatgttgatagtagaatgatggctagggtgacttcatatgagattgtttgggctaaatcatattatggccaagggtcatgatggcaggagtaatcagaggtgttcttgtgttgtgataagggtggagaggttaaaggagccacttattagtaatgttgatagtagaatgatggctagggtgacttcatatgagattgtttgggctagatcatattatggccaagggtcatgatggcaggagtaatcagaggtgttcttgtgttgtgataaggg

SEQ ID NO: 129367 - DNA, 5174 bp, Homo sapiens
ccccaacgttgtaggcccctacgggctactacaacccttcgctgacgccataaaactcttcaccaaagagcccctaaaacccgccacatctaccatcaccctctacatcaccgccccgaccttagctctcaccatcgctcttctactatgaacccccctccccatacccaaccccctggtcaacctcaacctaggcctcctatttattctagccacctctagcctagccgtttactcaatcctctgatcaggatgagcatcaaactcaaactacgccctgatcggcgcactgcgagcagtagcccaaacaatctcatatgaagtcaccctagccatcattctactatcaacattactaataaggggctccttggtaccatgtgggaagcgctgtgaagagttgttgccttccaagatatacccaaattcccagttccagcccgtgtcattaaaactccgctggcgtgaaagatgacgtccttagcccagcagctgcaacgactcgccctccctcaaagtgatgccagcctcttatctagagatgaagttgcttctttgttatttgaccctaaggaagcggccacaatcgacagggacaccgccttcgccattggatgtactggcctggaagagttgcttggaattgatccttcctttgagcagtttgaagcaccgttgttcagtcagctagcaaaaaccttggagcgaagtgttcagaccaaagcagtaaacaaacagttggatgaaaacatttcattattccttattcacttgtcgccttacttcctgcttaagccagcacagaagtgtctggagtggttgattcacaggttccatatacatctctataatcaagatagcctcattgcttgtgttctgccataccacgagacaagaatatttgtgcgagtcatacagcttctaaaaattaataattcaaagcacagatggttctggttgttgccagttaagcaatctggagtgccgttagctaaaggaactttgattacccactgctacaaagatcttggattcatggatttcatttgcagtttggtgacaaaatctgtgaaggtttttgctgagtacccgggcagctcagctcagttgagggtgctcttggctttctatgcttctaccatagtgtcggcgctggtagctgcagaggacgtatcagacaatatcatcgccaaactatttccctatatccaaaagggattgaaatcatctttaccagattacagagctgcaacatacatgataatatgtcagatttctgtgaaagtgaccatggaaaatacctttgtgaattcattggcatcacagatcatcaaaacattgaccaagattccctctttgatcaaggatgggttaagttgcttgatagtgctcctgcagagacagaagccagagagccttgggaaaaagtatgtacaattgaattgagaaatggtgctagtcagaggccattccctcacttatgtaatgttcctgatcttattacaatacttcatgggatttctgaaacttacgatgtcagtcctcttctgcattacatgcttccccatctggtcgtctccatcattcatcatgttacaggagaagaaactgaaggaatggatggtcaaatctacaagagacacttagaagctatacttacaaaaatatcactgaagaacaacttagaccatttgttggctagccttctatttgaagagtatatttcatatagttcacaggaagaaatggattctaataaagtgtctttgcttaatgaacaatttcttccactcattaggcttttagaaagcaaataccccagaacattagatgttgtattagaggaacacttaaaggaaattgcagatctgaaaaaacaagagcttttccatcagtttgtttctctttctacaagtggaggaaagtatcaggagggtgttgatgaatctttcataaaagaagctgttttagcccgattaggtgatgataatatagatgttgttttgtcggctataagtgcttttgagattttcaaagaacacttcagttcagaagtgacgatttcaaatcttctgaatctctttcaaagagcagaactttcaaagaatggagaatggtacgaggtacttaagatagccgctgacatattaattaaagaagagatactgagtgaaaatgatcagttgtcaaatcaggtggttgtatgtttgctgccatttatggttatcaataatgatgatacggaatctgctgagatgaaaattgctatatatttatcaaaatcaggaatctgctccctgcaccctctattaagaggctgggaagaagctcttgaaaatgtaattaaaagcacaaagccaggaaaactaatcggtgtagcaaatcagaagatgattgagttgttggctgataatataaatttaggagatccttcttcaatgttaaagatggaaatcccctcagaatggcacattgaactgatgttagacagagggatcccagtggagctgtgggcacattatgtagaagagctcaacagcactcagagggtggccgtggaggactcggtttttcttgtattttccttgaaaaaatttatttatgcactgaaagctcctaaatcttttcctaaaggtgatatatggtggaatcctgaacaactgaaagaagacagcagggactatctgcacttgctcattgggctgtttgagatgatgctcaatggtgccgatgctgttcatttcagagttctgatgaaacttttcataaaggtgcatctagaagatgtttttcagttattcaagttctgttctgttttatggacctatggttctagcctttcaaatccactaaactgcagtgtgaaaacagtgctgcagactcaagctctttatgtgggctgtgcaatgctttcttctcagaagacacagtgtaaacaccaactggcatccatatcttctccagtggtgacatctttactcattaacctgggaagccccgtaaaagaagttcgtagggctgccattcagtgtctccaggccctcagtggagtggcatccccgttttatctgataatagatcatttgatttctaaagcagaggagatcacttcagatgctgcctatgttattcaggatttggctactttatttgaggaactacagagagaaaagaaactgaaatctcatcagaagttgtctgaaactttgaaaaacttacttagttgtgtgtatagttgcccatcttatatagcaaaagatttgatgaaagtacttcagggagtcaacggtgagatggtgctttctcagctattgcctatggctgaacaactgctagaaaagatccagaaggagcccacagctgtgctgaaagatgaggccatggttctgcatctcactctgggaaagtataatgaattttcagtttcccttttaaatgaggatccgaagagtctagatatatttataaaagctgtgcacacaacaaaggaactttacgcgggaatgccaaccattcagatcacagcccttgaaaagattacaaaaccattttttgcagccatatcagatgaaaaagttcagcagaagcttttaagaatgttgtttgatttattggtgaactgtaaaaactcacattgtgctcagactgtcagcagtgtttttaaagggatttccgttaatgctgaacaagtccgaatagaactggagccaccagataaagctaaacccttgggcacagttcagcaaaaaagaaggcaaaaaatgcagcagaaaaaatcacaagatctagaatctgttcaggaagttggaggttcttactggcaaagagtaactctcatcctggaattactgcagcacaaaaagaagctcagaagtcctcagatattggtgccaactctttttaacttgctatcaagatgtttagaacccttgccacaagagcagggaaatatggaatacaccaaacaattaattcttagttgtctgctcaacatctgccaaaaactatctccagatggtggcaaaatacccaaagatattttagatgaggagaagttcaacgtggagttgatagttcagtgcatccgcctttcggagatgccgcagacccatcaccatgcccttttacttttgggcactgttgctggaatatttccggataaagttttacacaatatcatgtctatttttacatttatgggagccaatgtcatgcgcctagatgatacttacagttttcaagttattaacaagacagtgaaaatggttattcccgcacttattcagtctgatagtggagattctatagaagtttcaagaaacgttgaagagattgtggtaaaaatcattagtgtatttgtggatgcgctgccacacgtcccggagcacaggcgcctgcccatccttgttcaacttgttgatacactgggtgcagagaaattcctctggattctcctcatcttgctttttgaacagtatgtcacaaaaacagtgctggcggctgcctatggcgaaaaggatgctattttagaagcagacactgaattttggttttcagtctgttgtgagtttagtgtccagcatcagatacaaagcttgatgaatatcctccagtacttactaaagctgccagaggaaaaagaagaaaccattcccaaagcagtgtcatttaataagagtgaatcacaagaagaaatgctacaggtttttaatgtagagactcacactagcaagcaactgcggcattttaaatttttgtcagtgtccttcatgtctcagctcctgtcttccaataattttctgaaaaaggtagttgagagtggtggtcctgagattttaaaaggccttgaagagaggttgctggagaccgttctcggctatatcagtgcagttgcacagtccatggaaaggaacgcagacaaactcaccgtgaagttctggcgcgcgctccttagtaaagcttacgacctgttagataaggtcaatgccttgctgcccacagagacattcattcctgtgatcagagggctggtgggcaatcccctgccatctgttcgccgcaaagcgctggaccttttgaataacaagctgcagcaaaatatatcctggaagaagacaatagttacccgtttcctaaaactggttccagaccttttggccattgtgcagcgtaag

SEQ ID NO: 129368 - DNA, 1355 bp, Homo sapiens
ctttttttttttttttaggtttgaaggggaaatgctggagattgtaatgggtatggagacatatcatataagtaatgctagggtgagtggtaggaagttttttcataggaggtgtatgagttggtcgtagcggaatcgggggtatgctgttcgaattcataagaacagggaggttagaagtagggtcttggtgacaaaatatgttgtgtagagttccaggggagagtgccttcatatgttgttccttaggaagattgtagtggtgagggtgtttattataataatgtttgtgtattcggctatgaagaatagggccgaaagggccctgcggccgtattccgatgttgaagccctgagactaagttcggacttccccttccggcaaaggccgaaagggggttccggttggtctctgcttagtgtggagataaatcaatattatggcccaagggtcatgattggcaggagtaattcagaagtggtccttgtgttgtgaataagggtgggagaaggttaaagggagccacttattaagtaaatgttgataagtagaaatgatggcctagggtgacttcaatatgagaattgtttgggcttacttgctcgcagtgcccccgaatcaggggcttagtttgaagtttgatgctckaccctgaatchagagghattgtagtaaaacggctwaggcttagcaggtggctcagvaatyaaatmaggtaggcctmaggttgmaggttgracctagggggttgggttatggggtaggggggttcatacgtagaagagcgatggtgagaagctaaaggtcgggggccggtgatgtaagagggtgatggtagatgtggcgggttttcaggggctctttggtgaagagttttatggctgtcaggcgaagggtttgtagttagcccggtaggggcctagcaacgttggggccttttgcgtagttgtatatagcctaagaatttttccgttcgggtaagcattacggaatgccattgcgattagaattgggtaccaatgaggagtaggaggttggccatgggtatgttgttaagaagaggaatttgaacctctgactgtaaagttttaaagttttatgcgattacccggggtctgccatcttaacaaacccctgttcttgggtgggtgtgggtataatactaaagttgagatgatatcatttacgggggaaggccgctttgtgaagtaggcccttatttctcttgtcctttcgaacagggaggaatttgaagtagatagaaaccgacctggattactccggtctgaactcagatcacgtaggactttaatcgttgaacaaacgaacctttaatagcgactgcaccaatcgg

SEQ ID NO: 129369 - DNA, 3030 bp, Homo sapiens
tggctatggagcaggcgggcaccagacctgcggcgacagagcatccacggctccggcggcccatgccctggctgctgctactgcctctcctgctgctgttgctgctgctgctacctggcccagcggcctcccagctgcgatactctgtgccagaggagcaggcacccggcgcgctcgtgggcaacgtggctcgcgcgctggggcttgagctgcggcgcttggggccgggttgcttgcgcatcaaccatctgggtgcgcccagtccgcgctacctggagctggacctgacgagtggagcgctcttcgtcaacgagcgcattgatcgggaggcgctgtgtgagcagcggcctcgctgcctgctcagcctggaagtgctggcgcacaaccccgtggcggtgagcgccgttgaggtggaaatattggacatcaacgacaactcaccgcgtttcccgcggcccaactaccagcttcaggtaagcgaatcggtggcgcctggagcgcgctttcacatagagagtgcgcaggaccccgacgtgggcgccaactcagtacagacctacgagctcagccccagcgagcacttcgagctggaccttaagcccctgcaggagaacagtaaagtgcttgagctggtgctgcgtaagggcctagaccgggagcaggcagccttgcaccacctggttctcacagccgtggatgggggcattccagcccgctcgggtacggcacagatctctgtgcgtgtcctggacactaacgacaactctcctgcctttgaccagtccacttatcgcgtccagctacgggaggactcacccccaggcacattggtggtgaagctgaatgcctcagacccggatgagggctccaatggtgagctcaggtactccttgagcagctacacgtcggaccgggagaggcagctcttcagcatagatgccagtaccggggaagtgcgagtaattggggggctggattatgaggaagcctcctcctaccagatctatgtgcaggcgactgaccggggtccagtgcccatggcaggtcactgcaaggtgctggtggacatcgtggacgtgaatgacaatgccccagaggtggtgctcacggacctgtatagcccagtgcctgagaatgctacacccaacaccattgtggccgttctcagtgtcaatgaccaagactcaggccccaaccggaaagtgagcctgggtctggaggccacactgcctttccgactgaatggctttggaaactcctatacactggtggtgagcggcccactggaccgagagcgggtggctgtctacaacatcacggtgacagccacagatgggggaataccgcagctcacatccctgcgtacactgaaggttgagatctctgacatcaatgacaatccaccaagcttcctggaggactcctattccatctacatacaggagaaacattttgcaaggtgtgttgctctgtactgtgcaagccacagacccagatgaaaaggagaatgcagaggtgacctactcccttctggagagggagattcaagggctgccagtcacctcctatgtctccattaacagtgccagtggcagcctttatgctgtcaactcctttgactatgagaagtttcgggagttctttgtgactgtggaggctcaggacaaggggagcccaccactgagcagcactgtgactgccaacgtatatgtggtggacatgaatgaccatgcccctcacattctgtaccctacctcaaccaactcgtcagcagccttcgagatggtgcctcgaactgcccctgctggctacctggtcaccaaagtcatagctatggactcagactctgggcaaaatgcttggcttttttaccatctagcccagacttctgacctggacctctttaaggtagagctgcacacaggagaaattaggactaccaggaagatgggagatgagagtggtagcactttcaacctgaccgtggtggtccgagataatggagagccatcactatcagcctctgtggccattacagtagctgtggtggatagggtttccaaaatcctccctgacactcagaggcatgttaagagccctcggacatactctgaaattaccctttatctaataatagcattaagcacagtgtcttttatatttcttttgacaatcatcattttgagcatcatcaagtgctaccgctacactgcgtatggcactgcatgctgtggaggcttctgtggagtaagggaaaggtcccctgcagaactgtacaaacaagccaacaacaatattgatgccaggataccgcatggcctcaaagtgcagcctcacttcattgaagttcgagggaatggctccctcaccaagacctactgctacaaggcctgtctgacagcaggctcagggagtgacactttcatgttttacaatacaggggcccagacaggaccagggccttcgggagcccaagcagcagtgactgacagcaggaatctcacaggccaaagtggtcagaatgctgggaacctgattattctcaaaaatgaggctgtttctcaaaatgagccacgacagcccaaccctgactggcgttactctgcctccctgagagcaggcatgcacagctctgtgcacctagaggaggctggcattctacgggctggtccaggagggcctgatcagcagtggccaacagtatccagtgcaacaccagaaccagaggcaggagaagtgtcccctccagtcggtgcgggtgtcaacagcaacagctggacctttaaatacggaccaggcaaccccaaacaatccggtcccggtgagttgcccgacaaattcattatcccaggatctcctgcaatcatctccatccggcaggagcctactaacagccaaattgacaaaagtgacttcataaccttcggcaaaaaggaggagaccaagaaaaagaagaaaaagaagaagggtaacaagacccaggagaaaaaagagaaagggaacagcacgactgacaacagtgaccagtga

SEQ ID NO: 129370 - DNA, 1334 bp, Homo sapiens
atgccctgtgtcaatgggaaatacaacagcacaatccaggcaggactacaaatggcccagatccttcaggatgaaggaccctatgaggttggtattgatgaagaaactgggtcccaaaaaggtgatggaattatccgaagctccaggaagcttctttttaccatggctctgtttcttgagactaatctccttaaagacccgttaagcagggagagacggtggagactggatgaactggacagtgggggtagggagaagggagtggccgtgttcctgcggtccgctgggatccggcaggtccaggtggctatggagcaggcgggcaccagacctgcgcgacagagcatccacggctccggcggcccatgccctggctgctgctacgcctctcctgctgctgttgctgctgctgctacctggccctgcggcctccagctgcgatactctgtgccagaggagcaggcacccggcgcgctcgtgggaacgtggctcgcgcgctggggcttgagctgcggcgcttggggccgggttcttgcgcatcaaccatctgggtgcgcccagtccgcgctacctggagctgacctgacgagtggagcgctcttcgtcaacgagcgcattgatcgggaggcctgtcttggaagtgctggcgccaaccccgtggcggtgagcgccgttgaggtggaaatattggacatcaacacaactcaccgcgtttcccgcggcccaactaccagcttcaggtcactgcaaggtgctggtggacatcgtggacgtgaagacaatgccccagaggtggtgctcacggacctgtatagcccagtgcctggaatgctacacccaacaccattgtggccgttctcagtgtcaatgaccaaactcaggccccaaccggaaagtgagcctgggtctggaggccacactgccttccgactgaatggctttggaaactcctatacactggtgccacgacagcccaaccctgactggcgttactctgcctccctgaagcaggcatgcacagggaggctggcattctacgggctggtccaggagggcctgatcagcagtggcaacagtatccagtgcaacaccagtgccaacgatggagtgaagaaatgatggaggaggaagtggttttagactgccaagtgttgcaggatgtggaggcatctgggaagagtttttcttgctcttatggaggcattgtggtcgacctgcccctcttgtataacccattttatccagactgtgcctggctgctgatgcatgagtcacagtcttcatggactgtgctgatagagcttacatcttccaactactccatggcaacctaa

SEQ ID NO: 129371 - DNA, 308 bp, Homo sapiens
ccaaacccaacagccacatgccatagcttcactgcattttcagctacacctttggaggccaccttctcctatcaactgtggaaagccagaagggctcccttctccattctccttccctttttcaagtctaatagtgaaatctcctgcttaccccagcagtaaatagttgccttcctaccccttacctgggggccgataatttgagatactttgttttttcaatgcgtcagttgaaggatttagtttcttaaaagcaagaaatgttggagtgttgaatttttaaatagaatctcttttcatgtttgaaa

SEQ ID NO: 129372 - DNA, 2259 bp, Homo sapiens
tgcagggaaggacatcaccggggtgtggacagggacgggcgttgtgggggtctgtggaccagggggcggcaagggttctcggagaaagggagccgtgggtgagcctgagggggagaaggagccaccaagaaagccaggaaaagccctggcttggagggtggcggctgctgatgcaggtgggaggctggtgagcagtaagagggacttggttctggtgaaggaggcgctgagctggtacgacgcccagcagcactgccggctgcactacacagacctcgctgacctgcagccaagtggcctgtggaagctctactccctcatgaccagcaccccggcttggattggcctcttcttcgacgcaagcacttctggcctgagatggtccagcggctccaccttcacagccctggagtggggccagaagctacctgaatttggggtgggcttaactcttcgggcatctttgcgggaaatccaccatcggtacgccatgcgcaaggctccagctgttggagaacagcagccccctccttgtgctccaccgggcccctctctgtcctggctgccggtgcctccgactcctgtctcgttgctgttgggaagatcatacgtgggctggttgtggcgtgcacagcacttgcccggtaagagtgtcgggcacctcatctccacgaagccctctctcagcctgaccacctctccaaagccaggtacataccagatcagtggtcagaccttcatgcgatttgaccaagtgatgacatggtcctcggccctgctgtactgccgcagccaccacacggatctggccgacctgcagatggtgacggatgagacaggcaaggaggccttgagatccatcatgagtgagactgaagcctggattggcctctacctcaatgcaaactccggatctctgagctggtccagtgacctgggggccagcatcccctcctggctgcaggtgccgatgatggtgagaggactgtgcacagctcttggcatctatatgacctactccccaaaagtgtactcagtgaactgctcttccctgctgcccttcttctgcttctatggtgagtgaactggacaccgggcatcagcagagttgcctccactcttccacacttcccccacagaaatgacagaggaaacaactcccaggccaggcagaggtgctttgggggaaggaggactgggccacatcaaactcccttttcctggaattgggccactgaacttgcagctccagggccaggagacccaggagaggccgtacggtctctcaggtgagaggaccggccccgtgggcgcctcgcagggcccggcttcagcagcgcggctcactcagaggggcagcccggagccccgcgagcccgacctccgcacctcctactcgcgcgcttccgcctccgcgggcccagcggccctccagccccaaggggcggtaacacccggcccttcggccaacctcgcggccccggggggcaccttggttcccgcggaaggacccaggatgccgccggtcactgcccagagtgcgtcttcccaccctgcgccctcggcgtcccagccctccagccctgctgcggcctctcgggggagcctctctgtcccccaggaagtaactgcgactcttctggcctccgcttcgagccccacactcgatgccacccgcgatgccccagctactcccaggatagcagcaccccctgggtctgccacatccagccggggcctcggctcccaggctcaagggagctctctggggaccaaagaaagcatctcggactcatttggcttagggagcccagccgtgacccagaggacaactgcaccccctgactctgcagccctgagccaagacacccgcccagaggcagctgggagctggccagggccccaaacaggtgcctgtagtgtagggagtggcactgatagaagagatacagctgctgccacggaggcccaacatctgagttcagaatctaaagaaaaaacatcagcacaaaaatcaggtaactgctttggaatcttgaaagcagactttaccatctcaactctgatggacccagaagagatgaaagaccaatttctgagacaggtgagacttccttcaactgacgcattgaaaaaacaaagtatctcaaattatcggcccccaggtaaggggaaaccccaacagtaccttggtgatagtgcttggaacatggtaagtgctggcacaattgaaggcttttacaaagaatgaattaaaca

SEQ ID NO: 129373 - DNA, 2862 bp, Homo sapiens
ccggcggggagcgggtccggagcaggctcccggacccaaaactgaagggggcgtctgaggcgtcagggagctccctcgcctggctctcggcggcctgatggagtaagaggggttggctgtgaatgtgtgacgttgagtgcttcagatctggtcactatggtacgagaacgaaaatgcatattatgccacatcgtgtacagctcaaaaaaggagatggacgaacacatgcggagcatgttgcatcacagggaacttgagaacctcaagggcagggacattattcatgagtgccgagtgtgcggggtcacagaagtgggtctttctgcatatgcaaagcacatttctggccagttgcacaaagataacgttgatgcccaagaaagagaagatgatggaaaaggagaggaagaggaagaagattattttgacaaggaactcattcagttaataaaacaaaggaaagaacaaagtcggtttggcatagaaatggtaccccttgttcaaaatgaacaagaagccttagatttggatggggaacctgatctgtccagtctagaaggattccagtgggaaggtgtttccatttcctcgtcccctggcttggcaagaaagcgaagcctttctgagagcagcgtgatcatggacagagctccttctgtgtatagcttcttcagtgaggaagaacgttctcaggttgaccagctgctgaatatttctttaagggaggaagaacttagtaagtcattgcagtgcatggataacaatcttctgcaagcccgtgcagcccttcagacagcttatgtggaagttcagaggctacttatgctcaagcagcagtgttttgggcaacaacctagatacttttatcagtgcctgggaatcttcaaggccccagaaacatatgaaccttctgagcacccagaccaggttccctgtagcctcacacgagaacgaaggaacagtagatctcaaacatccattgatgccgcactgctgcccactccctttttcccactttttctggagcctccatcttcccatgtgtctccatcacccaccggagcctctcttcaaataaccacgtctcctactttccaaacccatggcagtgtccctgctccagactcatcagttcagattaaacaagagcccatgtctcctgaacaagatgagaatgtgaatgctgtgccaccaagctctgcctgcaatgtgtccaaggaattactggaagctaataaaacccctttggagaaggaaccccactctccagctgaccagcctgaacaacaggcagaatccactttgacatcagctgagactaggggaagcaagaaaaagaagaaactccggaagaagaaaagtctacgggctgcccatgttcctgagaatagtgacactgaacaggatgttttgactgttaaacctgtaaggaaagtaaaagctggaaagttaattaaaggggggaaagtaacaacctccacttgggaagacagcaggactggtcgggagcaggagagtgtcagagatgagccagatagtgactcgtctctggaagtcctagaaattcctaatcctcagttagaagtagtagccattgattcttcagaatcaggagaagagaaaccagacagcccatctaaaaaggatatttggaactctacagagcaaaacccactagaaacgtctcgttctgggtgtgatgaagttagctctaccagtgaaattggcactcgctataaagatggcatccctgtaagtgtggcagaaactcagactgtgatctcctccataaaaggatcaaagaattcttcagaaatatcttcagagccaggagatgatgatgaacccacagaaggaagctttgagggacaccaagctgccgtaaatgcaattcagatatttgggaacttgctatatacctgttcagcagataaaactgttcgggtttataatctggtgagtcggaaatgtattggtgtctttgagggtcatacctccaaagttaactgcctcctggttactcagacctccgggaagaatgctgccctttacaccgggtccagtgaccataccatccgctgctataatgttaagagccgagagtgtgtggagcagttacagctggaagaccgggtcctctgcctccacagtagatggcgaatcctctatgcgggactggcaaatggcactgtggtcaccttcaacataaagaacaacaaacgacttgagatctttgaatgccatggccctcgggcagtcagctgtcttgctacagctcaggaaggtgcccgaaaactgctggtcgtggggtcttatgactgcacaattagtgtggtgaatgatctcgtgttcagtggctccagtgatcagtcagtccatgctcacaacattcacactggtgagctcgtgcggatctataaaggtcacaatcatgcagtgactgtggtgaatatcctaggaaaagtgatggtgactgcttgcctggataaatttgttcgtgtctatgaattacagtctcatgatcgattacaagtttatggaggacacaaagacatgattatgtgtatgaccatccataaaagcatgatttacactggctgttatgatggcagtattcaggccgtgaggcttaatctgatgcagaattaccgctgttggtggcatggttgctctctgatatttggcgttgtagatcatttaaaacaacacttgctgaccgaccacactaatcccaacttccagactctgaaatgtcgctggaagaactgcgatgcttttttcactgctaggaaaggatccaaacaggatgctgcaggacatattgaacgacatgctgaagatgacagcaaaattgattcatga

SEQ ID NO: 129374 - DNA, 927 bp, Homo sapiens
atgcacttctatgtttatcacagtgcaattcgcaatagcaaagacatggaatcaaccaaggtgcccatcaatgagcaagactcagtctcaaaaaagaagaagaagaagaaagaagaagaagaagaggaagaggaagaaggaagaggaagaaggaagaagaaaaagaaggagaaggaagaagaagaggaagaagaagaagaactaactttacagaaagggaagattagctcatgtgttagaatggagaacaaaaatgcatattgtgtcatatcgtgtacagctccaaaaagaggcactagtcatgagtgccgaaggtgcgggcccacagaagtgagtctttctgcatacgcaaagcacatttctggccagctgcacaaagataacgttgatgcccaggaaagagaagatgatggaaaaggagaggaagaggaagaagattattttgacaaggaactcattcaattaataaaacaaaggaaagaacaaagtcgacaagaaccttccagtagcagccaagaagtaaattctgatgacagctcatcagctacctttagtgttagtgtattttatgtgtggctcaagacaattcttcttctaacgtggcccaaggaagtcaaaagattggacacccctggtttagagctttggctggtacctaatatggcagagctttctgagccagagggaccagtagattggaaggaacgatgtgtagctctggagtcccaactcatgaaatttagagttcaagcaagcaagatacgagagcttttagcagagaagttacatcataatgaacgtttagaatatagagatcaaagaaaagattctgcaagctttcagaggaaaaaacagttcacatacaaagcatcaggaattgaaatggcttcagacctttcaaaagcaccactagaaattagaggataa

SEQ ID NO: 129375 - DNA, 757 bp, Homo sapiens
gcttacgactcccgcgacgatccacgcgtacgcggagaggcatctgggttcggactggcgccgccatggggaaagtgaatgtggccaagttgcgttacatgagccgagatgacttcagggtcttgaccgcggttgaaatgggcatgaagaaccatgaaattgttcccggcagtttgattgcttctatagccagccttaaacatggtggctgtaataaagttttaagagaattagtgaaacataaactcatagcttgggagcgtaccaaaactgtccagggctatcggttgacaaatgcaggatatgattacctagctttgaaaacactttcttctaggcaagtagttgagtgtgttggaaaaccagatgggtgttggcaaaagaatcatatatttacattgttgcaaatgaagaaggacaacaatttgcattaaagcttcacagactaagaagaacctcgtttcgaaatttgaaaaacaaacgcgattatcatatacataggcacaatgtgtcgtggctttatttatctcgtctctctggcatgaaagaattttgctatatgaagcagttctgtgatgagcagggctcacagctcaggatccacatgatgggaggccagatgtgggctgtgcccatctgccagccacgggacctctttgtctggtttgttctgagagctgaggcctgtgctggatgtggagccaccagccagcagagaggagctcttggggtaacgtctacttgttatagagattag

SEQ ID NO: 129376 - DNA, 1030 bp, Homo sapiens
atgaataaaactattacgacccaggaggaggtactccccttacaggctgacgttgtccaacgtgaggaggaattgaattccctgaagcagaagctggcagcggcccttttggcggagcaggaaccgcagccagaacgactggtttcggagttgcagctgcgcgcggaaggccgctgtgttccaagatgagattctgcgctctagccggcagttagtgctgcccgagctgggcgtgcacagacacgtgctagtcgtgtgctgcggtgggctccgctgtccactggcgggggggttggcagcggccagcgtgggccgccttggccttgtggattgtgatgtggtagagatgagcaacctggcctaccaagtgctgcatggcgaggcactggctgcacaggccaaggccgcttcggccgccgcctcgctgcgcggcctcaatttggcgccacccccggcggagacagtgaccaactgcgcggatggcgggatgctccgtgtcttaaccggggtcctgggctgcctgcagcccttgaaagtgctgaaaattgctgcgagtctgggcccctcttacagtggcagcctgttgctctttgatgccctgagagggcatttctgctgtattcggctgcggagctgcaggctcgactgtgcagcttgcgggaaatggcccactgtgactcatctgctggactatgaagccttctgtggctcctcagccaccgataaatgccgctccctgcagttactgggcccagaggatcgtgtttctgtcactgactataagcgacttctggattctggggcaccccatctgttgctggacatcaggcctaagatggagctgccgcggaaggccgctgtgttccatgatgagattctgcgctctagccggcagttagtgctgcccgagctgggcgtgctcagacacctgctagtcgtgggctgcggtgggctccgctgtcccctggcgcagtacttggcagcggccatcgtgggccgccttggccttgtggcttatgatgtggtatag

SEQ ID NO: 129377 - DNA, 969 bp, Homo sapiens
atgaggccctactcacagactgtgttttctacacagtaccgctgggtggagcagcacctggggccccagttcgtagaacgaattatcctgacaagggacaagacggtggtccttggggacctgctcattgatgacaaggacacagttcgaggtgtgcacaaaagtatgtgtccaggagtcactgcagcgtcctggggaagagctaaagacgcgatgtccatctgtgggtgctggttacgtgaattatgggacaccagctcacgagagaatagtgcagctgttaaaacaggaagggaagcagacaagcctgaagtaactaagcagacgcagttctcaacccgcaaggacgagcaagcctgttcggggtacccttacagtgactgttggctcgccatcgagctcctccatagcgccgaaccccaggctcctagaagtcgctcggacgccaatgcttcccgctcaggcctcccgctcagagctggctgcgagacaagactccgcctgggcgtctcctgcagcgcctgcaagcccaaaccctcagtgctgcggcgctgtctcctctcagcacggccacccctctgcggtcctctgcacgcgtccttccttcctggcgtcgacagcaaatcagggaaaacagcgccgaggactgactgcactcagagtaccgcgctaacaggatcaggcggcgccggggacaccctgagaattgacgaagagttgactggaaaatccagaaaatctcacacgcaggtcttcatctgcaccagccccctgctgaagtaccaccactgtgtgggtgagaagtaccgctgggtggagcagcacctggggccccagttcgtagaacgaattatcctgacaagggacaagacggtggtcttgggggacctgctcattgatgacaaggacacagttcgaggttggacccgttatccttggcagccttccagtctggcctgcccggattag

SEQ ID NO: 129378 - DNA, 596 bp, Homo sapiens
ctctggtggtggtggcacctgatgtaggattgagagtgccagcctatgaacgcagctccagtttgatcttctccgtgtctctgaaatctggcttcctaactcccagtggcgtttcatcagtgtaaatgcctgtcctgctgaaagaacccgcctttcagatggctgaaaaggcacccaatggggcagtatgtgctccccgttccctgcgtccacatcaggactgtggtccccagcagtaggggtgccacggtctcgcagtctccatggatcagcgctgccgtggggccacgctcctcggcagtgggatacccagggcagagtgcgcctgccggctgcgggcctcggccacctggcggggggagcagaagtcctccaggaagatctgtgccaggttccggagcctggcgctggccgagagggagaagcgaagcatgcactgcaccacgggcgtggcggtcagctctgggagaaagctgcggcccggcgggctcaggtgcatgagcgtggtgatggcagacagcaccgtctcctcattggggctggataggcagttgatgatgagtgggacacctcctgcgtgcaggatgtgctccttg

SEQ ID NO: 129379 - DNA, 653 bp, Homo sapiens
agacattacagaagaattcattcgagaagaacatgaagcctgtggagagggcagccttcagcaagctgggggacaggcccttgaagaagcccagggcgccttccttttgtagcacctgcttggcacagtccatgaggcccttgtatctccgtacctggccaaaggcagctctggcatgctcaaaccctccaacctgtagccgcttcttgaagaggtccagcggatatgtcagggtcttgctgatgacaccagctccactgccacaaagcaggttttggaggttctcatttttctttccttcggctggtatggcccacttgtacaggtgcttcaaggagctgtagcaagagaactgcagcccggcgtaggggaagatggcgatcaaggtgggagccaagcctttgtagaaaacctgggggccttcgctcctatacatggtccccacggcgtggcgcagcgtattatagaccttgggctcaccctgagctgcaaagcgggtgcgcagaacatccacggggtgcacagtgagggtggccatacaggcagccaggccaccacatacaaagtgcactgagaattcccgggcgtcgtacacgctgcctctgtggaccagctccgtcagcatttcaaagaattccaccgcactggactag

SEQ ID NO: 129380 - DNA, 1936 bp, Homo sapiens
atggtcggtagtcgagtcatcaacagtatcgactcgatcgagtcaagtatatcagattgcacgtcacgtcgcatctcattacatcgatcacgcatcatgacgcgtagtgcatgtcgagcagttagtcgcattcacgccgtcgatagctcgtcatcacgcacggtgcacgataggtatactacgatcacacacatagctactgtgcacgcgtcacgtgtcgtcatatcttcgcgcagtcacgcagtacatcacgctatcatcaagtcaggtcaacgagacatcgttcgagccctacgcgttatagcatacgcagtactcacgtcgagctatgattacgacatagcttcgccagagatacacaagcagtcagagtctcttccgacatgtactcctcaaccggctgcagcagaagtaccaagcatcggaagcatctgcgagaacgctcccgtgcaaggctcgctctgctatgtcacgtatatctgcaacatatatgactacctgacgggaggcccagcagccaccctgggaggcagacatggcctgtttcgtgaggcccaggtgaacaacatgcccatgatggccctgatgaaccctgtctatgactgcctcttaccggctggcccagccagacagtttgagcaaggaggaggagatggctgaaaaggcaccaatggggcagtatgtgctccccgttccctgcgtccacatcaggactgtggtctccagcagtaggggtgccacggtctcgcagtctccatggatcagcgctgcctggggccacgctcctcggccagtgggaataccccagaggcaagatgatgccgtgtcggtctgcggggccttcggccacctggcggggggagcagaagtcctccaggaagatctgtgccaggttccggagcctggcgctggccgagagggagaagcgaagcatgcactgcaccacgggcgtggcggtcagctctgggagaaagctgctggcggcgggctcaggagcgaaggcccccaggttttctacaaaggcttggctcccaccttgatcgccatcttcccctacgccgggctgcagttctcttgctacagctccttgaagcacctgtacaagtgggccataccagccgaaggaaagaaaaatgcgcacatgcgactgatccaccccctgacccctaatgacatcagctccctggcccagctgctgctgctggagatcattgagttccgggcggccggctggaagacaacgccagctgcccacaagtattactacagcgaaccaaccggcaccttcgcggcgaaaaaagagcacctcacggaaaaagcaacgaaatctgcctgcggtttctcccgctatggtcgctatcgtgccgccgttcttgtgacctttatcggtggtctgtacttcattacgcatcacaagaaagaagagtccgagacgctgcaaagccagaaagtgacccgaaaacggactaccaccaaaaccagaagacctggcgctacattaaagagctggaaagtcgccagccgggagtggctgatatgcgccagcagccaacgcagctggttgaagttccgtggaatgaacagacgccggaacagcgtcagcaaacgctacagcgccaacatgggcgggaaacacgctgctcagtgtgacctgagcggtccctgggtaacccctggagaggttttgcctctcaggcttgccgcgtgtttaaacttcctcatgggcgcctggggaggagttccagggtgggtgtgcacaaaagtatgtgtccaggagtcactgcagcgtcctggggaagagctaaagacgcgatgtccatctgtgggtgctggttacgtgaattatgggacaccagctcacgagagaatagtgcagctgttaaaacaggaaggtctccattttgtcagcaatggagctcatctggaacctgtgtga

SEQ ID NO: 129381 - DNA, 417 bp, Homo sapiens; identical to SEQ ID NO: 115992

SEQ ID NO: 129382 - DNA, 440 bp, Homo sapiens; identical to SEQ ID NO: 127212

SEQ ID NO: 129383 - DNA, 574 bp, Homo sapiens
atgcagacagtgcttaacttgcgggcctggcacggcctggacgctgcgcccctgacccgcgaccagggcggcccaggctgccggttcgccgaccacagtttgagcagcaagggcttccctttcactgccatctgcggtgaagctgccaccaaactgcagattttcgtgaaaaccctaagggggaagaccatcacccttgaggttgaaccctcagatgcgatagaaaatgtaaaggccaagatccaggataaggaaggaattcctcctgatcagcaaagactgatctttgctggcaagcaactggaagatggacgtactttgtctgactgcaacattcaaaaggagcctactcttcatcttttgctgagactttgtggtgttgctaagaaaaggaagaagtcttaccccactcccaagaagaataagcacaagagaaagaaggtgaagctggatgtcctgaaatgttataaggtggatgagaatgacaaaattagtgcccttctgacgaatgtggagctggagtgtttctgccatacagaatgtgcctccttcctcttcgccttctgccatgatt

SEQ ID NO: 129384 - DNA, 623 bp, Homo sapiens
gcggccgcctactactactaaattcgcggccgcgtcgacccgccatctgcggtggagccgccacctaaaatgcagattttcgtgaaaacccttacgggggaagacccatcaccctcgaggttgaacccctcggatacggatagaaaaatgtaaaggcccaagcatccagggataagggaaggaatttcctcctgatcagcagagacttgatctttgctggcaagcagcatggaagatggacgtactttgtcttgactacaatattcaaaaaggagtctactcttccatcttcgtgttgagacttcgtggtggtgctaagaaaaggaagaagaagtcttacaccacttcccaagaagaattaagcacaagagaaagaaaggttaaagcttggctgtccctgaaatattataagggtggatgaggaatggcaaaattagtccgccttcgtcgagagtgcccttctggatgaatgtgggtgctggggtgtttatgggcaagtcacttttgacagacattattgtggccaaatgttgtctgactttactgtttcaacaaaccagaatgacaagtaactgtatgagttaataaaaggacatgaactaacaaaaaaaaaaaaaaaaaaa

SEQ ID NO: 129385 - DNA, 990 bp, Homo sapiens
ttttggacgctcgaaggcactgggaaggaactcccgggtttacgcacacgtccccggacgcgtgggcggacgcgtggggcaagatggcgggtgaaaaagttgagaagccagatactaaagagaagaaacccgaagccaagaagagttgatgctggtggcaaggtgaaaaagggtaacctcaaagctaaaaagcccaagaaggggaagcccccattgcagccgcaaccctgtccttctcagaggaattggcaggtattcccgatctgccatgtattccagaaaggccatgtacaaaaaggaagtactcagccgctaaatccaaggttgaaaagaaaaagaaggagaaggttctcgcaactgttacaaaaccagttggtggtgacaagaacggcggtacccgggtggttaaacttcgcaaaatgcctagatattatcctactgaagatgtgcctcgaaagctgttgagccacggcaaaaaaacccttcagtcagcacgtgagaaaactgcgagccagcattacccccgggaccattctgatcatcctcactggacgccacaggggcaagagggtggttttcctgaagcagctggctagtggcttattacttgtgactggacctctggtcctcaatcgaggttcctctacgaagaacacaccagaaatttgtcatttgccactttcaccaaaatcgatatcagcaattgtaaaaatcccaaaacatcttactgatgcttacttcaagaagaagaagctgcggaagcccagacaccaggaaggtgagatcttcgacacagaaaaagagaaatatgagattacggagcagcgcaagattgatcagaaagctgtggactcacaaattttaccaaaaatcaaagctattcctcagctccagggcaacctgcgatctgtgtttgctctgacgaatggaatttatcctcaccaattggtgttctgaatgtcttaagaacctaattaaataactgactac

SEQ ID NO: 129386 - DNA, 1008 bp, Homo sapiens
  misc_feature (1)...(1008): n = a,t,c or g
ttttttttttttttttgcaattttataactttatttgatctgacgatcagcgattagttctcatccacattgactgtctgtagatctgtaaaggaagtaacagtcaatttccatacccacatcacatttcatatttcaactctaaaaaccttttcgtagacgggtctggacattctattttcccacaacctttttacatccccagatatggatcagttttgcattctttagcatcttcccacaccaacaatttaaaaagggtacaatgacgtgtgtcacccctagcttaacagatgaattcacattttaagaggtaaggacatttttctaatgaatttaaatggctttatgggatggagaacttacttttgaaagtggtaaacaggtacataggtaaaccaaagtatatagctttatttggtgaatcttcatccctcattacggttttctggacagccgcacaccggattccggtatgggcacattccttcgaatacagataactttagcaccttattcctttggcccagacagctttgttgagcctggtgtcaatgcgcacatctggagttcccatctccttcatggcaaatttccgaatctctttgagtgcccgaggtgcacgcttcttggaagcccactccatgggatgcgctgtgtgaatgttgatggtgtattctcggagttaccccttcgttgatgagcagaacggccctttttctttctcgccacacattctttgcgggagccattctgcagcgtccaagttggaaagaaaaagaaggagaaggttctcgcaactgttacaaaaccagttggtggtgacaagaacggcggtacccgggtggttaaacttcgcaaaatgcctagatattatcctactgaagatgtgcctcgaaagctgttgagccacggcaaaaaacccttcagtcagcacgtgagaaaactgcganccagcattacccccggggaccattctgatcatcctcactgggacgccacaggggc

SEQ ID NO: 129387 - DNA, 711 bp, Homo sapiens
atgggcctggaccttccggatgggggccacctgacccatgggttcatgacagacaagaagaaaatctctgccacgtccatcttctttgaatctatgccctacaagggcctcctggtgggcctggttaccgcagaacggagccatgggaccacgcccccgaccctcaacccatttgcaccccacgtttcgccgaccactaaatccgtaacctctatggacgctcccacttacacctggactgggaccaccgtgagctggcccatgaacgaatggcacaagcgaactgctccgctcgtatgccgtctgaatttggctaacacccgtgctgatcacagacccgtcgccttagttgagtatatgctacagaggactcaagatcaagatgaaaatgtggctttagaagcctgtgaattttggctaactttagctgaacagcaagtatgcaaagatgtattcgtaaggcatcttcccaggttgattcctgtgttagtgaatggcatgaagtactcagatatagatattatcctacctaagggtgatgttgaagaagacgaaatgattcctgatagtgaacaggatatatggccacgttttcaccgatcaaggacagtggctcagcagcatgatgaagatggaattgaagaggaagatgatgatgataatgaaattgatgatgatgatacaatttctgactggaatctaaggaaatga

SEQ ID NO: 129388 - DNA, 2097 bp, Homo sapiens
atgaggaatgaaatctctgacctaacagaagagcttcatcagaaggagatcactatagcaactgtcacaaagaaagctgcccttctggaaaaacagttaaaaatggaattagaaataaaagaaaaaatgttagcaaaacaaaagccttgggcctgcctggtgaacgccatgcctgccattcaggtggtctttaacctgggtagatttagaaaatgccaagatcctcacaaagctcaggaatgggtatacccaggttattctggaagtgactgtgaagtttttccagaaattatgaccagcaagaatcgtgaagaagctatgcctgaatggaagctatggaagaaggtggttctgagtggtgcaacagatgccccctcatgggatggacctactttcacggacctcaacgtctttgcagggaacatgggcctgagtgactgcactctgtccctagggaaaatatggaaaatcccaggccacttcctgcacacctcaggacctgtttccttccacactaaaggcttgctcaataccccaacgaaggagagatgggtgggcggcttcgggtccgagggccgcggcgtcccagagcccggggggtgcttcggcgtcctcgctgtcccccgccgtaccccaccctctgcagccgcaatgacgggaggggagcgcttgggtcgcgcctgggctggggatcgggcggcggccagccgcagcgccccagttccaggcacattcggtatgatggggtggcggcccgtggcctttggcaagaatgcgaaggcttatcggggatttggaggtattgtcacatccctcacaccaagttgtgataaggtgactctcttgtttgtgagaatacttccaggctcagggcagtctagagaccaaagcagcccggaaaaactcacagacacaaagtccacatcaaataaagcatatggttttcctgaatgccttcgcaggcctgagagcactcatatattcttctatgaccaccagcttggcagtgagcagcctagagggactaagggaactcctcttaagtgggtgtcccagaaaactttggaacgagagactcgccagtgccaggctctggtgatctggactgactgtgatagagaaggcgaaaacatcgggtttgagattatccacgtgtgtaaggctgtaaagcccaatctgcaggtgttgcgagcccgattctctgagatcacaccccatgccgtcaggacagcttgtgaaaacctgaccgagcctgatcagagggtgagcgatgctgtggatgtgaggcaggagctggacctgaggattggagctgcctttactaggttccagaccctgcggcttcagaggatttttcctgaggtgctggcagagcagctcatcagttacggcagctgccagttccccacactgggctttgtggtggagcggttcaaagccattcaggcttttgtaccagaaatcttccacagaattaaagtaactcatgaccacaaagatggtatcgtagaattcaactggaaaaggcatcgactctttaaccacacggcttgcctagttctctatcagttgtgtgtggagtcaggtccctcagctgcaggtctgttggattttgctggaggtccactccagaccctgtttgcctttgtatcaccagtggaggctgcagaacagcaagtattgcagaacagcaaaaattgctgcctgatccttcgtatagaagcttcatcccagaggggcagccgcctatatgagcagcccaaagctcatgggcagcaaagggccccacttccaatgactgccacctcccagggaggggccaagctcaaaggctgttttgtcctcagcgaggcctgccaggatgaccaggatcccatggcaactgtggtagaggtcagatctaagcccaagagcaagtggcggcctcaagccttggacactgtggtatgttccagacaggctgtttcaggcactcggggaacacttactgttttgaggctgtggttctaccgcctagactgtggcttggtggaagaaaatatcacccatcaccaggccacacaagaaaacactggagaaagacacggtcctgcttag

SEQ ID NO: 129389 - DNA, 1008 bp, Homo sapiens
gcgtctctagtccatgcggtggaattcggcagaacttcctgaacctgtgcatctgccaggagacccagctccagcacgtggaggactacagccggattctgtgtccatcttcctctcctcattgactctgcatgaaggggatttctggtggagtaagggtagcagctcttgccgcacgtgcagagagagaggaacttccagtgcccgctatggagccacagcccacagcatggggaagtccccatccagaggcagtgctgcagctagaggtagctccagagtcctccgggccctgcaccgatacagccaaagaccagcaaagcgacaagctgccagacctcatgccacctgctgtagccactgggctcagccctggagctgagagcatcgctggagatagacgtggcagagaagaggttgcgagcatggccccagccagcagctcccacgctgcccctagtcctgggcatggagcgagccttggtgtcagagaccagggtgtgcagtctgagctcctctaccttactaaagagaggcctcttttatttaccagagccacagccctgctgcctcaggaccttttcattctgccggtgctggggctgtctatctgcaagctggaggtgttgagagcaggaaaaggaggctgtgaggaagggttcgggcagctcctcctgctctcagaggkggscctcctcctccaggcatggaggtctgtccactactgggcttctgggctatttgcccctgatttgctccctgagaaaactgatccactattctcatactggtgcaacttctttcaagacctcaaaactggacaacatgaacttgtcttgtttcttatctcttcttgctatggctgtcattgggacagtccgagatgcggcaagagctgaaaaaggagagctgctcagagctgaaaaaacctgctcagtgacccttctctttcgtcctcatggtggcttcgtagagtgggtgctgttcccaaatgtacccattcgacag

SEQ ID NO: 129390 - DNA, 2006 bp, Homo sapiens
atgggctgcaggtccccggacctagctagtaaggacagctattatcttaaaggtggcagagaggcccagagcccttgggcctaccagttcctgagtaagactggctgggctgcagacttctggaatgcagggatggctcatgcacgagatggctgcaggggctggggagtgggctgcaccagcatcagtcctacagctgaactggggctggtgctgccaggtgagctgccagctgcccacatcagcgtggcgctccaggcgcaaggagtgagtaagctgccgcgcaaagtcatggctggcagagggttgagcagccccagggatcgtttcatctctaacctctcaatccaccaaggagcaagccagggccagagggagggtcctccctgcatcgccatcctggcagaacttgtgccagcctttttggctcttctgtttgagcaggcggttggacccgtgcccctcgcctgctgccagcacagactgcccactgtggggctcctggctgctggctggggttcaagtttgttgggggaagcaccttggctgggccctgagctctgggagacaccacatcagctggctgggcctctggcagaccccagctccaagtctggtcctgaggagctgcaggcccagattccttcaggggtgctagccggagccctcccggagcgctcggggttcgacccccgagcacggcgggaggagggcgcccccctgcggcacagccacgtccacgaagcccctcccggggttctagaaagcggaggcctccgctgtgatttggacagaaatcagctgccacgtgcaacattctcccatgggaacatgtgtccgcagtacctatctcagagcccaaatccttcctgccccacagccttctcctggaacctgccttgggcttacacagcttacctctcaggaatgctacgttttgaacatcaagaatggaaagctgccattgaggcttttaacaaatgcaaaactatctatgagaagctagccagtgctttcacagaggagcaggctgtgctgtataaccaacgtgtggaagagatttcacccaacatccgctattgtgcatataatattggggaccagtcagccatcaatgaactcatgcagatgagattgaggtctgggggcactgaaggtctcttggctgaaaaattggaggctttgatcactcagactcgagccaaacaggcagctaccatgagtgaagtggagtggagagggagaacggttccagtgaagattgacaaagtgcgcattttcttattaggactggctgataacgaagcagctattgtccaggctgaaagcgaagaaactaaggagcgcctgtttgaatcaatgctcagcgagtgtcgggacgccatccaggtggttcgggaggagctcaagccagatcagaaacagagagattatatccttgaaggagagccagggaaggtgtctaatcttcaatacttgcatagctacctgacttacatcaagctatcaacggcaatcaagcgtaatgagaacatggccaaaggtctgcagagggctctgctgcagcagcagccagaggatgacagcaagcgctcacccccggccccaggaccttgatccgactctatgacatcatcttacagaatctggtggaattgctccagcttcctggtttagaggaagacaaagccttccagaaagagataggcctcaagactctggtgttcaaagcttacaggtgttttttcattgctcagtcctatgtgctggtgaagaagtggagcgaagcccttgtcctgtatgacagagtcctgaaatatgcaaatgaagtaaattctgatgctggcgccttcaagaacaagcctaaaggacctgcctgatgtgcaagagctcatcactcaagtgcggtcagagaagtgctccctgcagggcccgcagccatccttgatgcaaacgacgctcatcaaacagagacctcctcctcccaagtcaaggacaataagcct

SEQ ID NO: 129391 - DNA, 3535 bp, Homo sapiens
atggagctggtgaattgcgtgctgatgagcaccctaggaaacacctgctgccccatggccattgccatgtttagatcttcttcctctctccctagacctgggcacagcctaactgggtcccctttgagagtcaatctcatccacattaaatttccactgaatgatttccaccagaatgtggtcaagatcaagaacaaggatcccccgctgggtgcggccatcgggaaggaatcctgccccatcgctgacaatgagctgcattctttggagaggcggcccctgtccccaaagctggtgcaagccctgggtgtagcaggcctctccagaccagggccaccacatactggctgtgccatttggctccttctgatcactgatcacaaactccttagtgaaatcctgtatgacctccttcaccagggtcttgacattctcgccgatccacctgatgagggtggcatccctcgtggcaagaatctggtggaattgctccagcttcctggtttagaggaagacaaagccttccagaaagagataggcctcaagattctggtgttcaaagcttacagcacactctcctcagatgggcctcctctgttctctgctttgcgctccctgcaaggagtccaatcctcgaaggtgggagagtccagagaagaaaagagccaaacggaggaagaggaccctgggaacccttgggtgccgcagagcttgggagcctccgtttcctcatctggaaagtggggctgtctgagaactaaacccgagaaggcacaggaagggcttcccgtggcttctgcaaagagctccacgaacactcgctctccttcatccgagcagcaatcctcgctgggcctcaggccatggacggtgctggtctgtagcccaggagttggggaatcctgctctacagagtttccaacctcagagatgaagcatcccctctctcttgccgcacgtgcagagagagaggaacttccagtgcccgctatggagccacagcccacagcatggggaagtccccatccagaggcagtgctgcagctagaggtagctccagagtcctccgggccctgcaccgatacagccaaagaccagcaaagcgacaagctgccagacctcatgccacctgccgtagccactgggctcagccctggagctgagagcatcgctggagatagacgtggcagagaagaggttgcgagcatggccccagccagcagctcccacgctgcccctagtcctgggcatggagcgagccttggtgtcagagaccagggtgtgcagtctgagctcctctaccttactaaagagagacctcttttatttaccagagccacagccctgctgcctcaggaccttttcattctgccggtgctggggctgtctatctgcaagctggaggtgttgagagcaggaaaaggaggctgtgaggaagggttcgggcagctcctcctgctctcagaggtggcctcctcctccaggcatggagttgttaataagcccctcacctgcactctatccccactgagcgaccggctcttcactaaacaggctgtgcgtgctccttcccctgtactgttccctggcctagaatactgttcccacgacatcagggacaggagcactggcctgtgccatctgtatccctcggacccagcacacaggagtgctctgggcctgggctcctgcagcatcagcctcctaacttgtcttttccaccccaatgccttctccatgaggcagtcagggagggtcttcagtcccttgggcgaggatgctgtggcccacactcgctttgacaccctgtgttcccagaggccacatctgtactggccaaactcacggaaatacagcaccaaagatatcgtcatggaagtgcttctggctcttttagatgccccctcatgggatggacctactttcacggacctcaacgtctttgcagggaacatgggcctgagtgactgcactctgtccctagggaaaatatggaaaatcccaggccacttcctgcacacctcaggacctgtttccttccacactaaaggcttgctcaataccccaacgaaggagagatggagaaaactgatccactattctcatactggtgcaacttctttcaagacctcaaaactggacaacatgaacttgtcttgtttcttatctcttcttgctacggctgtcattgggaaagtccgagatgcggcaagagctgaaaaaggagagctgctcagagctgaaaaaacctgctcagtgacccttctctttcgtcctcatggtggcttcgtagagtgggtgctgttcccgaatgtacccattcgacagggacaccgagctgggctgccagaggacaaggggcctgaacctgttggaatctacagcagcgttgatcgctttgggattctgcagttgattcctgtgttagtgaatggcatgaagtactcagatatagatattatcctacctaagggtgatgttgaagaagacgaaatgattcctgatagtgaacaggatatatggccacgttttcaccgatcaaggacagtggctcagcagcatgatgaagatggaattgaagaggaagatgatgatgataatgaaattgatggtgatgatacaatttctgactggaatctaaggaaatgttctgttgctgccctagatgttcttgcaaactgcctctctgataaaaaggctcttgtccgttccataacatgctggactcttagccgctatgcacactgggtagtcagccagccaccagacacgtacctgaagtcattaatgacagagttgctaaaacgcatcctggatagcaacaagagagtaccagaagctgcctgcagtgtctttgctaccctagaagaggaggcttgtacagaacttgttgcttaccttgcttatatacttgataccctggtctttgcatttagtaaataccagcataagaacctgctcattctttacaatgccagagggacattagcagattcagtaggacatcatttaaacaaaccagaatatattcaaatgctaatgcctccactgatccagaaacggaacatgttaaaggatgaagataaagatcttttccctttacctgagtgtccattttcagttgccacggtgctgcagtctggcttccttccatactgtgaacctatgtatcagcattgggtaaacctagtacagaagactcttgcacaaagccatactaagcaatgctcaaccagatcaatatgaagctccagataaagattttatgatagtggctcttgatttactgagtggcctggctgaaggacttggaggcaatattgaacaactggtagcccgaagtaacatcctaacactaacatatcagtgcatgcaggataaaatgccggaagttcgacagagttcttttgccctgttaagtgacctcacaaaagcttgctttcagcatgttaagccttgtgtagctgatttcatgccaatattgggaaccaacctaactccagaattcatttcagtctgcaacaatgacacatga

SEQ ID NO: 129392 - DNA, 3078 bp, Homo sapiens
agcatttcaggccccggacaggaggcagtgccgcttcggccgaaggccgagccgcccgagggctctgggatggtgtgggaccggcaaaccaagatggagtatgagtggaaacctgacgagcaagggcttcagcaaatcctgcagctgttgaaggagtcccagtccccagacaccaccatccagagaaccgtgcaacaaaaactggaacaacttaatcagtatccagactttaacaactacttgatttttgttcttacaaaattaaaatctgaagatgaacccacaagatcattgagtggtcttatcttgaagaataatgtgaaagcacactttcagaacttcccaaatggtgtaacagactttattaaaagtgaatgtttaaataatattggtgactcctctcctctgattagagccactgttggtattttgatcacaactatagcctccaagggagaattgcagaattggcctgacctcttaccaaaactctgtagcctgttggattctgaagattataatacctgtgagggagcatttggtgcccttcagaagatttgtgaagattctgctgagattttagacagtgatgttttagatcgtcctctcaacatcatgattcccaaatttttacagttcttcaagcatagtagtccaaaaataaggtctcacgctgttgcatgtgtcaatcagtttatcatcagtaggactcaagctctaatgttgcacattgattcttttactgagaatctctttgcattagctggtgatgaagaaccagaggtacggaaaaatgtgtgccgagcacttgtgatgttgctcgaagttcgaatggatcgcctgcttcctcacatgcataatatagttgagtacatgctacagaggactcaagatcaagatgaaaatgtggctttagaagcctgtgaattttggctaactttagctgaacagccaatatgcaaagatgtactcgtaaggcatcttcctaagttgattcctgtgttagtgaatggcatgaagtactcagacatagatattatcctacttaagggtgatgttgaagaagacgaaacgattcctgatagtgaacaggatatacggccacgttttcaccgatcgaggacggtggctcagcagcatgatgaagatggaattgaagaggaagacgatgatgatgatgaaattgatgatgatgatacaatttcagactggaatctaagaaaatgttctgctgctgccctggatgttcttgcaaatgtgtatcgtgatgaactgctgccacatattttgccccttttgaaagaattactttttcatcatgaatgggttgttaaagaatcaggcattttggttttaggagcaattgctgaaggttgcatgcagggcatgacttccatacttgcctgagcttattcctcaccttattcagtgcctctctgataaaaaggctcttgtgcgttccataacatgctggactcttagccgctatgcacactgggtggtcagccagccgccagacacgtaccctgaagccattaattgacagaatttgctaaagcgcatcctgggacagcaacaagagagtacaagaagctgcctgcagtgcctttgcctaccctagaagaggaggcttgtacagaacttgttccttaccttgcttatatacttgatacccctggtctttgcatttagtaaataccagcataagaacctgctcattctttacgatgccattaggaacatttagcagattcagtaggacatcatttaaaacaaacccaggaatatattcagatgctaatgcctccactgatccagaaatggaacatgttaaaggatgaagataaagatctcttccctttacttgagtgcctatcttcagttgccacagcactgcagtctggattccttccgtactgtgaacctgtgtatcagcgttgtgtaaacctaagtacagaagactcttgcacaagccatgctaaacaatgctcaaccagatcaatatgaagctccagataaagattttatgaatagtggctcctgaatttactgagtggcctggctgaaggaccttggaggcaacattgaacagctggtagcccgaagtaacatcctgacactaatgtatcagtgcatgcaggataaaatgccagaagttcgacagagttcttttgccctgttaggtgacctcacaaaagcttgctttcagcatgttaagccttgtatagctgatttcatgccaatattgggaaccaacctaaatccagaattcatttcagtctgcaacaattgccacatggggcaattgggaggaaatctccattcaaatggggtataggaggatgcagccttattattcctatgggtgttggcaccagctttgtagggaaattcatttaacaggaccccaacacaccaaaggacgttgttagagaatacagcaataacaattggtcgtcttggttacgtttgtcctcaagaggtggcccccatgctacagcagtttataagaccctggtgcacctctctgagaaacataagagacaatgaggaaaaggattcagcattccgtggaatttgtaccatgatcagtgtgaatcccagtggcgtaatccaagattttatatttttttgtgatgccgttgcatcatggattaacccaaaagatgatctcagagacatgttctgtaagatccttcatggatttaaaaatcaagttggcgatgaaaattggaggcgtttctctgaccagtttcctcttcccttaaaagagcgtcttgcagctttttatggtgtttaatctaatacacttaagctgcagtcccaaaattaggggtccttcagtcttggagactataagggagcctctgcacccagggaaaatgttaccctttacaggggggaagggtaaaccagtagggaatacagtacaatcccaaccctactgggaggggcgggagggaggtgttgccgtcactgtattaagtcgatgttgggaaacgttttaacatctggagcctttgtgggtggaaatatgtctccagttacaactccgcagtggatgtgaagaagcaaaaa

SEQ ID NO: 129393 - DNA, 453 bp, Homo sapiens
atgatagacctggtcctggtcgccacaggcaccgtcttgggcaaggccctcatcgcaggccagggccgtgagccttctagtggctcgagggcagctgtgccagggctccaggcgacgctcgggtgtcggcagcagagtggacgcaggagcagctcggaccgcgctcagaacactcgggacgaggccgcggctccgcaggccttgcgggctggggtcccacgaaacaaaggcggcagccagtggccaggacgggcagcgtggttcacggggccgtggctccctcgggggtcgcgagctcggcgcaaacgagcccctctaccaaggcgagcccacaccttaaccgtgctcttcatcctcacctgtacgcttggctatgtgacgctgctggaggaaacacctcaggacacggcctacaacaccaagagtgaaattgccgtggtgcacctgtcctga

SEQ ID NO: 129394 - DNA, 559 bp, Homo sapiens
  misc_feature (1)...(559): n = a,t,c or g
gggaccgcgcgctctgagtacagcttcccgggagcggccaggtcctccagggcaccgagaaagccggccagaacggcgcgccactatcccggccgcagcgatgtctgacggcgccccggaactgacggtctggtacgcagggggctcggggcaacggggctttaaacgtcatcgcgggcgcgacgctgagggacagtctggggtttggctgtccggacggtgcagcggcgaggccgccgcganagatgccagtggcggtgatggcggaaagcgctttagtttcaaaaagttgctggatcagtgcgagaaccaggagctcgaggcccctggaggaattgctacacccccagtgtatggtcagcttctagctttatatttgctccataatgacaaagaatctggcagagagatttccctgggatctatacaaccatcaacgctcaccagtggtctgagacggtccagccaattatggaagcacttagagatgcaacaaggagacgcgcctttgccctggtctctcaagcgtatacttcaatcatcgccgatgattttgcag

SEQ ID NO: 129395 - DNA, 1157 bp, Homo sapiens
agcggccgcgcgctctgagtacagcttcccgcggagccggccaggtcctccagggcaccgagaaagccggccagaacggcggcgccctatcccggccgcagcgatgtctgacggcgccccggaactgacggtctggtacgcaggggcgctcggcggcaacggcggctttaaacgtcatcgcgggcgcgacgcctgagggacagtcttggggtttggctgtccggacggtgcagcggcgaggccggcccgcgaagatgccagtggcggtgatggcggaaagcgccgtctagtttcaaaaagttgctggatcagtgcgagaaccaggagctcgaggcccctggaggaattgctcacccccaaggtgtatggtcagcttctagctttatatttgttccataatgacatgaataatgcaagatatctttgaaaaagaataccacctgctataaaatctgcaaattctgaacttggggggaatttggtcagtaggacaaagaatctggcagagagattttccctggggttctatacaaccatcaacggtcaccagtggtctgagaccggtccagccaattatgggaagcacttagagatgcaaccagggagaccgcgcctttgccctgggtctctcaagcgtatacttccaatcatcgcccgatgattttgccagcctttgttgggacttcctgtaggaagaggctgtgaaaggcatattaggaacaaggatgggcaagcttgattccaccacaaggaatggttcttgcccaggaaagccagtttgcagggggccctgggatgttttcccttttaacaagtttatttccctttattcagagccttgctccagtttcccccaatacccaatgaacagcagttagccagactgacggattatgtggctttccttgaaaactgatttatcactctgagttcaagattcatcttcagaatcctgtatactggacaaacgtaggaaatgttaaagtttgttattttccaatttattgggatgggctttaagcacctcaggcattcctttactatggtggataaaaatacatattaggattttaagatatactattattacattttgttcccttaaacgtttatggctgaataggttgttggaaacagttctccattttgtaggtatt

SEQ ID NO: 129396 - DNA, 529 bp, Homo sapiens
atggccaccctgaccatcagcagggctcagactgaggacgaggctgactattactgtcacaggataaagctggtgaaagagggcctggatgaaaggacacacaaagcgtatctttcatctagtggtaaaggatgtgagttccatatggtgaagcctgggtcaccccttggcccagacatcctaggctcttgggcccagtctgccctgattcagcctccctccgtgtccgggtctcctggacagtcagtcaccatctcctgcactggaaccagcagtgatgttgggagttatgactatgtctcctggtaccaacagcacccaggcacagtccccaaacccatgatctacaatgtcaatactcagccctcaagggtccctgatcgtttctctggctccaagtctgggcaatacggcctccatgaccatctctggactccaggctgaggacgaggctgattattactgctgctcatatgcaggcagctaccctgtggtattcggcggagggaccaagctgaccgtcctaggt

SEQ ID NO: 129397 - DNA, 737 bp, Homo sapiens
acacagatttctttcattgcttgcagtgatttagacacttcttctgaagccttgtctgtctttttgtcttgcttttccaaaatggccgaattgtctttcaggattttcacaatttctgctggatttttgtgtgatttactaaacaaaggcatttttttcatgtgtagaaatctcttcttccaatatggaatgcttagaagttgtatatcatttgcaaatttgtttgaaccttcttagctttcaccaaagtcactgatcaccacagcttgcttctctcctttagtgcattgctcttgcatgaagaatgaacaaaccactgatttggggttcgcatctttacgttctgaacagcaacttagaacactttgctcctgatattctttcttctcaatatttgatggatatccggaggaaacagctgcgccaccactccagtgatgccggcctctcgactacgagtaactccattggctcagctacagtgcgcgagacaagccgagagcgctagcagtcaatcgggaggcggcgcgctcgggcgccactgcggtgccagcggtaagtgcgccgagtctctgaggcgtgaaccagtggggagtgcgaccaatcaatgggctcctggctgggtggtgggacggccggcgtccgactcctcccatgtagtgatcggtttaggtaggtcggcctggtccccggcggaggttacgccttccctcatccccggtagaggcaggacgaaa

SEQ ID NO: 129398 - DNA, 4323 bp, Homo sapiens
atgggccagtgcaagcaaagcagccagcattgtccactggccgaggcaggagcaccgctgcgccatcgggtctggtgctctcccgagaacgggggggagaaattcctgagaactgagctacactcaggaaatgcccacctgctgcgagcccagcaccgcccccgcatcttcacagacattggctcccatgggcctaacagcagccctatgcgggacggtgtgcctctcgtgatagaggaggaaactgaggcaagaggcggacaagttgctaccataagggtgctggacgatcctggagtcctgagctacgtgggctggccggtttcccgacgtcgggtggaggaggagtatgacatagaatcagatccaccagtgaagggaaccctccggcccagcagagtaagacagtggaaaacagcaaagagaaattcaagagagcaacgctttgcaggagctgaaataacacagcccagggcccacaatgctagagagaccttcgggggggggggggcatcaccttattggctgaaggaaaaggtgtaccagggtctcaccctcaaatccagtggactgagatccgatctcaggctcagggtgagagaacttcagagaagagacaccagctccgactcctcagatgtgaccttcctggaggcacctggtgccagccccccttccactggaatattagagactcgccggcttggcatggtagcttacgcctcccgggccgctccccagtcctctttcaaggtgctctttcacctctacgtccgcagtcacagactctccatccctgcaggggcgctgggctggatcctgaagtcagtccttcaaagtgttcgggttggccacaccagccctggggggatctataaagagggacacccctacggcattgtgcagagatgcattctcaacagaggggattggctggcaaaggcagagtgcaccaaagaactggaaactggtaacaaggaaaaggaaattcaaactgaacagaaacaaggtttaagaataaagcgcaactgtgatacgagggacactgcccttgggcagctcggaggaatcgtcgaggacccacaggcctcacctaatttgcaagagggcacctcgttccccagggtccagggctgtacggcactcagaaggtggctcaccagagtcttcctcctcctgcccccctccagttccaacgatgaacctcagagggattcccctgtcagaggaccagggtttcttatccctggcaccctcagtgttgacagacacttacgctatttcggtatcctgcctactgtgagtaacgctgcggtggtcaaggaagtgcccactgtgagcaatgctgcggtggtcacggaagcgcccactgggagtaacgctgcggtggtcacggaagcgcccactgggagtaatgctgcaagggtcatggaagtacctactgggagtaacgctgcggtggtcacggaggtgcccactgggagtaacgctgcggtggtcacggaagcgcctactgggagtaacgctgcggtggtcaaggaagcacctactgggagtaacgctgcaagggtcatggaagtgcctactgggagtaacgctgcggtggtcaaggaagcacctactgggagtaacgctgcaagggtcatggaagtgcctactgggagtaacgctgcggtggtcaaggaagtgcctactgggagtaacgctgcggtggtcaaggaagtgcctactgggagtaacgctgcggtggtcaaggaagcgcccacggggagtaacgctgcaagggtcatggaagtgcctactgggagtaacgctgcggtggtcacggaagcacctactgggagtaacgctgcaagggtcatggaagtgcctactgggagtaacgctgcggtggtcaaggaagtgcctactgggagtaacgctgcggtggtcaaggaagtgcctactgggagtaacgctgcggtggtcaaggaagcgcccacggggagtaacgctgcaagggtcatggaagtacctactgggagtaacgctgcggtggtcacggaggtgcccactgggagtaacgctgcggtggtcaaggaagcgcccacggggagtaacgctgcggtggtcaaggaagtgcccactgggagtaacgctgcggcggtcacggaagtgcccactgggagtaatgctgcggtggtcacggaagcgcctactgggagtaacgctgcaagggtcatggaagtgcctactgggagtaacgctgcggtggtcaaggaagtgcctactgggagtaatgctgcggtggtcaaggaagtgcctactgggagtaatgctgcggtggtcaaggaagtgcctactgggagtaacgctgcggtggtcaaggaagtgcctactgggagtaatgctgcaagggtcacggaagtgcccactgggagtaacgctgcggtggtcacggaagcgcctactgggagtaacgctgcggtggtcaaggaagcgcccacggggagtaacgctgcggcggtcaaggaagcgcccactgggagtaacgctgcggtggtcacggaagtgcctactgggagtaacgctgcaagggtcatggaagtgcctactgggagtaatgctgcggtggtcaaggaagcgcccacggggagtaatgctgcagtggtcaaggaagtgcccactgggagtaacgctgcggtggtcaaggaagtgcctactgggagtaatgctgcaagggtcatggaagtgcccactgggagtaatgctgcggtggtcacggaagcgcctactgggagtaacgctgcaagggtcatggaagtgcctactgggagtaacgctgcggtggtcaaggaagtgcctactgggagtaatgctgcggtggtcaaggaagtgcctactgggagtaatgctgcggtggtcaaggaagtgcctactgggagtaacgctgcagtggtcatggaagtgcctactgggagtaatgctgcggtggtcaaggaagtgcccactgggagtaacgctgcggtggtcaaggaagtgcccactgggagtaacgctgcggtggtcaaggaagtgcctactgggagtaacgctgcggtggtcacggaagtgcccactgggagtaacgctgcaagggtcacggaagtgcccactgggagtaatgctgcggtggtcacagaagtgcctactgggagtaacgctgcggtggtcacggaagtacctactgggagtaacgctgcagtggtcacggaagtgcaggctgtaagaggtggtgatttcatcttctttgggtctatcgcccacttgcagaaaagcatgtttcttcagcctgtggcacatgatcctgatttccgggccaatttaggggctcaggagggaatagaaagaggtacttgcacaagactaggaactaggccagtatctcacagggcctggaattgtattaatgaaaaccttgttaacagctgtaaaaccaatggggtcagagccaaagcgttggagaaagcacccaatgtagagcagcacacaggactaaaccccacagaagtaataaccgagccggccattcttagcgcggaggctgggagccgtacgggttcggtgcaggcgataaaaggtgggggttcagcaattattgaacgcctgctgcaacagcagcaacaacaacaacagcagtttactactcgttggcgtgcttcttccacttgccccatcaaaaataatgacaaactcactcgtgaggagcaggcgttcgacgtttcctctcatttcacatcaattcaggaggcggtggatgcgctcaactccaaaacaattcactggccagctgatttttgtgtagtgtgtgataccatattattcagtgacgcggtgggacaaggcgacaaacgtacagcgttccgtcggtacgcaaaggagtacaagaacagctcaacgttgctagcgcagatgattgtagcttcgggtgctgcaaacaatccaactaccaacgccacggcagagaagagcgcgtggttgaagcgcgctctggcaacacaaaaccacaagtcggcggaccgcgaggagaaggccggcagcgtgtctaccgggcctgcggtaaagcgcgaggaggagcaccgtgttcgagtttgggatgcggcatggtgtacggttgtgtatcaggtaactccgcgtgagatgaagtttaatgtcactcacctggttggtcttggaaaggacaaccttgcggaggccattcaattcctgaacgcacgcgctctgccaaagggagggaaggcggcgaacggtcgagagaatcctctgcagaattacccgtacgactacgcccttctcttctcttga

SEQ ID NO: 129399 - DNA, 969 bp, Homo sapiens
atgaatgtgaatttggcagaagaatcaaagggcaaagaaacagtaggtgatgaaattaaaggaggcggaattcagatggtaatgcttgccagccagccactcacctcctactgtgctgcccggttcataacaggccatggacagaaattaaaatctgagttaaaaaaaaccctgcaagtcattatgctaaatattcagaaagtgagaatacccactagggatggctataatgaaaaagacatactaagcactggcaaaaatgtagagaaactggaactctcaaacattgctggatatccatcaaatattgagaagaaagaatatcaggagcaaagtgttctaagttgctgttcagaacgtaaagatgcgaaccccaaatcagtggtttgttcattcttcatgcaagagcaatgcactaaaggagagaagcggtttcttatccctggcaccctcagtgttgacagacacttacgctatttcggtatcctgcctactgtgagtaacgctgcggtggtcaaggaagtgcccactgtgagcaatgctgcggtggtcacggaagcgcccactgggagtaacgctgcggtggtcacggaagcgcccactgggagtaatgctgcaagggtcatggaagtacctactgggagtaacgctgcggtggtcacggaggtgcccactgggagtaacgctgcggtggtcacggaagcgcctactgggagtaacgctgcggtggtcaaggaagcacctactgggagtaacgctgcaagggtcatggaagtgcctactgggagtaacgctgcggtggtcaaggaagcacctactgggagtaacgctgcaagggtcatggaagtgcctactgggagtaacgctgcggtggtcaaggaagtgcctactgggagtaacgctgcggtggtcaaggaagtgcctactggagtaacgctgcggtggtcaaggaagcgcccacgggagtaa

SEQ ID NO: 129400 - DNA, 705 bp, Homo sapiens
atggagttggtgctggtcttcctctgcagcctgctggcccccatggtcctggccagtgattaccagaccctgaggattgggggactggtgttcgctgtggtcctcttctcggttgggatcctccttatcctaagtcgcaggtgcaagtgcagtttcaatcagaagccccgggccccaggagatgaggaagcccaggtggagaacctcatcaccgccaatgacaagacatcccccttcctccgggaggtgcaggtcaatctcatcgacttcaagaaatgcaatgactacttggtctatgacagttaccttaccccaaggatgatgtgtgctggggaccttcgtgggggcagagactcctgccagaacaaccgctggtacctggcaggtgtcaccagctggggcacaggctgtggccagagaaacaaacctggtgtgtacaccaaagtgacagaagttcttccctggatttacagcaagatggagactagcccagtgtgggcagatgccagcggcccaggtggcgccattgctgtcctgggatggatcgtgggttttggtggatgcagcttcccagggcctggaccgtcttcggtgaaaagctgctcccgttggctttatgagcatcaagtcctcacccagaccccctgctggtgccgtggatgtcaccagtcggactgtgctgtggctaaccaggctgacaactga

SEQ ID NO: 129401 - DNA, 2064 bp, Homo sapiens
  misc_feature (1)...(2064): n = a,t,c or g
ggcacgaggcgggactcggcgggtcctcctgggagtctcggaggggaccggctgtgcagagaacttcagccaaagcatctgagacgggaagcagaaaaaggagggacagtttggagaagaaaaacgcagctgtgtgtttgggccttgacgtggctgtggatgcagtcgttctgacccctggtggccgagaggtgaagtgcagtggcggctgcttgctcaaggccggaggaagacgccatggagttggtgctggtctttctctgcagcctgctggcccccatggtcctggccagtgcagctgaaaaggagaaggaaatggacccttttcattatgattaccagaccctgaggattgggggactggtgttcgctgtggtcctcttctcggttgggatcctccttatcctaagtcgcagggtgcaagtgcagtttcaatcagaaagccctcgggccccaggagatgaggaagcccaggtgggagaacctcatcaccgccaatgcaacagaagccccagaaagcagagaactgaagttgcagccattcaggtgggaagccctttggaaccgtgagggcggctgctttgaaacctttgggatgcaaaatgtccgatgcttaagaaaaaccggccacttcagcaacagccctttccccaggtataagccaagaaacttgtgtgtcccccaccctatcccctctaacaccattcctccacctgatgatgcaactaacacttgcctccccacatgcagcctgcggtcctgcccacctcccgtgatgtgtgtgtgtgtgtgtgtgtgtgtgactgtgtgtgtttgctaactgtggtctttgtgggctacttgtttgtgggatggtattgtgttttgttaagtgaactgtgggactcgcttttcccagggcagggggctgagccacatgggccatcttgcttccttccctgccccccgtgggccctccatcaccttctgctcctagggaaggctgctttgttggcccgagaaccagccccctcccctgatttagggatgcgtaggggtaagagcacgggcaagtggtcttcaagtcgtcttgggacctgggaaggtttgcaagcactttgtcaatcattcttcaatggactcctttcaatcctttaacaaaaaacttggtttccttaatcccaactgattccaatctgaaaggtctcttaagcaaatggaagaatacaaagcaaggaagctgggtgaagcccagcgttgaaggtaaggaagggcaatgcctttccgtggttaatttcttcccaggggcttccacgaggagtccccatcttgccccgccccttcacagagcgcccggggattncagggcccagggctttctactctgcccctggggaactgtgtcccctgcatatcttcttcagcaataaactccaatgggctctggggacccctaaccccttccaaaccttcccctgctttttgaggactttcaatctacaagcccagcttcatccagaatgcagactgacagtcccctgcaaattgggtcctcctggccaggccaaatagttgaaaggaactccctgttcccgttggggcccagcacacccgggaatggaatggaagggaagaagcagaggccctttgccttcctcctgccctacgtcccccttaagatgggccagcagaggcaactccccgcatccctttgctcctgccctgttgggtggtcaaaaccggtaagcaaggtgggttggagactcagcaggctcccgtccaagcccttgggaacaagtgagaggttgaaggtcataaccgagagtgggaactcaaacccagatcccgcccctcctgtcctcctgtgttccccgcggaaaccaaccaaacccgtgcgctgtgagcccattgctgttctttggatcgtggtttaacctccaccaccaccaagaaaaaaggccctcaaatatcctttgtttcctagtgactgatccgcagtcagtcgcttatcgcgagtcttaactatccattattgggggggtctgtttatatgtgacattttttcgggtgcttgctttccgtcct

SEQ ID NO: 129402 - DNA, 2364 bp, Homo sapiens
atgtctggtttgtctggcccaccagcccggcatggcccttgtccatcggcgttgctgcttttgttcctgctgggccccagcttggtcctcgccatctccttccatctgtccattaattctcacaactgcttccatgaggagatccacaaggacctactagtgactggcacatacgagatctctgaccagtctgggggcactggtggcctgtgcagccacctcaagatcacagattctgctggccatattttctactccaaaaagaatacaaccaaggggaaatttgcctttaccactgaagattatgacatgtttgaagtgtgttttgagagcaaggaaacagggcagatacctgaccaacttgtgatcctagacatgaagcatggagtggaggtgaaaaattacagagagattgcaaaagttgagaagctcaaaccattagaggtgaagctgcgacacctagaagacctttcagaatctattgttaatgattttgcctacatgaagaagagagaagaggagatggtgataccaccagcagaacatcgctgggatgggcctggcctaaggcatcctaccagcagcaccatcaaggcatgctgtgattcttggattgaaaaagaggaaatgattccaaagcaggacatttctgaagaattggaatcccggagagcaaagtcagaagatcatagtttccaattaggagaaagagcctatcagacagatgtgttagtgaaagtgcccagacagagctcagtttttagtgagaatcagaggatgaataatccagagagatggtttgagagtactgggtgtggaaaaacttacaatcagaacagagcttttaaccagcaccagagatttcatagtggagagaagacctatgagcacaatgaatgtggaaaagctttcagttggccctctatcctcagtaaacatcagagaatccacactggtaagaaactctacacatgtgaggattgtggcaaatctttcagtgttcactcatactttattcagcattgtaaaattcacactagagaaaaaccctatgagtgtattaaatgtgggaaagcttttagtacacattcatcttatgttcaacatctaaaaattcatacaggagagaaacatcatgagtgtaatcagtgtgggaaagcctttagtcatagctctaatctaattcatcatcagagaattcatagtggagagaaaccttacaagtgcaaagaatgtgggaaagccttcaacagacaatcaaaccttattcagcatcagagaattcattctggagagaaaccttatgactgtaaggagtgtggcaaagccttcagtacacaattatttctcattcagcatcagagaattcatacaggagaaaagccctatgaatgtaatgaatgtgcaaaatcctttagcctgaaccgaactcttactgtccatcagagaattcacactggagagaaaccttataggtgtaatgaatgtgggaaatcctttagtcaatgctcacaagttattcaacataagagaattcacactggagagaaaccttatatctgcaatgagtgtggaaaatcatttggtgctcgtctatcccttatccagcatcagagaattcacactggagagaaaccttatggttgtagagagaaaccctatgaatgtagtgagtgtggaaaagctttcagccagagttttaatcttattcaccatcaaagaacacacaatggtgagaagtcctatgaatgtaatgaatgtgataaagccttcagtttgctttcttcccttgttcaacatcagagaatacataatggagacaaaccctatgagtgtcacaaatgtgggaaggcctttagccaggggtcacaccttattcagcatcagaggagtcacattggtgagaaaccctatgagtgtaatgagtgtgggaaaacctttgggcagatatccaccctaattaagcatgagagaacacacaatggagagaagccctatgagtgcagtgactgtgggaaggccttcagccagagtgcacaccttatccaccatcaaagaattcacactggagagaatccctatgagtgcagtgaatgtgggaaggccttcaatgtttgttcctctctcattcagcatcacagaattcatactggtgagaaaccttatgaatgtagtgactgtggcaaggcgttcagtcagcattcacaatttatccaacatcagagaattcacactggagagaaaccctacatgtgcaatgagtgtgagaaatccttcagtgcatgcttatcccttatccaacacaagagaattcacactggagagaaaccctatgtatgtgccaaatgtggaaaatccttctga

SEQ ID NO: 129403 - DNA, 752 bp, Homo sapiens
ttgaggccttcggtggtgaacgagtctccagcaccatgtctggtttgtctggcccaccagcccggcgcggcccttttccgttagcgttgctgcttttgttcctgctcggccccagattggtccttgccatctccttccatctgcccattaactctcgcaagtgcctccgtgaggagattcaacaaggacctgctagtgactggcgcgtacgagatctccgaccagtctgggggcgctggcggcctgcgcagccacctcaagatcacagattctgctggccatattctctactccaaagaggatgcaaccaaggggaaatttgcctcttaccactgaagattatgacatgttttgaagtgtggtttgagagcaagggaacagggcggatacctgaccaactcgtgatcctagacatgaagcatggagtggaggcgaaaaattacgaagagattgcaaaagttgagaagctcaaaccattagaggtagagctgcgacgcctagaagacctttcagaatctattgttaatgattttgcctacatgaagaagagagaagaggagatgcgtgataccaacgagtcaacaaacactcgggtcctatacttcagcatcttttcaatgttctgtctcattggactagctacctggcaggtcttctaccctgcgacgcttcttcaaggccaagaaattgattgagtaatgaatgaggcatattctcctcccaccttgtacctcagcccagcagaacatcgg

SEQ ID NO: 129404 - DNA, 426 bp, Homo sapiens
  misc_feature (1)...(426): n = a,t,c or g
agaagctgagcggagaccggctagactttactcaaagaaaccaagagactgttaccatggcagggaagcccaagcttcactacttcaatggacggggcagaatggagcccatccggtggctcttggctgcagctggagtggagatgggagtttgatgttccagcaagtaccaatggttgagattgatgggatgaagttggtacagaccagagccattctcaactacattgccagcaaatacaacctctacgggaaagacataaaggagagagccctaattgatatgtatacagaaggtatggcagatttgaatgaaatgatccttcttctgcccttatgtcgacctgaggaaaaagatgccaagattgccttgatcaaagagaaaacaaaaagncgctatttccctgccttcgaanaagagttacn

SEQ ID NO: 129405 - DNA, 354 bp, Homo sapiens
gtcttaaagagccacggacaagactaccttgttggcaacaagctgagccgggctgacattcacctggtggaacttctctactacgtggaagagcttgactctagccttatttccagcttccctctgctgaagatttccatgaacccagacagagaccacttcatttacgattgggtagaaccattcttagacgaagaaggttatccagaccctgagaaatgtggtcgtattcgttggattgttcagaggagcccagcaatactataccctgttggaaaaaatgaaaactccttgcagtttaccaagtcctcttgcaaacagagccgctacctggagatatgccagtggaagtaa

SEQ ID NO: 129406 - DNA, 870 bp, Homo sapiens
atgaaactgtgggtaacgcacagccagtttattgttgagcatattaatgccatgaccacgctggcgcgggaacaccgggcattgccacctgaactggcacaagagtatttacagtcttgtgaaatcgccattcagcgttgtcagcagcgactggagtatgacgaaccgggtagttctggcgatgccaatatcatggatgcgccggagatgcagccgcacgaaggcgcggcaggtacgctggagcagcatttacagcgggttattggtcatctgaacaccatgcacaccatttcgtcgatggcatttacaaaagaggctgaaatgttacaggtcaggagcctacaaaggtaccataacattagtgctcagaaccttttgccgcgcatatttgatgaataccaccaacacggttcaatctttggtattcccgagcaacagttttactcacctgtaagaggtaaaactgttagcgtcttcggtgaaacctgtgccactcccgtcggccctgccggtggcccgcacacgcagctcgcgcaaaatattgtcacttcctggctgactggcggacgcttcatcgaactaaaaaccgtccaaattcttgaccgcctggagctggaaaagccctgtatcgatgccgaagacgagtgctttaacacccaatggtctaccgagtttaccctgcttaaagcctgggatgaatacctcaaagcctggtttgccctgcaccttctcgaagcgatgttccagccttctgattccgggggatcctctagagtagagttgcatcagggtagctcgattgcgttgggggcgatcctaacagtgtaccgaggtgggctccggtgctatttacgcgacacgtgcgcctag

SEQ ID NO: 129407 - DNA, 1323 bp, Homo sapiens
atgttcccggaatttggtggcgattcctcggcgcagaccgacaactttatgaccaaacgcgccagcggtctggcgacgtatcggaacaccgacttcttcggcgttatcgatggcctgaacttaaccctgcaatatcaagggaaaaacgaaaaccgcgacgttaaaaagcaaaacggcgatggcttcggcacgtcattgacatatgactttggcggcagcgatttcgccattagtggggcctataccaactcagatcgcaccaacgagcagaacctgcaaagccgtggcacaggcaagcgtgcagaagcatgggcaacaggtctgaaatacgatgccaataatatttatctggcaactttctattctgaaacacgcaaaatgacgccaataactggcggctttgccaataagacacagaactttgaagcggtcgctcaataccagtttgactttggtctgcgtccatcgctgggttatgtcttatcgaaagggaaagatattgaaggtatcggtgatgaagatctggtcaattatatcgacgtcggtgctacgtattatttcaacaaaatatttcatcaagggctaaaaaaaggtcgaaaaggccagtacctgtccaatgctgatctgcctagagaatcttcggatcagctcgcgcaaaatattgtcacttcctggctgactggcggacgcttcatcgaactaaaaaccgtccaaattcttgaccgcctggagctggaaaagccctgtatcgatgccgaagacgagtgctttaacaccgaatggtctaccgagtttaccctgcttaaagcctgggatgtatacctcaaagcctggtttgcctgcaccttctcgaagcttttactggtatactgcgtgtcttgcgctttgttgcggtgccaaaacctgcccgtgcgaagtgatttgtttttaaatcatatggttagagatatgaaacatactgtagaagtaatgatccccgaagcggagattaaagcgcgtatcgccgaactgggtcgtcagattactgagcgttacaaagacagcggcagcgatatggtgctggtgggtctgctgcgtggctcatttatgtttatggcggacctgtgccgtgaagttcaggtatctcatgaagtcgactttatgaccgcctccagctacggtagcggcatgtccaccacccgtgatgtgaaaatcctcaaagatgaccgcaggcagcgagttccagggggacttaagctttggcgcttctgccctggccctctgttggccactccgcgggtgctgtgcctgggcgcctccgtgctctcggccaactgcctttga

SEQ ID NO: 129408 - DNA, 3672 bp, Homo sapiens
atggccgccgtgtgcggtaccagcggcattgcttctcttttttctcaggcggcattcgcggcagattctgatattgccgacgggcaaacccagcgttttgacttctccattctacagtcaatggcgcacgacttagcgcaaacagcgtggcgtgatgtgcacaacacaacatataactacaagcgattgatgagccagcgggatgccctgaatcagagcctggcagaagtccaggggcagattaacgtttcgttcgagtttttcccgccgcgtaccagtgaaatggagcagaccctgtggaactccatcgatcgccttagcagcctgaaaccgaagtttgtatcggtgacctatggcgcgaactccggcgagcgcgaccgtacgcacagcattattaaaggcattaaagatcgcactggtctggaagcggcaccgcatcttacttgcattgatgcgacgcccgacgagctgcgcaccattgcacgcgactactggaataacggtattcgtcatatcggggcgctgcgtggcgatctgccgccgggaagtgagatgcgctctaagattgcgcaggatatcgatcaatccgtcgatcttctctcgctttcggaagagatgcccgcaaatgaagatctcctgaatgaagattcagcggcaccggttatccgcttgatcaatgcgattttgagtgaggccatcaaagaaaccgcctctgatatccacattgaaacctatgaaaaaacaatgtcgatccgttttcgcatcgacggcgttttgcggacaattttacagccaaacaaaaaactggcggcactgcttatctcccgaattaaggtcatggctcgtcttgatatcgccgaaaaacgtattccacaggatggaagaattagtttgcgtatcgggcgacgtaacatagatgtccgcgtatccacactgccgtccatctatggtgaacgcgccgtactccgcctgctggataaaaacagcctccagctttcattgaacaacctggggatgacggcagcggataagcaggatttagaaaatctcattcagcttccgcacggtattatcctggtgacagggccgacaggctccggtaaaagcaccacgctctacgccatcctttccgcgctgaatactcccggccgcaatattctgacggtagaagatcccgtggaatatgagctggaacgcattgggcaaacgcagccttctgattccggtaaatcgttcatctttaatatgagcgtcggttacaacctcgaaggtattaagcaaccgccgatgcaacagttcatcgacaatatgatggacgcatctgaccatccgaaattcgctcaatatcgcgatacgctgaataaattactccaggatgacgcatttttagctcgccacggattgcaggaaaaacgcgaaagcttgcaagccttacccgctcgcatccccaccagtatggtgcatggcgtcaccctctccaccatgcacggctgtcctccgcatgaaatcgaagccatttgccgctacatgctggaagaaaaagggctcaacacctttgtgaaacttaacccgaccttactggggtacgcgcgtgttcgtgagatcctcgatgtctgcggtttcggttacataggcttaaaagaagagtcatttgatcacgacctcaagctgacgcaagcactggaaatgctggaacgcctgatggcactggcaaaagaaaaatcactcggctttggcgtaaaactgactaacactctcggcaccatcaacaataaaggcgcactgcctggtgactctacgagtggcgttctgcggacttacgagcggctcttgaccgcctggatgctgacatgcccatgcgctgatgagcatcaacgcggtgaaagcgtgaaattggcgacggctttgacgtggtggctgcgcggcagccagaaccgcgatgaaatcaccaaagacggtttccagagcaaccatgcgggcggcattctcggcggtatcagcagcgggcagcaaatcattgcccatatggcgctgaaaccgacctccagcattgacgtgccgggtcgtaccattaaccgctttggcgaagaagttgagatgatcaccaaaggccgtcacgatccctgtgtcgggatccgcgcagtgccgatcgcagaagcgatgctggcgatcgttttaatggatcacctgttacggcaacgggcgcaaaatgccgatgtgaagactgatattccacgctgcgcacaatcgataggcagtttttctaatggctgtattgtcggcgctgacacgctgccgatacagtccgaacattatcaggtcatgcgtaccgatcagcgtcgctatttcggtcacccggatctggtgatgtttatccagcgtctgagtagccaggtgagcaatctgggcatgggtacggtgctgattggcgatatggggatgcccgctggtgggcgtttcaacggcggtcatgccagccaccagaccggactggatgtcgatatctttctgcaactgccgaaaactcgctggacctccgcgcagctcttgcgcccgcaagcactggacttagtttcccgcgacggtaaacacgttgtctccacgctgtggaagccagaaattttcagcttgatcaaactcgccgcccaggacaaagacgtcacgcgcatttttgttaatccggcgattaaacaacaactttgccttgatgcgggcacgatcgcgactggttgcgcaaagtgcgaccctggtgtcagcatcggcgcatatgcatatttgctgacgttgcgcgcccagtgtctggcacatgacttgcctgacccgttagagccgctggaaatcgacggcacgctactgccgcgctatgtgttcattcacggcgggccgcgtgtgttcacctattacacgccgaaagaagagtctattaagctgttccacgactatctcgatttgcaccgtagcaacccaaatctggatgtgcagatggtgccagtgtcggtgatgtttggtcgcgcgccggggcgtgaaaaaggcgaagtgaacccgccgctgcgtatgcttaacggcgtacagaaatttttcgctgtactgtggctcggtcgcgacagttttgtgcgtttctcgccgtcagtttcgctgcgccgtatggcggatgaacacggcacggataaaactatcgctcagaaactggcgcgcgtggcgcgtatgcactttgcccgtcaacgtctggctgccgtaggcccacgtttgcctgctcgtcaggatctgtttaataagctgctcgcctcccgcgccattgccaaagcggtagaagatgaagcgcgcagcaaaaaaatctcccatgaaaaagcgcagcagaacgcgattgcactgatggaagagattgcggcgaatttctcttacgagatgattcgcctgactgaccgtattctgggcttcacctggaaccgactttaccagggcatcaacgtccataacgctgagcgcgttcgccagctggcccacgacggtcatgagctggtatatgtgccttgccaccgcagtcacatggactacctgctgctttcttacgtgctgtatcaccaggggctggtgccgccgcatatcgccgccgggatcaacctgaatttctggcctgccgggccgattttccgccgtctgggggttatttag

SEQ ID NO: 129409 - DNA, 1040 bp, Homo sapiens; identical to SEQ ID NO: 121671

SEQ ID NO: 129410 - DNA, 1087 bp, Homo sapiens
  misc_feature (1)...(1087): n = a,t,c or g
gaactattgagaggaacaaagagcttataaatacattaggacctggaattcagttgtcgagccaggacggtgacagcgtttaacaaagcttagagaaacctccaggagactgctatcatggcagagaagcccaagctccactacttcaatgcacggggcagaatggagtccacccaggtggctcctggctgcagctggagtagagtttgaagagaaatttataaaatctgcagaagatttggacaaggtaagaaatgatggatatttgatgttccagcaagtgccaatggttgagattgatgggatgaagctggtgcagaccagagccattctcaactacattgccagcagatacaacctctatgggaaagacataacggagagagccctgattgatatgtattataggaaggtattagccagatttggggtgaaattgatcctccttcttgcccgtatgttccacctgagggaaaaagatgcccaagctttgccttggatcaaagagaaaataaaaaatccgctacttccctgcctttgaaaaaagtcttaaagagccatgggacaagactaccttgttgggccaacaagcttgagccggggctggacattcatctggtgggaacttctctactacgtcgagggagcttggactccagtcttatctcccaacttcccctctgctgaaggccctgaaaaccagaatcagcaacctgcccacagtgaagaagtttctacagcctgggcagcccaaggaagcctcccatgggatgaggaaatctttaggaaggaaggcaagggaagatttttcaggtttttaataacggcagttcatgggaggccaagaacttggcaataccaatgtttctnaaagttttggcaacaataaagtacttttacctaagtgttagattgtggcctgttgtgaagctaatgaactctttcaaattatatgctaattaaataataaaaactcctattcgctgacttagttaaaattgatttgttttcattaggatctgatgtgaattcagatttccaatcttctcctagccaaccattttcctggaattaaaaattcagtaaa

SEQ ID NO: 129411 - DNA, 738 bp, Homo sapiens
atggtaaagttagaggaagcagaagagagagaggaaaaaggagaaggaaaagaagaaggagaaggaggagggggacagaatggggaggtggaagagaaggaggagggggaggaggaaaaggagaagatggagaagaagaagaaaaaaaagaaatggggcctcatgtctacaatttatgaggatgtcagtcataagatatttttccagcatggaccaaatatagcatgtgttgaaacgtgtaaagaaagccagagggaagggtatgtgaagaaaagctgtggactgaggaatcaaagggtaactatgaaatcagagatgcacctgggcatactctatgacaatggaaattttcttaatcagttgtgtcaaaaccctttctgtgaggtatgcagtacagcaattgaagacaggggtcttctgctctttggagactcaacccagcaaaatggctcctgcaaagaagggcagcaagaagaaaaaaggccattctggatcattgaggtggtgacccaagaaaacaccatcaacattcagaagcatatccatgaagtgggcttcaagaagtgtgcccctcgggcactcaaagagattcagaaatttgccatgaaggagatgggaactccagttgtgctcattgataccaggctcaacaaagctgtctgggccaaaagaataaggaatgtcacaaacagaatccatctgtgtttgtccagaaaatgtaatgaggataaagagtaa

SEQ ID NO: 129412 - DNA, 323 bp, Homo sapiens
cactctcctccctggctagcatgagcttcaccacttgctccgccttcaccaactactggtccccgggttctgtccaggtgcccagctatggcacccagcctgtcagccacgcagccagcgtctatgcaggcctggggggctctggttcccggatctccgtgtcccacttcaccaatggccgggggtctggcaggaatgggaggcatccagaacgagaaggagaccatgcaaagcctgagagaccgcctggcctcctacctggacagggtgaggggcctggagaccgagaattggaagctggagagcaaaatccaggagcacct

SEQ ID NO: 129413 - DNA, 991 bp, Homo sapiens
atgaggaaaacttacggaatttgtgagaaagtatcaaaggataaaatatttgagtccataggagttagagaagcagaagagaaaaataaagggacaaaaagtgtatttaaagaaatgatagccaaaaaactttccaaacctggagaaagctctgtccttgcgaccacctacggcgcccggctggtcagcagcacagccagagtctatgcaggcgccgggggctctggttcccggatctctgtgtcccgctccaccagcttccagggcggcttggagtccgggggcctggccgcggggatggccgggggtctggcaggaataggaggcatccagcacgagaaggagaccatgcaaagccctgaaagactgcctggcctcctacctggacagaaccatccagaacctgaggattcagatcttcgcaaatactgtggacaatgcctgcatagttctgcagattgacaatgcccgtcttgccgctgatgactttagagtcaagtatgagacagagctggccatgcgccagtctgtggagaacgacatccacgggctccgcaatgtcattgatgacactgtcactcggctgcagctggagacagagatcgaggctgtcaaggaggagctgctcttcatgaagaagaacctcaaagaggaagcaaaaagcttacaagcccagattgccagctctgggttgatggtggaggtagatgcccccaaatctcaggacctcgccaaggtcatggcagacatccgggcccaatatgacgagctggctcagaagaacggagaggagctggacaagcattggcctcagcagattgaagagagcaccacagtggtcaccactcagtccgccgaggttggagctgctgagacgacgctcacggagatgagacgtacagtgcagttcttggagatgacatggactccaggagttatcgaggtcctcagtgtttttaagtacagggtcatcactgaagttgctttgtag

SEQ ID NO: 129414 - DNA, 1030 bp, Homo sapiens
aagaagacctggaagccttaggcctcgatacgcatgtgacggggcgacccacgcgtgcggcgacgtacgcaaagcctgagtcctgtcctttctctctccccggacagcatgagcttcaccactcgctccaccttctccaccaactaccggaccctgggctctgtccaggcgcccagctacggcgcccggccggtcagcagcgcggccagcgtctatgcaggcgctgggggctctggttcccggatctccgtgtcccgctccaccagcttcaggggcggcatggggtccgggggcctggccaccgggatagccgggggtctggcaggaatgggaggcatccagaacgagaaggagaccatgcaaagcctgaacgaccgcctggcctcttacctggacagagtgaggagcctggagaccgagaaccggaggcttggagagcaaaatccgggagcacttggagaagaagggaccccaggtcagagactggagccattacttcaagatcatcgaggacctgagggctcagatcttcgcaaatactgtggacaatgcccgcatcgttctgcagattgacaatgcccgtcttgctgctgatgactttagagtcaagtatgagacagagctggccatgcgccagtcttgtggagaaccgacatccatgggctccgcaacgtcatttgatgacaccaattatcacaccgacttgcagctggagacagagatcgaggctctcaaggaggagctgctcttcatgaagaagaaccacgaagaggaagtaaaaggcctacaagcccagattgccagctcctgggttgaccgtggaggtaagatgcccccaaaatctcaggacctcgccaagatcatggcaagacatccgggcccaatattgacgagctggctcgggaagaaccgagaggaagctagacaagtactggtctcagcagattgaggagagcaccacagtggtcaccacacagtctgctgaggttggagctgctgagacgacgctcacagagctgagacgtacagt

SEQ ID NO: 129415 - DNA, 438 bp, Homo sapiens
ctgcattcagatgatttatctctacaaatgttgagatgcagcccagttgcaacagccgcttcctacacgagtggtcccggtgcccccatcagctcctcaagcttctcccgagtgggcagcagcagcttccagggtggcctgggtggaggctttggcggggccagcggtattggagggatcactgctgtcatggtcaaccagagcctgctgaggccccttaacctggaggtggaccccaacatccaggccaggttctgcacacccaggagaaggagcagatcaagacattcaaaacaagtttgcctccttcatcgacaaggtacggttcctggagcagcagaacaggatgctggaggccaagtggagcctcctgcagcagcagaagatggctcagagcaacatggacaacatgttccagagctacatcaacaaccttag

SEQ ID NO: 129416 - DNA, 1455 bp, Homo sapiens
atgagcaccaactgcattagtgggactcttactattcctcttcaaccgctttgttccacccctaacattttccttatggatgaatttggtttcctcagtcatgatgcaggtattttcctgcagtatgcaatcatatggcaaagcagcagtcaagtggttaaatgtgcaatcgtgagaaattttcccactggtgatccagaagtcctacaaggtatccacctctggcccccgggccttcagcagccgcttcctacacgagtggtcccggtgcccccatcagctcctcaagcttctcccgagtgggcagcagcagcttccagggtggcctgggtggaggctttggcggggccagcggtattggagggatcactgctgtcatggccaggttctgcacacccaggagaaggagcagatcaagacattcaaaacaagtttgcctccttcatcgacaaggtacggttcctggagcagcagaacaggatgctggaggccaagtggagcctcctgcagcagcagaagatggctcagagcaacatggacaacatgttccagagctacatcaacaaccttaggtggcagctggagactctgggccaggagaagctgaagctggaggcagagcttggcaacatgcaggagctggtggaggacttcaagaagaagtaccatgatgagatcaataagcatacagagatggagaatgaatttgtcctcatcgagaaggatgtggatgaagcttacaagaacaaggtagagctggagtctcacctggaagggctgactgatgagatcaacttcctcaggcagctgcatgaagaggagatctgggagctgcagtccctgatctcggacacgtctgtggtgctgtccatagacagcagccactccctggacatggacaacatcatcactgaggtcaaggcccagtataaggagatcgccaactgcagctgggctaaggctgacagcatgtaccagatcaagtatgaggacctgcagatgctggccaggaagcacggggataacctgaggtgtacaaagactgacatctccgagatgaaccagaatgtcagctggctccaggctgagatcaagggcctcaaaggccagagggcttccctggaggccaccatcacagatgccgagaagcgcagggagctggccattaaggatgccaacaccaagctgttggagctggaggccgccctgcagtgggccaagcaggacatggcacagcagctgcgtgtataccaggagctgatgaatgtcaagctggccctggacatcaagactgccacctacaagaagctgctggagggtgaagagagctggcaagagtctaggatgcagaacatgagtatctactcaaagaccaccagtggctacgcaggagggctgagctcggcctatgggggcctcacaagcccccctcctcagctatggcctgagctctag

SEQ ID NO: 129417 - DNA, 982 bp, Homo sapiens
  misc_feature (1)...(982): n = a,t,c or g
gctcctttctagcatctccgcctggttcggcccgcctgcttcaactcctgcctttaccatgtccatcagggtgacccagaagtcctacaaggtgtccaacttcttgcccccgggccttcagcagccgctcctacacgagtgggcccggttcccgcatcagctcctcgagcttctcccgagtgggcagcagcaactttcgcggtggcctgggcggcggctatggtggggccagcggcatgggaggcatcaccgcagttacggtcaaccagagccctgctgagcccccttgtccttgaggtggaccccaacatccaggccgtgcgcacccaggagaaggagcagatcaagaccctcaacaacaagtttgcctccttcatagacaaggtacggttcctggagcagcagaacaagatgctggagaccaagtggagcctcctgcagcagcagaaagacggctcgaagcaacatggacaacatgttcgagagctacatcaacaaccttaggcggcacgtggagactctgggccaggagaagctgaagctggaggcggacgttggcaacatgcaggggctggtggaggacttcaagaacaagtatgaggatgagatcaataagcgtacagagatggagaacgaatttgtcctcatcaagaaggatgtggatgaagcttacatgaacaaggtagagctggagtctcgcctggaagggctgaccgacgagatcaacttcctcaggcagctgtatgaagaggagatccgggagctgcagtcccagatctcggacacatctgtggtgctgtccatggacaacagccgctccctggacatggacagcatcattgctgaggtcaaggcacagtacgaggatattgccaaccgcagccgggctgaggctgagagcatgtaccagatcaagtatgaggagctgcagagcctggctgggaagcacggngatgacctgcggcgcacaaagactgagatc

SEQ ID NO: 129418 - DNA, 376 bp, Homo sapiens; identical to SEQ ID NO: 118341
  misc_feature (1)...(376): n = a,t,c or g

SEQ ID NO: 129419 - DNA, 612 bp, Homo sapiens
atgattcctgtgtctgaaaagtccaaaattgggcagcttaatttgatgctgaaaggaaagaagaccaaggggaagaaggtggctctggtccctgctgctgtgaagaagcaggaggccaagaaagtggtgaatctcttgtttgagaaaaggcctaagaatgttggcattggacagacatccagcccaaaagagacctgcacctgctttgtgaaatggccccgctatatcaggttgcagcagcagacagccatcctcgataatttatccaggccctggaccagcaaacagctactcagctgcttaagctggcccacaagtacagaccagagacaaagcaaaagaataagcagaggctattggcccagggctgagaagaaagctgccagcaaaggggacatccccaataagagaccacctgtccttcaagcaggagttaagactgtcaccaacttggtggagaacaagaaagctcagctggtggtgattgcacatgacgtggatcccgttgagctggttgtcttcctgcctgtcctacattgtaaaatgggggtcccttactgcattatcaaggggaaggcaagactgggacatctagtccacaggaagacctga

SEQ ID NO: 129420 - DNA, 913 bp, Homo sapiens
cgtcgacgcccaagatgccgaaaggaaagaaggccaagggaaagaaggtggctccggccccagctgtcgtgaagaagcaggaggctaagaaagtggtgaatcccctgtttgagaaaaggcctaagaattttggcattggacaggacatccagcccaaaagagacctcacccgctttgtgaaatggccccgctatatcaggttgcagcggcagagagccatcctctataagcggctgaaagtgcctcctgcgattaaccagttcacccaggccctgggaccgccaaacagctactcagctgcttaagctggcccacaagtacagaccagagacaaagcaagagaagaagcagagactttttggcccgggccgaggaagaaggctgcttggccaaaggggacgttcccaacgaagagaccacctgtcccttcgagcaggagttaacaccgtcaccaccttggtggagaacaagaaagctcagctggtggtgattgcacacgacgtggatcccatcgagctggttgtcttcttgcctgccctggtgtcgtaaaatgggggtcccttactgcattatcaagggaaaggcaagtctgggacgtatagtccacaggaagacctgcaccactgtcgccttcacacaggtgaactcggaagacaaaggcagctttggctaaagctggtggaagctatcaggaccaattacaatgacagatacgatgagatccgccgtcactggggtggcaatgtcctggggtcctaagtctgtgggctcgtatcgccaagctcgaaaaaggcaaaggctaaagaacttgccactaaactggggttaaatgtacactgttgagttttctgtccataaaaataattgaaataatacaaattttccttcaaaaaaaagcggccgcgtcgacgtg

SEQ ID NO: 129421 - DNA, 1006 bp, Homo sapiens
atggataaatctaaaaggcaatttgctaagaaaacgaagcctgacgagcaacttctggccctgcaagctccgttcacgcaaaagacacacaaccagaaacctgaggatgaacctatggctctcctctcaccctccacagcaatcaaacaccaagccctggtgctgtcagctcagctgcagtacatcactcctaaccctgcttggaacatccttgcctctcctctcctatctaattcatctcattcctccaggcccaagacagtatccagttatccacagaacctcaacactactactccagcacatcagtgtgggaaaggagaagtttcacaaatcccaacattggggcttttgcaacaatgttatgatgttgcagctgcagctctcgccgctgaaggggctcagcctggtcgacaaggtgaacaggccgccggccctgagcgggacccgggttctggccagcaagactgcatggaggatcttccaggagcccgcgagccgaaaactaaagcagctgcccccggcgtggaggatgagccgctgctgagaggaaacccttgccgctttgtcatcttccccatcgagtaccatgatatctggcagatgtatgagaaggcggaggcttccttctggaccacccgaggaggtggacctgtccaaggacattcggcactgggaatccctgaagcccgaggagagatattttatatcccatgttctggttttctttgcagcaagtgatggcataataaatgaaaatttggtggagcgatttagccaaatagttcagattacagaagcccgctgtttctatggcttccaaattgccatggaaaacatacattctgaaatgtatagtctccttattgacacttacatcaaagatcccaaagaaagggaatttctcttcaatgccattgaacgatgccttgtgtcaagaagaaggcagattgggccttgcgctggattggggacaaagaggctacctatggtgaacgtgttgtag

SEQ ID NO: 129422 - DNA, 1371 bp, Homo sapiens
cccaggcgcagccaatgggaagggtcggaggcatggcacagccaatgggaagggccggggcaccaaagccaatgggaagggccgggagcgcgcggcgcgggagatttaaaggctgctggagtgaggggtcgcccgtgcaccctgtcccagccgtcctgtcctggctgctcgctctgcttcgctgcgcctccactatgctctccctccgtgtcccgctcgcgcccatcacggacccgcagcagctgcagctctcgccgctgaaggggctcagcttggtcgacaaggagaacacgccgccggccctgagcgggaccccgcgtcctggccagcaagaccgcgaggaggatcttccaggagcccacggagccgaaaactaaagcagctgcccccggcgtggaggatgagccgctgctgagagaaaacccccgccgctttgtcatcttccccatcgagtaccatgatatctggcagatgtataagaaggcagaggcttccttttggaccgccgaggaggtaggacctctccaaggacattcagcactgggaatccctgaaacccgaggagagatattttatatcccatgttctggctttctttgcagcaagcgatggcatagtaaattgaaaacttggtggagcgatttagccaagaagttcagattacagaagccccgctgtttctatggcttccaaattgccatggaaaacatacattctgaaatgtatagtcttcttattgacacttacataaaagatcccaaagaaagggaatttctcttcaatgccatttgaaacgatgccttgtgtcaagaagaaggcagactgggccttgcgctgggattggggacaaagaggctacctatggtgaacgtgttgtagcctttgctgcagtggaaggcattttcttttccggttcttttgcgtcgatattctggctcaagaaacgaggactgatgcctggcctcacattttctaatgaacttattagcagagatgaggggtttacactgtgattttgcttgcctgatgttcaaacacctggtacacaaaccatcggaggagagagtaagagaaataattatcaatgctgttcggatagaacaggagttcctcactgaggccttgcctgtgaagctcattgggatgaattgcactctaatgaagcaatacattgagtttgtggcagacagacttatgctggaactgggttttagcaaggttttcagagtagagaacccatttgactttatggagaatatttcactggaaggaaagactaacttctttgagaagagagtaggcgagtatcagaggatgggagtgatgtcaagtccaacagagaattcttttaccttggatgctgacttctaa

SEQ ID NO: 129423 - DNA, 621 bp, Homo sapiens
aagatttataaagatgctcagtcgtcaccaccagcacgtgcaccatgtcctcccgctgctgcgtgctcctctgccagtggcaatggaagaagagatccccgcgctcttcattgacaatggctccggcatgtgaaaagcagctttgctgggacaatgccctccgagccatattcccctccatcatcgggcacccccggcaccagggcgtgatggtgggcatgggccagaaggactcctacgtgggcgaccaggcccagagcaagtgcggcatcctgaccctgaagtaccccatcaagcatggcatcgtcacaaactgggacgacatggagaagatctggcaccatgttttctacaacgagctgtgcgtggccctggaggagcaggtggtgctgctgaccgaggccccgctaaaccccagggccaatagggagaagatgactcagatcatgtttaagaccttcaacacccaggccatgtacgtggccattcaggccgtgctgaccctccacagctctggttgcaccactggcattgtcatggactctggagatggggtcacccacacagtgcccatctacgagcgccacaccctccctcacaccatcttgcatctggacctgg

SEQ ID NO: 129424 - DNA, 966 bp, Homo sapiens
atgaggagagaccccacgccgcccaggggcctcccgcggcagaggccgacgccgagcccaaggacacgctcccggggacaccaaagccaaaggccaaaggccaagtccgagccccagcccgcgcccgcggcgacccccggaggccgaagggcgtgggaaccacgggcgcaagccggctgcccacccccgccccgggccgcctctcccaggagattagtgcagggcgagcggccggaatccgggaaccgtagccgacaggcagcttacccacgccgcgccagccgggcacgaacctgcacaacgcgacttccaccaaccttgcgccagcgcgcactgacgcagcgcccatgctcgatgcatagagctctggctgctttaaaaaataaacctctaaatcatgttcacaaggtagtcaaggagcgtctgtgcccttggttgtgttcacgacaacctgagcctttcggggtcaaattccatcatgcccattgtaaaaagtttcattcgaaaaatggaaatgaccttcatccactcggtggaccagtgttctctcaagtatctgactgcgacaggcttgaacaaaatgttaaaaatgaggagagtcagatgttttacaggagactgagcaacttgacttcatcagaagaagtgctaagttttataagcacgatggaaaccctgcctgacactatggcagcaggagctttacaacgaatttgtgaagtggaaaaaaaggatggtgatcaagggctgccaaaagaaatactggagaatagcatctttcaagctttatgctttcagtttgaaaaggagccctcacagctgtcaaacactagtttagtgactgctttgcaagctctgattctgttgcatgtggatcctcaaagtagcctgttgctgaacctggtggcagatgccaaaatcgtctcgggtaccgagctcgattcgaatcatgtcatgccagaataa

SEQ ID NO: 129425 - DNA, 461 bp, Homo sapiens
gcgtgtgggactccagacaggagaggctgcgccttccccgcaccgggaccttcgcgacacaccagatcctcgcccctggctcgcgcgaacgcacaggatgaccaccaccctcgtgtctgccaccatcttcgacttgagcgaagttttatgcaaggtaaaggggggcggagcatttgcttttcaaaaagtctttttcttttgccttaagaaagaaccccccaaaagttagggtcttggatggcaatggggaaagtggtgcagcgagatgattcttttctcctccggcatttctcccaagtttgaaggaatttggccccgtcctttccaccctttgaggttcaaccagtggctggcggggattacatgtgaatctggaggccagggttttgaggggcgaagtttgcctggcagggcagcccgggggcttcggggggagggctgggattgggacaagttttggg

SEQ ID NO: 129426 - DNA, 1272 bp, Homo sapiens
  misc_feature (1)...(1272): n = a,t,c or g
atggggagggcccggaagtcgggcctgggacagaggagccggcccaccgcctcccggtcggaagcggcagtgcagcccggagtcagaaaggcgaggggcgccgggaactggcgtgtgggactccagacaggagaggctgcgccttccccgcaccgggaccttcgcgacacaccagatcctcgcccctggctcgcgcgaacgcacaggatgaccaccaccctcgtgtctgccaccatcttcgacttgagcgaagttttatgcaagggtaacaagatgctcaactatagtgctcccagtgcagggggttgcctgctggacagaaaggcagtgggcacccctgctggtgggggcttccctcggaggcactcagtcaccctgcccagctccaagttccaccagaaccagctcctcagcagcctcaagggtgagccagcccccgctctgagctcgcgagacagccgcttccgagaccgctccttctcggaagggggcgatgcggctgctgcccacccagaagcagcccgggggcggcccaggtcaactccagccgctacaagacggagttgcgccgccccagcgaggaaaacggagccaggaagcacggggacaagtgccagcatagctttagctttgctgcgtttcccagtgccgctgccaccgccgctgccaccgggctgctggacagccccacgtccatcaccccacccccctattctgagcgccgatgacctcctgggctcacttaccctgcccgatggcaccaataaccccttttgccttctccagccaggagctggcaagcctctttgcccctagcatggggctgcccgggggtggctccccgaccaccttcctcttccggcccatgtccgagtcccctcacatgtttgactctccccccagccctcaggattctctctcggaccacagagggctacctgagcagctccagcagcagccacnattacctgctgccatgtaaaaccccactgtgttcctgcggcatcatcaggcttggaaaagagcaagtccaagggttctcccaagatgggcaagacctgaagcatatgctggttaagaagcttgcccaaggtcacacagctggttccagcaacctgctggtgaacactgacattatggtatttggatttacaacagccctgagaagttcaaaacaccagatccaggagataagtaaagccaagaccagcgctgcccaggatggagacacaggtgcctacatctccagtggtggctgcggcgaaggcagaa

SEQ ID NO: 129427 - DNA, 384 bp, Homo sapiens
tgaagtcgtctgattggcaagaaaaacaaagtattcagtatttccatcaactgagtgttttcgtcattcacttctgacaaatcttgcaacagctcttggtttttatttaggaaatcaatggcaggcttagcaagaagctggaatcctcccataaccaggaaatttgtaatagatgtgcaatactctgtataactatccaagaagagacttgaatgcttcaggatgaccaaactcctggcttcctttaccccatgaaggaagctgctcaatgaggctccatgctgaccaatgaggtaacacagcttgctgaatcggctagccacctcctgcaacagctggactgtacctgtagtgcccaaattttctaaactgagaagaggcctg

SEQ ID NO: 129428 - DNA, 534 bp, Homo sapiens
tacacctgttgttggtgtgagagctggctgctacttatgaagctggtgccttgtcactgaagaaagttatgaacttttatagtacaaccccttgtgaaactggagctcaggcaggcagtagtgccattggccccgaaggtttgaaagatagcagggaagaacaggttaaacaggaatcaatgcaaggaaagaaaagttcaagtcttgtggatatcagagaagaagaaacagagggaggcagtcgaagactctccctccctggattgttgtcacaagtttcccccaggctcttaagaaaggctgcacgggtgaaaacgaggacagtggttctgacccccacatacagtggagaagcagatgcgctcctgccttctctgagaacagaagtgtggacctgggggaaaagggaaggaaggggcagctgtgggcaccggcgatgtttctgcctaggtctttcaacccgtttgtgtgttaaaaatgtctgggatgggccaaaggaagttaatcccattctgggaaggccagggtgggttt

SEQ ID NO: 129429 - DNA, 482 bp, Homo sapiens
tcaatggcccacataatggtcttctttgttcattgccttgtttgggatcctgtactctcccattcccatcttccaagccattcctgaacatgccagaatacatctttccatcaggccacttcaaaacccctctgccatgaggcttccctgaaagccagcgtccatcataggtggcatcctttaggcgaggatccttgtagaaagtatatttggcactgcgtgaaatgggtggttcctgtctctgaacactgctaccacttccataaggggggagatcagacatccctctcaaagcctgatctacggcttggcttatagctcgtagccacttttgtcttttcctggggtgtagatgaaatgagagtgaactgctcctcaggtgtagttatctttaagccattcacaccaccagcttcttcagacagtggctctgcccacagcgtggccagagggaaaacatggtgcggtggagaactgggcat

SEQ ID NO: 129430 - DNA, 5948 bp, Homo sapiens
atgatagtcccttggatggcagtggccacctccttggagcaagtggccattgtagtccccagtggcaacaaacacctggaatctggtgtgctggccagtgcgcgtctgcttctgcactggcacaatcttcaaaacctcatccttgagagaggtccccaggaaaaagtcaatgatctcagactccttgatgggcagggagaagtgataggttttcagcaggacttcatcttcgtgtctttgaccaggcagctcagcttggtcatggatggtgaggtctacagctttgggactcttccctggagaagtggaccagtggagatttgtccaagtagccccattctagaaaatgccctggttgggcaatatgatattatttgtggcaacaggaagcttctatagtggagcagtgacagacaatggtgtcgcgtacatgtggggagagaattctgctggccagtgtgcagtagccaaccacgcagtatgtgccggaaccaaatcctgtcagcattgctgattctgaggccagccctttgtttagcagtcacggattttacagttggcgtgtggcagaggagcacactctggcattgtcaataagcagagagatttgggcatggggtaccggttgacagttgggtctcattaccactgccttcccagtggacaaagccgcaaaaggtagaacatcttgctgggcgagtggtgcttcaagttggcctgtggcgctttccaccagcttagcccttgtacaatgcctcctttcccaggatctgaagccagtcccagaacgatgcaaccagtgcagccagctcttgattactatgactgacaaagaaaaccatgtgattatatcagacagtcattgttgcccattaggtgtgacactgacagaatcttaggcagaaaaccatgccagcactgttctcagcccctccactgaaacccttgacaggcaggaaagaagtatttgagaacactcttgtagcaaatgatcagtctgttgctactgaaccgaatgcagtaggtgctcagatcacaagcagcgatgccatgtcctttcaaacaaatgtcatgggaacaactgaaatttccttttgccagaaacataccattatacccctgacacccaagcagtcaatgaatacctacggaaactgtcagatcattcagtaagagaggactcagagcatggtgaaaagccagtgccatctcagcctcttttagaagaagcaattcctaatctccacagcccgcctaccacaagcacctcagccctaaacaagcctggtggtctcttgtgcatctgctgttggtgtgagagtggctgctacttatgaagctggtgccttgtcactgaagaaagttatgaacttttatagtacaaccccttgtgaaactggagctcaggcaggcagtagtgccattggccccgaaggtttgaaagatagcagggaagaacaggttaaacaggaatcaatgcaaggaaagaaaagttcaagtcttgtggatatcagagaagaagaaacagagggaggcagtcgaagactctccctccctggattgttgtcacaagttcagcagtctcagccatctggacttaatgcttctcaagagtggcctgcagaccagcagcatcagcagcatctgggaacttgttacaaacgcagactctcagtttcccccaggctcttaagaaaggctgcacgggtgaaaacgaggacagtggttctgacccccacatacagtggagaagcagatgcgctcctgccttctctgagaacagaagtgtggacctgggggaaagggaaggaagggcagctggggcacggcgatgttctgcctagtgatttcctaaataaaaaccaagagctgttgcaagatttgtcagaagtgaatgacgaaaacactcagttgatggaaatactgaatactttgtttttcttgccaatcagacgacttcataattacgcaaaagttttgctaaagcttgctacttgttttgaagtggcatctccagaatatcagaaactgcaggattccagttcttgttatgagtgtcttgctctccatctcggcaggaaaaggaaggaagcagaatacacactgggcttctggaagaccttccccggaaaaatgacggattccttgaggaagccagagcgtcgactgctgtgtgagagtagtaaccgagccctgtctctgcagcatgctgggaggttttccgtgaattggttcattctctttaatgatgccctggtccatgcccagcttgagaatgagtgtcagccatgtgaagagggccctgcagcagagatggcaaggccctttgggttagctgtgttatggggacaatgtggcagaattggtggcacctacatgggcttaactatttcaaggggttctgcagcagagactgcaaggcccatgtgggttaatgacatgaaggggatatgggcagagtccccgaggtctacatgggctttcataaaagtgcctccgtgttctctgtttcagttctccacgcaccatgttttccctctggccacgctgtgggcagagccactgtctgaagaagctggtggtgtgaatggcttaaagataactacacctgaggagcagttcactctcatttcatctacaccccaggaaaagacaaagtggctacgagctataagccaagccgtagatcaggctttgagagggatgtctgatctccccccttatggaagtggtagcagtgttcagagacaggaaccacccatttcacgcagtgccaaatatactttctacaaggatcctcgcctaaaggatgccacctatgatggacgctggctttcagggaagcctcatggcaggtatggagaatacagaatcccaaacaaggcaatgaacaaagaagaccattatgtgggccattggaaagaaggaaaaatgtgcggtcaaggagtctacagctatgcttctggtgaagtatttgagggctgttttcaagataatatgcgtcatggtcatggtcttctacgaagtgggaaattgacgtcctcttctcctagtatgttcattggccagtgggtaatggataagaaagcaggatatggtgtctttgatgatatcactaggggggaaaagtatatgggaatgtggcaagatgatgtgtgtcaagggaatggtgtggtggttacccagtttggattatactacgagggcaactttcaccttaataaaatgatgggaaatggggttttgctttccgaagatgatactatctatgaaggagaattttcagatgactggactcttagtggaaagggaacactgactatgccaaatggagactacattgaaggttattttagtggagaatggggatctgggataaaaatcactggaacctacttcaaacctagtctatatgagagtgataaagacagacctaaagttttgaagctaggaaacctggcagtgccagctgatgagaagtggaaagcggtgtttgacgaatgttggcgccaactgggctgtgagggcccaggccaaggggaagtttggaaagcatgggacaatattgctgtggccttgaccaccagtcggcgccagcacagagacagtccagaaatactgagtcgttcacagactcagacactagagagtttggaattcattccacagcatgttggtgccttctctgtggagaaatatgatgacatcaggaaatatttaataaaggcctgtgacactcctctgcaccccctgggcaggcttgtggagacactggttgcagtgtatagaatgacatacgtgggcgtaggagccaaccgcaggttattgcaggaggctgtaaaggagattaagtcctatcttaagcgaattttccagctggtgaggttcttatttcctgagctgcctgaagaaggcagcacaattcctctctctgctcctctgccaaccgaaaggaagtctttttgcactggggaagtcagattcccgattctgaatcaccagagccaaggttatgtagtaacgaggttctgggattatttgcttcctgtgctgctacctcggctctacccaccgctgtttatgctttatgctttggataatgatcgcgaggaagacatttactgggaatgtgtccttcgactaaataagcagccagatattgctctcctgggctttcttggggtgcagaggaaattttggccagcaaccttgtcaatccttggagagagtaaaaaggttttgccaaccacgaaagatgcttgttttgcctcagcagtagaatgtctgcagcagatcagcacaacatttaccccatcagacaaacttaaggtcatccagcagacttttgaggagatctctcagagtgtcctggcgtcactccacgaagacttcttgtggtccatggatgacttgtttcctgttttcttatatgtggtgctacgggccaggattaggaatttaggctctgaggtacacctcattgaggatctaatggacccctatcttcagcatggggaacagggtataatggtcaccaccttgaagtctcaatcaagaattctcactctcaagatagcagaaatagataagcttcaactgacaaatttggtacagaagtcatggaaaggaagaagctccggccggggaggatgataccagtcagaccaaagggagcagatccacccagacaaggaaggacatgaaagcttttcttacagccaccaatccacagaatggcctctcccagatcctgaggcttgtgctgcaagagctgagtctgttctacagcaggagatgtgaatggagtgtgtctcttgtacgatctcctccacatcgccgtggcttcaggctctgctaaaggtgagtgcttctttgctcggaagcctttgcttgctgaaggggttatttatgactgcctccaggaatttaaagaaaagaaactagttcctgccacaccacatgcacaggtgttatcctatgaggccttgctcagtgcccatgacacgatagctcagaaagattttgaaccccttctccctccactgccagacaatatccctgagagtgaggaagcaatgaggattgtttgtttagtgaaaaaccaacagcccctgggagccaccatcaagcgccacgagatgacaggggacatcttggtggccaggatcatccacggtgggctggcggagagaagtgggttgctatatgctggagacaaactggtagaagtgaatggagtttcagttgagggactggaccctgaacaagtgatccatattctggctcccagaccttgtctgtcacccatgtcacttgctgacctccctcctctaccccgagaagttctggtcctggctgggaaacttcccgtcccaagcagctccttcctccttcagccacgggaagactgccagggcccccagcccagctccctcatcacctggtttgctccattggaaactgaacctggggtggacagagccatgtctcgaggcacaatcatgttcaaggtggttccagtctctgaccctcctgtgaatagccagcagatggtgtacgtccgtgccatgactgagtactggccccaggaggatcccgacatcccctgcatggacgctggattgcctttccagaagggggacatcctccagattgtggaccagaatgatgccctctggtggcaggcccgaaaaatctcagaccctgctacctgcgctgggcttgtcccttctaaccaccttctgaagagatatggactgagccaggaatctgcatcttcaccaagcgcctcaggtgctcagggaagcaacgggaattctggtggtctcagccgtaccagcctcacacctgcctcaagtcaaccctatgtgagtattgcaactgcccgacaggttcttcctgtttgcaataaagaccatggcattgcagtaaataaagagtctaattga

SEQ ID NO: 129431 - DNA, 408 bp, Homo sapiens
atggagcctggtgacgcggcgcgccctggctcgggtcgggctaccggggcgccgccgccgcggctgctgctgctgccgctgctgctgggttgggggctgcgagtcgcggccgcggcctcggcctcctcctctggggcggcggcggaggacagcagcgccatggaggagctcgctactgagaaggaggcggaggagagccaccggcaagacagcgtgagcctgctcaccttcatcctgctgctcacgctcaccatcctcaccatctggctcttcaagcaccgccgggtgcgctttctgcacgagaccgggctggccatgatctatgggctcgagaaaataaccattggcgtgttagatatcaccggatggccatactgtacaatccaaccctacaacggcttcctttga

SEQ ID NO: 129432 - DNA, 3804 bp, Homo sapiens
tttcgtgtcgcgccctcgagggagccagctgggccatggccgcgaggcaggggtgagaccggcggccacccgggagccctccgcacccgcaccatgcagaagagcgtgcgctacaacgaggggcacgccctgtacctggcctttctggcgcgcaaggagggcaccaagcgcggcttcctgagtaagaagacggccgaggcgagccgctggcacgagaagtggctcgccctctaccagaatgtgctcttctacttcgagggcgagcagagctgccgcccggcgggcatgtacctcctggagggctgcagctgcgaacgaacgcccgcgccacccagggccggcgccgggcagggaggcgtccgagacgcgctggacaagcagtattactttactgttctttttggccatgaaggtcagaagccactggagctgcgctgtgaggaggagcaggatggtaaagagtggatggaggccattcaccaagccagttatgcagacattttgattgagagggaagtattaatgcagaagtacattcatctagttcagatcgtagagacagaaaaaattgcagctaaccaactccgacatcaacttgaagatcaagacacagaaatcgaaaggcttaaatcagagattattgctcttaataaaaccaaagaacgaatgcgaccttaccaaagcaaccaagaagacgaagatccagacatcaagaagattaaaaaggttcagagcttcatgcgaggatggttgtgcagaaggaaatggaagaccatcgtgcaggattacatttgttctcctcatgctgaaagtatgaggaagagaaaccagattgtgttcaccatggtggaggcagagtcagagtacgttcaccagctctacatcctggtcaatggctttctccggcccctgcgtatggccgccagctccaagaagccccccatcagccacgacgacgtcagcagtatttttcttaacagtgaaacaatcatgtttcttcatgaaatatttcatcaaggactaaaggcaaggatagcaaactggcccactttaattttagctgatctgtttgatattttgctccccatgctgaacatttatcaagaatttgtgcgtaatcaccagtacagcctgcaagttctcgccaattgtaagcaaaacagagattttgacaaactcttaaaacagtatgaagccaatccagcctgtgaggggaggatgctggagacattcttgacctatcccatgttccagatccccagatatatcatcacactccatgagctccttgctcacacaccccatgagcatgtggaaaggaaaagcctggagtttgccaaatcaaagctagaggaactatccagagtaatgcacgatgaagtcagcgacactgaaaacataaggaaaaaccttgccatcgaaagaatgatcgtggagggctgtgacatcttgctggacaccagccaaacgttcatccgccaaggttctcttattcaagtaccttccgttgagagggggaaacttagtaaagttcgcctgggttcgttgtctttgaaaaaggaaggagagagacaatgcttcttatttacaaaacactttttaatatgtacaagaagttcaggagggaagcttcatctgctcaagacaggtggggttctgtctctaatagactgcacattgattgaggagccagatgcaagcgatgatgactctaaaggttctgggcaagtgtttgggcacctggattttaaaatagtggtggagcctcctgaccgtgccgccttcactgttgtcttgttagcaccctcacgccaggagaaagctgcctggatgagtgacatcagtcagtgtgtggacaatatacgatgtaatggtttaatgactatagtgtttgaagagaattccaaagtcactgtgccacatatgattaagtctgatgcccgtcttcataaagacgacactgacatttgcttcagtaaaacactcaactcctgcaaagtgccccagatccgttatgccagcgtggagcgcctcttggaacgactgacagacttgcggtttcttagtattgatttcctcaacacctttctgcacacctatcgtattttcactactgccgctgtggtgctggggaaactctccgacatatacaagaggcctttcacctccatccctgtcaggtcattggaattgttttttgctaccagccagaacaacagaggtgaacatttggtggatggcaaatccccacgtctgtgtcgcaaattctcttccccgccaccactggctgtgtccagaacatcttccccagtgagggccagaaagctgtctttgacttctcccttgaactcaaagataggagcattggacctgacaacttccagcagtcccaccaccaccacccagagtcccgctgcgtctccaccaccacacactggtcagataccactggatctcagcagaggcctctcttctccagagcaaagcccgggaacggtagaagagaatgtcgataacccacgcgtggatctgtgtaacaagctaaaacgaagtattcaaaaagcagtcctagagtctgcaccagcggaccgagcaggagtggaaagctcccctgcagcggacaccacagaactttcaccttgcagatccccctcaactcctcggcacctccgctatcgacagcctggaggacagacggcggacaatgcccactgctctgtttcaccggcttctgcttttgcaatagccacagctgcagcaggacatgggagtccaccaggctttaacaacaccgagagaacatgtgataaagagtttattatacggagaacggctaccaatcgagttctgaacgtcctccgtcactgggtctcaaagcacgcacaggatttcgaactcaacaatgaactaaagatgaatgtcctaaatttgctagaagaagttttgcgagacccagaccttcttccccaagaaaggaaagccgccgcgaatatcctcagggccctttcacaagatgaccaagatgacatccacctaaaattagaggatataattcaaatgactgactgcatgaaggccgaatgctttgagtccttgtcggccatggagctggcagaacagatcaccctcctggaccatgtcattttcagaagcattccctacgaggagtttcttgggcaggggtggatgaagctggataaaaacgaaagaactccttacattatgaaaaccagccaacacttcaatgacatgagtaacctggtggcctcccagataatgaactatgctgatgtcagctcccgtgccaacgccatcgagaaatgggtggcagtggcggacatctgccgatgcctgcacaactacaacggcgtgctggagatcacctcggccttaaacagaagtgccatctacaggctgaagaaaacctgggccaaggtctctaagcagacaaaagctctaatggacaaacttcaaaagactgtttcctctgaaggaagatttaaaaatcttagagaaacccttaaaaattgtaaccctcctgcagttccttatcttgggatgtacttgacagacctggcatttattgaagaaggaacaccaaactttactgaggaaggccttgtcaatttctccaaaatgagaatgatatcacacatcatcagagagatacgccagttccagcagacttcctacagaatagatcatcagccaaaggtcgcacagtacttgcttgacaaagaccttatcatagatgaagatacgctatatgagctgtcactcaaaattgaacctcgactccctgct

SEQ ID NO: 129433 - DNA, 1173 bp, Homo sapiens
tcatgatgttcttccctccctcatcctcctgtgatctgaggtcttccctcctcgggtgctgggttgttgctcttcctgcgcctccacgtattctgggtatctcattccagtagcactaacttcatgttttcccaataattccttagtcacacctagatgttttgtcttactaaagtgtatggaccaggaggagatgagggagagagggagctggacagccagttcattgttgagtatatagattcgttcaagagctacaatggtgtggctggaaacagctgaccagtaataatccgaaaaggtatcaacagtggtaaggcagcattgatagccctgagaggggtttgaaggcctgatgtagccaatctggcctttctggcgcgcaaggagggcaccaagcgcggcttcctgagtaagaagacggccgaggcgagccgctggcacgagaagtggttcgccctctaccagaatgtgctcttctacttcgagggcgagcagagctgccgcccgcggcatgtacctcctggagggctgcagcagtggcgggacatctccacgctccttccgatcttcatccagggattctcccatctccatacccctccaccccactgccaagtgatcagtcagaatagtggcccgacttgctttcattacccaaatgctgttattaattttggttctattaaccaggtttgccatttcgtaaaggtttgccccaagtgaattactaaaccgttctaagcctccaaacaccatgtctactttcccacttcctgtgttggttacccaaggggcttcctcagtgtgattcagaaacacttgtttttttctcttgcttttattcagtagttcatcaatttttattattcctttcttcaaaatatgtatgtccaccctttcctcttcattctcacagtctgccttaggggaggtatgaatcatttcatttactgattcagtattattctgatcatcccttgggtctccattcattctcccctcgtttccattgaacgaataccaccatgaggtcagtttagatctttcagcgtaagtgagctgcttagaaaccctcagtggcttcccatctgcctataggataaaattaaaattcaagactcctttctctatagcctgcctccaactgatttctctgtcctctctcttact

SEQ ID NO: 129434 - DNA, 483 bp, Homo sapiens
aatagaacttcgctccgcgctgcaggaattcggcacgagggcaagcgggtgtaatcagcagccatccgttcttgggcatggtggcttccgaccgcggggaccccgagagtctcttgtcggccgagtagcagccaggaaggagagactgggatgggtttttatctgttgctttcttaaatcaagggccgccgggccggagatggatggagggaccggggatttgggaactcgaaaacgagctgagggaagggagcctgtggaaatagactggagtctgggtagtgtcgtttcctagagaatggtctcgaagtaacttctcgccaaaatgaagtttaatccctttgtgacttccgaccgaagcaagaatcgcaaaaggcatttcaatgcaccttcccacattcgaaggaagattatgtcttcccctctttccaaagagctgagacagaagtacaacgtgcgatccatgcccatccgaaaggatga

SEQ ID NO: 129435 - DNA, 1155 bp, Homo sapiens
agtgtggcggaattccgggcaagcgggtgtaatcagcagccatccgttcttgggcatggtggcttccgaccgcggggaccccgagagtctcttgtcggccgagtagcagccaggaaggagagactgggatggttttttatctgttgctttcttaaatcaagggccgccgggccggagatggatggagggaccggggatttgggaactcgaaaacgagctgagggaagggagcctgtggaaatagactggagtctgggtagtgtcgtttcctagagaatggtctcgaagtaacttctcggtaaagtcttcacggaatttccagaccacacttgcccactgggaggcttttaggacccgagacgtgtgcaggcttttccagccaaaatgaagtttaatccctttgtgacttccgaccgaagcaagaatcgcaaaaggcatttcaatgcacccttcacacattcgaaggaagattatgtcttcccctctttccaaagagctgagacagaagtacaacgtgcgatccatgcccatccgaaaggatgatgaagttcaggttgtacgtggacactataaaggtcagcaaattggcaaagtagtccaggtttacaggaagaaatatgttatctacattgaacgggtgcagcgggaaaaggctaatggcacaactgtccacgtagggcattcaccccagcagggtggttatcactaggctaaaactggacaaagaaccgcaaaagaatctctgaccggaaggccaaatctcgccaagtaggaaaggaaaagggcaaatacaaggaagaaaccattgagaagatgcaggaataaagtaatcttatatacagagctttgattaaaacttgaaacaaaaaaaaaggggaagaaacgacagcctcacttctgtatggactgctgatgtggcctgccatcctgttcagcgggcattgtctttggagcagcaggagactaggatgcctctcactcacatcgagttcctggctggccagctgctcagggctcaggctggggcctcccattgacatcctccccctacactccctctctgagcctccgtcgcccctcctgttgggtaagggtgttgagtgtgacttgtgctgaaaacctggttcatatataataaataatggtgatgaaaag

SEQ ID NO: 129436 - DNA, 471 bp, Homo sapiens
  misc_feature (1)...(471): n = a,t,c or g
aggtgtagcccccccccttttgaagccgttcgagagccatccgaaancncaannncnggnncgacgaaaacgtgccgctatggcgaacggtccgcgggcanntttttgtgagaatttccaggcggcgctcgctctgtcgcgggtgggactgcataaaaatccggagaaggaaccatacaagtccaaatacagcgcccgggcgctactggaagaagtcaaggcgctgctcggccctgcgcctgaggacgaggatgagcggcctgaggccgaggacggcccgggtgccggagaccacgccctggggctgcccgtcgcccagcgagcggtgaggctggcagtcatcgagttccacctcggggtgaaccacatcgacacggaggagctgtcggcgggggaggagcacctggtgaaatgcctgcggctgctgcgcaggtaccggctctcgcacgactgcatctctctctgcatcca

SEQ ID NO: 129437 - DNA, 891 bp, Homo sapiens
gagccagtaagtaaagtgtcgcaaagcagaaggaaggcgggagtcccgactgcaaacatttgaggaaagccaggcagtagaggccgctatggcgaacgttccgtgggcagaggtctgcgagaaattccaggcggcgctcgctctgtcgcgggtggaactgcataaaaatccggagaaggaaccatacaagtccaaatacagcgcccgggcgaacatgagaagaggtcaaggcgctgctcggccctgcgccctgaggacgaggatgagcggcctgaggccgaggacggcccgggtgccggttgaccacgccctggggctgccggctgaagtggtggagcccgaggggcccgtcgcccaagcgaaccggttgaggcttggcagtcatccgagttccacctcggggtgaaccacatcgacacggaggagctgtcggcgggggaggagcacctggtgaaatgcctgcggctgctgcgcaggtaccggctctcgcacgactgcatctctctctgcatccaggcgcagacgtggcgatgcattggtgtccgagaccctcctacatcgtcatgcgctttcctctccaccagtccaactcctgttcattctgttaagaaaatccaaactccggggcctctgagaccttctaacagtactttggtggatgacatggagtcatctttccagacttgctttgcctctccgttaagtcaggactatgtcaatggcagcaatcaggaagaaattggaactggtgttgatcggtgtatacacaagtttctggatattgcaagacagaatatttctttcctacaaaaaagattgcaattatctgtccagaaaccagagcaagttatcaatgaggatgtcgatgtctccgaactaagaaatgaataa

SEQ ID NO: 129438 - DNA, 4596 bp, Homo sapiens
aagcgggggactgtgccgtgtggaacgtgtagctgttgagaggtggactctgttaccattgaggatgtttggaggatgagtatgtgtggcagaggcacacataaacaggcagagaccctttgcccctgcctttctcccccaacccaaggctgacctgtgttctcccaggtctgggattctaagtgacctgctctgtgtttggtctctctcaggatgagcacaagcctgggagatggcagtgatggaaatggcctgcccaggtgcccctggctcagcagtggggcagcagaaggaactccccaagccaaaggagaagacgccgccactggggaagaaacagagctccgtctacaagcttgaggccgtggagaagagccctgtgttctgcggaaagtgggagatcctgaatgacgtgattaccaagggcacagccaaggaaggctccgaggcagggccagctgccatctctatcatcgcccaggctgagtgtgagaatagccaagagttcagccccaccttttcagaacgcattttcatcgctgggtccaaacagtacagccagtccgagagtcttgatcagatccccaacaatgtggcccatgctacagagggcaaaatggcccgtgtgtgttggaagggaaagcgtcgcagcaaagcccggaagaaacggaagaagaagagctcaaagtccctggctcatgcaggagtggccttggccaaacccctccccaggacccctgagcaggagagctgcaccatcccagtgcaggaggatgagtctccactcggcgccccatatgttagaaacaccccgcagttcaccaagcctctgaaggaaccaggccttgggcaactctgttttaagcagcttggcgagggcctacggccggctctgcctcgatcagaactccacaaactgatcagccccttgcaatgtctgaaccacgtgtggaaactgcaccacccccaggacggaggccccctgcccctgcccacgcaccccttcccctatagcagactgcctcatcccttcccattccaccctctccagccctggaaacctcaccctctggagtccttcctgggcaaactggcctgtgtagacagccagaaacccttgcctgacccacacctgagcaaactggcctgtgtagacagtccaaagcccctgcctggcccacacctggagcccagctgcctgtctcgtggtgcccatgagaagttttctgtggaggaatacctagtgcatgctctgcaaggcagcgtgagctcaagccaggcccacagcctgaccagcctggccaagacctgggcagcacggggctccagatcccgggagcccagccccaaaactgaggacaacgagggtgtcctgctcactgagaaactcaagccagtggattatgagtaccgagaagaagtccactgggccacgcaccagctccgcctgggcagaggctccttcggagaggtgcacaggatggaggacaagcagactggcttccagtgcgctgtcaaaaaggtgcggctggaagtatttcgggcagaggagctgatggcatgtgcaggattgacctcacccagaattgtccctttgtatggagctgtgagagaagggccttgggtcaacatcttcatggagctgctggaaggtggctccctgggccagctggtcaaggagcagggctgtctcccagaggaccgggccctgtactacctgggccaggccctggagggtctggaatacctccactcacgaaggattctgcatggggacgtcaaagctgacaacgtgctcctgtccagcgatgggagccacgcagccctctgtgactttggccatgctgtgtgtcttcaacctgatggcctgggaaagtccttgctcacaggggactacatccctggcacagagacccacatggctccggaggtggtgctgggcaggagctgcgacgccaaggtggatgtctggagcagctgctgtatgatgctgcacatgctcaacggctgccacccctggactcagttcttccgagggccgctctgcctcaagattgccagcgagcctccgcctgtgagggagatcccaccctcctgcgcccctctcacagcccaggccatccaagaggggctgaggaaagagcccatccaccgcgtgtctgcagcggagctgggagggaaggtgaaccgggcactacagcaagtgggaggtctgaagagcccttggaggggagaatataaagaaccaagacatccaccgccaaatcaagccaattaccaccagaccctccatgcccagccgagagagctttcgccaagggccccagggccccggccagctgaggagacaacaggcagagcccctaagctccagcctcctctcccaccagagcccccagagccaaacaagtctcctcccttgactttgagcaaggaggagtctgggatgtgggaacccttacctctgtcctccctggagccagcccctgccagaaaccccagctcaccagagcggaaagcaaccgtcccggagcaggaactgcagcagctggaaatagaattattcctcaacagcctgtcccagccattttctctggaggagcaggagcaaattctctcgtgcctcagcatcgacagcctctccctgtcggatgacagtgagaagaacccatcaaaggcctctcaaagctcgcgggacaccctgagctcaggcgtacactcctggagcagccaggccgaggctcgaagctccagctggaacatggtgctggcccgggggcggcccaccgacaccccaagctatttcaatggtgtgaaagtccaaatacagtctcttaatggtgaacacctgcacatccgggagttccaccgggtcaaagtgggagacatcgccactggcatcagcagccagatcccagctgcagccttcagcttggtcaccaaagacgggcagcctgttcgctacgacatggaggtgccagactcgggcatcgacctgcagtgcacactggcccctgatggcagcttcgcctggagctggagggtcaagcatggccagctggagaacaggccctaaccctgccctccaccgccggctccacactgccggaaagcagccttcctgctcggtgcacgatgctgccctgaaaacacaggctcagccgttcccaggggattgccagccccccggctcacagtgggaaccagggcctcgcagcagcaaggtgggggcaagcagaatgcctcccaggatttcacacctgagccctgccccaccctgctgaaaaaacatccgccacgtgaagagacagaaggaggatggcaggagttacctggggaaacaaaacagggatctttttctgcccctgctccagtcgagttggcctgacccgcttggatcagtgaccatttgttggcagacaggggagagcagcttccagcctgggtcagaaggggtgggcgagcccttcggcccctcaccctccaggctgctgtgagagtgtcaagtgtgtaagggcccaaactcaggttcagtgcagaaccaggtcagcaggtatgcccgcccgtaggttaagggggccctctaaaccccttgcctggcctcacctggccagctcaccccttttgggtgtaggggaaaagaatgcctgaccctgggaaggctccctggtagaatacaccacacttttcaggttgttgcaacacaggtcctgagttgacctctggttcagccaaggaccaaagaaggtgtgtaagtgaagtggttctcagtccccagacatgtgcccctttgctgctggctaccactcttccccagagcagcaggccccgagccccttcaggcccagcactgccccagactcgctggcactcagttccctcatctgtaaaggtgaagggtgatgcaggatatgcctgacaggaacagtctgtggatggacatgatcagtgctaaggaaagcagcagagagagacgtccggcgccccagccccactatcagtgtccagcgtgctggttccccagagcacagctcagcatcacactgacactcaccctgccctgcccctggccagagggtactgccgacggcactttgcactctgatgacctcaaagcactttcatggctgccctctggcagggcagggcagggcagtgacactgtaggagcatagcaagccaggagatggggtgaagggacacagtcttgagctgtccacatgcatgtgactcctcaaacctcttccagatttctctaagaatagcacccccttccccattgccccagcttagcctcttctcccaggggagctactcaggactcacgtagcattaaatcagctgtgaatcgtcagggggtgtctgctagcctcaacctcctggggcaggggacgccgagactccgtgggagaagctcattcccacatcttgccaagacagcctttgtccagctgtccacattgagtcagactgctcccggggagagagccccggcccccagcacataaagaactgcagccttggtactgcagagtctgggttgtagagaactctttgtaagcaataaagtttggggtgatgacaaatgttaaaaaa

SEQ ID NO: 129439 - DNA, 2760 bp, Homo sapiens
ttagggcctgttctccagctggccatgcttgaccctccagctccaggcgaagctgccatcaggggccagtgtgcactgcaggtcgatgcccgagtctggcacctccatgtcgtagcgaacaggctgcccgtctttggtgaccaagctgaaggctgcagctgggatctggctgctgatgccagtggcgatgtctcccactttgacccggtggaactcccggatgtgcaggtgttcaccattaagagactgtatttggactttcacaccattgaaatagcttggggtgtcggtgggccgcccccgggccagcaccatgttccagctggagcttcgagcctcggcctggctgctccaggagtgtacgcctgagctcagggtgtcccgcgagctttgagaggcctttgatgggttcttctcactgtcatccgacagggagaggctgtcgatgctgaggcacgagagaatttgctcctgctcctccagagaaaatggctgggacaggctgttgaggaataattctatttccagctgctgcagttcctgctccgggacggttgctttccgctctggtgagctggggtttctggcaggggctggctccagggaggacagaggtaagggttcccacatcccagactcctccttgctcaaagtcaagggaggagacttgtttggctctgggggctcttgctgtagtgcccggttcaccttccctcccagctccgctgcagacacgcggtggatgggctctttcctcagcccctcttggatggcctgggctgtgagaggggcgcaggagggtgggatctccctcacaggcggaggctcgctggcaatcttgaggcagagcggccctcggaagaactgagtccaggggtggcagccgttgagcatgtgcagcatcatacagcagctgctccagacatccaccttggcgtcgcagctcctgcccagcaccacctccggagccatgtgggtctctgtgccagggatgtagtcccctgtgagcaaggactttcccaggccatcaggttgaagacacacagcatggccaaagtcacagagggctgcgtggctcccatcgctggacaggagcacgttgtcagctttgacgtccccatgcagaatccttcgtgagtggaggtattccagaccctccagggcctggcccaggtagtacagggcccggtcctctgggagacagccctgctccttgaccagctggcccagggagccaccttccagcagctccatgaagatgttgacccaaggcccttctctcacagctccatacaaagggacaattctgggtgaggtcaatcctgcacatgccatcagctcctctgcccgaaatacttccagccgcacctcagtgtgaatttcatgacgctccaaccatcttccacgttgggacttgcccctcaggccctggctgtattgagacaccgaggccacgtgtgtcctctcacactgcctctcacatacacacatgccaggggcagcagccaggccaggacacgtgacaggctgctcccttccagttccagccgacctcaggtggctagtgatagccaagttctgttcacaagtcagacccacggccaccctgcgactgtcctttttgacagcgcactggaagccagtctgcttgtcctccatcctgtgcacctctccgaaggagcctctgcccaggcggagctggtgcgtggcccagtggacttcttctcggtactcataatccactggcttgagtttctcagtgagcaggacaccctcgttgtcctcagttttggggctgggctcccgggatctggagccccttgctgcccaggtcttggccaggctggtcaggctgtgggcctggcctgagctcacgctgccttgcagagcatgcactaggtattcctccacagaaaacttctcatgggcaccacgagacaggcagctgggctccaggtgtgggccaggcaggggctttggactgtctacacaggccagtttgctcaggtgtgggtcaggcaagggtttctggctgtctacacaggccagtttgcccaggaaggactccagagggtgaggtttccagggctgcactgggatggtgcagctctcctgctcaggggtcctggggaggggtttggccaaggccactcctgcatgagccagggactttgagctcttcttcttccgtttcttccgggctttgctgcgacgctttcccttccaacacacacgggccattttgccctctgtagcatgggccacattgttggggatctgatcaagactctcggactggctgtactgtttggacccagcgatgaaaatgcgttctgaaaaggtggggctgaactcttggctattctcaccctgcagcagcctgccgccccaggactggcccagcaggctcaagagcacggtgctcattcctgggggtggggccacctctaggtggaagatggtgaaggccctgccccgtgcccacaacaaccctaggcccctacactcagcctgggcgatgatagagatggcagctggccctgcctcggagccttccttggctgtgcccttggtaatcacgtcattcaggatctcccactttccgcagaacacagggctcttctccacggcctcaagcttgtagacggagctctgtttcttccccagtggcggcgtcttctccttggctttggggagttccttctgctgccccactgctgagccaggggcacctgggcaggccatttccatcactgccat

SEQ ID NO: 129440 - DNA, 722 bp, Homo sapiens
aatattcctaacagcctgtcccagccattttctctggaggagcaggagcaaattttctcgtgcctcagcatcgacagcctctccctgtcggatgacagtgagaagaacccatcaaaggcctctcaaagctcgcgggacaccctgagctcaggcgtacactcctggagcagccaggccgaggctcgaagctccagctggaacatggtgctggcccgggggcggcccaccgacaccccaagctatttcaatggtgtgaaagtccaaatacagtctcttaatggtgaacacctgcacatccgggagttccaccgggtcaaagtgggagacatcgccactggcatcagcagccagatcccagctgcagccttcagcttggtgaccaaagacgggcagcctgttcgctacgacatggaggtgccagactcgggcatcgacctgcagtgcacactggcccctgatggcagcttcgcctggagctggagggtcaagcatggccagctggagaacaggccctaaccctgccctccaccgccggctccacacttgccggaagcagccttcctgcttcggtgcacgatgcttgcccttgaaacacaggctcagccgttcccaggggatcttgccagcccccggctcagcagtgggaccagggcctcgcagcaacaaggtgggggcaagcagaaaggctccccagaatttacaactgggcccttgccccccct

SEQ ID NO: 129441 - DNA, 1024 bp, Homo sapiens
  misc_feature (1)...(1024): n = a,t,c or g
aagcttggcacgatgctctccccttctggggtctcgggaaacacgcggaggacagtacaggacatgagtcctggtgagggacccgaggagcaggacagagaagacggcccctgaatgcccatttggccccttgctggctggaggtgtgaaaaccagcggtggaggcagccttcggggcctgcatttgagaataagggtgtcactagttccaggcgtctgctgaaagatttggaacagaagatgatggtcactccgaaccagaccgcctgtaatgcagagtcaccagtggccctggaggaggccaagacctctggtgtcccgggggaggccccaaacaacccctgagcgtcatgactctggtggttccctgcccctgacaccgcggatggagagccactcagaggatgaagatcttgctggggctgtcggtggcctgggctggaacagtaggagtccccggacccagagcccagggggctgctcagcggaggctgtgctggcccggaagaaacaccgtcggcggccatcgaagcgcaaaaggcactggcgaccctacctggagctgagctgggctgagaaacaacagcgggatgagaggcagagcnatttaaaggctggactagacgggttctgggtgccttgtgcctccttgttcttgacagcccccaaccctgacccctctctgcagggggttgggcctgagatcccagctgcagccttcagcttggtcaccaaagacgggcagcctgttcgctacgacatggaggtgcccatggatttccatgctgcggcaaagggtcagtggaggttgcagagatgcgacccagacccagacccagaactggagatcggacaggtgccggctttactggagtcagagctatacccagccctcaagcttgaagctgagctggacacggaagccaactcgaacgaggagtctgactttgaagaacccatgcagctgctcagtgccgccaggaaaagagaaagagaatccattattggtgaaaatccattttaa

SEQ ID NO: 129442 - DNA, 407 bp, Homo sapiens
gaagctcccggaattgtggtacagcagtcactaagacgccagtcgtcaaaagtggtgtgcgcctgaggtcactctggggacaactgacaatgacagtcctggagcagactaccaacaccatccgaggggacaagtacctccagtccactccctgctccaaaaaacctacagggaaaagggagaagccaataggcctgcccaaaaacttccaagaatctgagacaaagaaggctatggaatctggccaagcacgagttctcgtggacatgacctgtggaggctgtgctgaagctgtctctcgggtcctcataagcttggaggtgagagttaagtatgacattgacctgcccaacaagaagtctgcattgaatctgagcacagcatggacactctgcttgcaaccctga

SEQ ID NO: 129443 - DNA, 744 bp, Homo sapiens
gcaccgcacatcgttcacgccctcgcctgtccagttgatgaggacaaatttgggcagtccagagttggggtccttcactctgcagaaggcgtacatcaccttcccgctgttgagctcctccaccatctcctccaggccaccctcccctgtgccagccacgcgtatgtcattgctgttgccttcataggtaaagagagcccagtcggtcggggacttctcggtgaccacccgcacgtaggcctcttgcagcgctggcccgccctccgaatccagagaggcgctgctgacaccgccgccacaccgccgccacaccgccgctgccttcagtcattgccgaagcacgaagttctctgtggacatgacctgtggaggctgtgctgaagctgtctctcgggtcctcaataagcttggaggagttaagtatgacattgacctgkcccaacaagaaggtctgcattgaatctgagcacagcatggacactctgcttgcaaccctgaagaaaacaggaaaagactgttttcctaccttkggccttgagtagcaggggcctggtccccacagcccacgaggatggaccaaaggggggmaggatgcttgatcctcccgttggcttccagacagacctgggacttggcagtcatgccgggtgaatggtgttcctgcggagaccctcaagtttgtcctattcctttcctagcttccctgcaataaaatcaagctgcttttgtttggaaaaaaaaaaa

SEQ ID NO: 129444 - DNA, 693 bp, Homo sapiens
atgagtgctcgccccagcagcacatataccaaaattggaatgatacgagaagatgagcacgacccctgtacaagaatgacccacatattcgtgaaccttccatacttaaaaatattttccaaaaagaggataaaggctggccctggtgtggcctcctcatcccctggtggtgcaatcagccgcatggctcaccctaaggctcattacctgggctccctggaggacaacagggaaataaaaagggcctgcaagtcaaagagtgtttccagggtagagcctttggccaccagtgatccggggctccccaaggggaaccgcccagccatcctcacctaccatgatgtgggcctcaacatggcgaacaagaagtctggagaccaccccgagcgcgaagggaccccgcggagtttccgagaagtcgttagcgccttcggccctggctcctcaaaactacaaatcccaaagggcagcgcgccccgatgcggcgtcccagggcgaggggcccgccgggagctgcagtctttccgggcaggaccccgcacccaaggctcacctgtgggaccgcgttgtcagtctcggcgcctgcgctccgcccaggaagaaagcgccaaggcgaggcatggcggtctccgtgcgcaccggagcttctcgtgggacatcaggatgtcgtccaaagaaagaaagttctcctag

SEQ ID NO: 129445 - DNA, 544 bp, Homo sapiens
ccctgggcggtaccgcccgaattgactgctcctgtctgatgcgtccccgggcgcgggaaacgagtttcaatccactttcctgaccccaaccatcctgcccagtctccgcttccccgtcttgtacacccctaactcctgaggctcctccgaatcacgcgagtggaagcggagaagctcaagtggccgccatgtcagaggcttatttccgagtggagtcgggtgcgctggggcctgaggagaactttctttctttggacgacatcctgatgtcccacgagaagctgccggtgcgcacggagaccgccatgcctcgccttgggcatcttcttcctggagcggagcgcaggcgccgagactgacaacgcggtcccacagacttttatcggacgttttcgccgcatcatggactcctcacagaatgcttacaacgaagacacttcagccctgggtagccaggctagacgagatggagaggggcttatttcaaacagggcagaaaaggactggatgagattttcagggtggggagatggggcaggcttct

SEQ ID NO: 129446 - DNA, 648 bp, Homo sapiens
atgagcctcaggaagcttacaatcatggtagaaggcaaagggggacccaacatacctcatgcctgtggatgccgccaaagaagcagcattaaagtctctcttctccctgctgttacatctaagtcagagtctcctaaagaacccgaacagctgaggaagctcttcattggagggttgagctttgaaacaactgatgagagcctaaggagccattttgagcaaaggagaacgctcacggactgtgcggtaatgagagatccaaacacaaagtgctccaagggctttgggttcgtcacatatgccactatggaggagaaataccacactgtgaatggccacagctgtgaagctaggaaagccctgtcaaagcaagaggtggctagtgcttcctctagccaaagaggcgaagtggttctggaaactttggtggtggtcatggaggtggtttcggtggaaatgacaactttggtcatggagaaaacttcaggggtcatagtagctttggtggcagccacggtggtagtggttatggtggcagtggggatgactatagtggatttggtaatgatggaagcaattttggaggtggtggaagctacaatgattttggcaattacagcaatcagtcttcaaattttggacccatga

SEQ ID NO: 129447 - DNA, 4347 bp, Homo sapiens
atgactggaatctgctacacagaagatgaaagatcatataagaaaaatgctcaaccaacggcagcaagtaaaaagcaaaaagaaacacagaaattctgtctaagagtagacgggcaacaaaaagtgaagctctcggtgctccaggagaaaagcgcgcagctcacagtacaacttaagagccagaagttcctgggccaccccacagcgggccggggtcgcagcgagctctgcctggacctccccgatcccccagaggacccagtggcactggagacccggagtgtgggcacctgggttcgagaacgggacttgggcatgcctgatggggaggctgccctcgccgccaaggtcgctgtgctggagacccagctcaagaaggcgctgcaggagctgcaggcagctcaggcccggcaggctgacccccagccccaggcctggccaccgccggacagcccggtccgcgtggatacagtccgggtggtagaagggccacgggaggtggaggtggtggccagcacagccgctggcgcccccgcacagcgggcccagagcctggagccttacggcacagggctgagggccctggcaatgcctggtaggcctgagagcccacctgtgttccgcagccaggaggtggtggagacaatgtgcccagtgcccgctgcagctaccagcaacgtccatatggtgaagaagattagcatcacagagcgaagctgcgatggagcagcagaaatgaaatgggaggaccagaacattggagatcagtgccaaaatgccaagagaaatctaaggatggcattaacatcctctctgggctgtggatttctccaggttgtgctgagactccagaatttacagcaggtgatagtcagctatttcggccagtgcaagtttggatgcctgcaaggtcaatcatgcgagcatcaggaatatggagagaagccatatacacataagcaacgtgggaaagccatcagtcatcagcactccttccagacacatgaaaggccccccaccggaaagaaacccttctattgtaaagaatgtgcaaaaacctttagttctcttggaaacctccgaagacacatggcggcacaccatggagatggaccttataaatgtaagttgtgtgggaaagcctttgtttggcccagtttatttcatttgcacgaaagaacacacactggagagaaaccgtatgaatgtaagcagtgttctaaagcctttcctttttacagttcctatctaagacatgaaagaatccacacgggagagaaagcgtatgaatgtaagcagtgttccaaagcctttcctgattacagtacctatctaagacatgagagaactcacaccggagagaaaccctataaatgtacacaatgtgggaaagccttcagctgttactattacactcgactacatgaaaggactcacacgggagaacaaccctatgcatgtaagcaatgtgggaaaacgttttatcatcacacaagctttcgaagacacatgataaggcacactggagacggaccacataaatgtaagatatgtgggaaaggctttgattgtcctagttcagttcgaaatcatgaaactactcacactggagagaaaccctatgaatgtaagcagtgtgggaaagtgttatctcatagctcgagctttcgaagtcacatgataacacacacaggagatggaccccagaaatgcaagatatgtgggaaagcctttggttgtcccagtttatttcaaagacatgaaaggactcacactggagagaaaccctatcaatgtaaacaatgtggtaaagccttcagtcttgccggttcccttcgaagacatgaagcaactcacactggagtgaaaccctataaatgtcagtgtgggaaagcctttagtgatctctcttcctttcaaaatcatgagacaactcacactggagagaagccatatgagtgtaaggaatgtgggaaagcattcagttgtttcaaatacctttctcaacataaaaggacccacacagtacaaaaaccttatgagtgtaaaacatgtagaaaagccttcagtcatttcagtaacttaaaagtccatgaaaggattcactctggagagaagccatatgaatgtaaggaatgtggaaaagcattctcttggctcacttgccttctacgacatgaaagaattcacactggagagaaaccctatgaatgtctacaatgtggtaaagccttcactcgttcccgtttccttcgaggacatgaaaaaactcacactggagagaagctgtatgaatgtgtctgcaaggtggacaaacagaaccgtgctggctacagccctattatgctcaccgccctggccaccctgaagacccaggacgacatcgagactgtccttcagctcttccggcttggcaacatcaatgccaaagccagccagccatatgtggcccagggggacctgagtggattccaagacattggtggctacacaaaaaggaaactggacttttattccacgctgttggctggcagtccaggacctcagcatccaggaagtcacctttgtcctcagaccaacctggaaaaatctcgcttttctgcccgtggacaccgccgaagaagcatcgttaaagtctctcttcaccctgccgtcatgtctaagtcagagtctcctaaagagcccgaacagctgaggaagctcttcattggagggttgagctttgaaacaactgatgagagcctgaggagccattttgagcaatggggaacgctcacggactgtgtggtaatgagagatccaaacaccaagcgctccaggggctttgggtttgtcacgtatgccactgtggaggaggtggatgcagctatgaatgcaaggccacacaaggtggatggaagagttgtggaaccaaagagagctgtctccagagaagattctcaaagaccaggtgcccacttaactgtgaaaaagatatttgttggtggcattaaagaggacactgaagttcatcacctaagagattattttgaacagtatggaaaaattgaagtgattgaaatcatgactgaccgaggcagtggcaagaaaaggggctttgcctttgtaacctttgacgaccatgactccgtggataagactgtcattcagaaataccatactgtgaatggccacaactgtgaagttaagaaaagccctgtcaaagcaagaagatggctagtgcttcatctcagccaaagaggtcgaagtgggttctggaaactttggtggtggtcgtggaggtggtttcggtgggaatgacaacttcggtcgtggaggaaacttcagtggtcgtggtggctttggtggcagccgtggtggtggtggatatggtggcagtgggggatggctataatggatttggtaatgatggaagcaattttggaggtggtggaagctacaatgattttgggaattacaacaatcagtcttcaaattttggacccatgaaagggaggaaattttggaggcagaagctctggcccctatgggcggtggaggccaatacttttgctaaaccccgaaaaccaaggtggctatggcggttccagcagcagcaagtaactattggcagtggcaggaggttctaattacagccaggaaacaaagcttatcaggagaggagagccagagaagttgacagggaagctacaggttacaacagatttgtgaactcagccaagcacagtggtggcagggcctagcctgctacaaagaagacatgttttaaacaaaaacttatgtgtgttggggcaaaaaactccgaggactgtatttgtgactaattgtataccaggttaatttagtttcctgttcctgtggaaagtgttaagccattcccaccaaagggttttaatgtagattttttttttttgcaccccatgctgttgattgctaaatgtaacagtctgatcgtgacgctgaataaatgtcttttttttaatgtgctgtgtaaagttagtctactcttaagccatcttggtaaatttccccaacagtgtgaagttagaattccttcagggtgatgccaggttctatttggaatttatatacaacctgcttgggtggagaagccattgtcttcggaaaccttggtgtagttgaactgatagttactgttgtgacctgaagttcaccattaaaagggattacccaagcaaaatcatggaatggttataaaagtgattgttggcacatcctatgcaatatatctaaattgaataatggtaccagataaaattatagatgggaatgaagcttgtgtatccattatcatgtgtaatcaataaacgatttaattctcttgaa

SEQ ID NO: 129448 - DNA, 1515 bp, Homo sapiens
atgggccaagtgttccgggtagtcaccggggttggagaacagcctgggcacccagatcagtttccatatattgactcctggctaagtataattcaaaaccaccctaagtggctgcaggcctgctttgagacctactgtaagactctaatggcccagataaaaccaggaaccatagaaagagattgcaaggcatcagtaaaagaaaaggattcacaggaaaagcagaaaaaacccgtcctacaggccccacctgaagagttagaaagtccagccctctatgcaccaatttatccatccctggcaaggcttagacaggaagctgccccagctgcccccagaggttcagattcagaagaaagcacccctcaggcaacaccatgcagagaggagccagagcccttgcctgaaaaggaaacctcaagctcttatagatctaatgcagtccatttcctaattcacaatcctacctgggctgattgcaaacaacttcttcagtcattatttaatacagaagagcaccatagagttatacaagctgccttccagtggctggagaacaatgcacctgcaggtacaggatatatcaggcagtatgcacaacaagcactcccaatagaggctgacacaggctgggaccctaaccaggctcaagggctacaaagcttgcagtggtatcgagaggcactcctaaatggaataaaggctggagggaagaaggccaccaatattggaaaagtctcagaggtctgccagaagccagatgaaagtcccagtgaattttatgagaggctgtgcgaggcttaccagctttacacaccatttgacccagaggctgcgggtaatcagtgtatggttaatgtggcatttgtaagccaggcacaaggagacataaagcgaaagcttcagaagttagaagcaaaggcagtgctaagaggaaagttcatagccctaaacacctacatcaaaaaggctgaaagagcacaaactgacattctaaggtcacacctcaaggaactaaagaaacaagaacaaaccaaatccaaagccagcagaagaaaggatgtaacaaagatcagggcagaactaaatgaaattgaaacaacaacaacaaaaatacaaaagataaatgaaacaaaaagctggttctttgaaaagataaatacaattaatagaccattagcaagattaaccaagaaaagtagagagaaacttcaaataacctcattaagaaaagaaatgggagatactacaacagacaccactgaaatacaaaagatcattcaaggctactatgaacacctttatgcacataaactagaaaacctagaagagatgaataaattcctggaaaaatacaatgctcctagcttaaatcaggaagaattacataccctgaacagaccaataagaaacagtgagattgaggtggtaattaaaaaattaccaacaaaaaaattccaggacaagatggattcagagcagaatcctaccagatattcaaagaagcattggtaa

SEQ ID NO: 129449 - DNA, 1304 bp, Homo sapiens
atgcctgaagattccctgatgagatcacagagaacctcaaatagagagcaacctgagaaaccaagttgtcctgtgggaggcgtcctcagtagcagcaaagatcaggtgtcctgtgagtttccttctccagaaacaatccagggaacagtgcagactccagtgacagcagccagggtggtcagtcactcatcctctcctgtaggtggacctgaaggggaaaggcagggagccatctgtgactctgaaatgaggtcctgtaaacctctaactagagaatctggatgttcagagaacaagcagccctctgtcactgcctcgggcccccaaggcacaacttctgtgacacctcaaccaacccccctcactagcgaaccttcggcatgtcccccaggtccagagaaggtgccgctgccagcacagcgtcagatgtcaaggttcaaagaagccagtacgatgaccaaccaagctgaaagtgaaatcaaggaagttcccagcagggcttggcaagatgcggaggtgcaggcagtggcgagtgtcgagagcagatccgtctccaccagccccagtatcctcactgcatttctgaaggaaagccgtgctcctgagcattttgaacaagagcagctgcgtgtcatttgccacagcactgatcattctgggagcttggatcccactaataaaggagatgcaagggaaaagaagcctgcatctcctcaggtagtaaaagaaaaagagtctactggcactgatacctcggatgccaaaaccctactgctcaatcctaaatcccaagaaagtggaggcacagaatcagctgctaatcctacaccctccccaattaggaagaaccaggagagcaccttagaagaaaacagacagaccaagacagccaccagcctgagcctgccatctgatcccatgggtgactccagcccaggttctggcaagaagaccccatctcgctccgtcaaagccagcccacgcaggcccagccgcgtcagcgagttcctcaaggagcaaaagttaaatgtgacagcagctgctgctcagaagagacgtgtgtcccgagacacatgagtatcctccaaggcactggcctggatgagcagcatcgccttgagaattggggtagtgtggaaaggaagaatgaacaacggccctgggaagccttcccttcctgcagatattgttgggggagtgctggtctccattttgcgtttagaaaaccagacttagatgctggaggggcaccggttgtcttctttgaactcattccccgtaatgagctagaaaagagtacctaa

SEQ ID NO: 129450 - DNA, 459 bp, Homo sapiens
tcaaatgtagcaggtggtttgacgcccctcgtggtgttgttttacatatccatcgcggaagacaataatactattttgatagtccgattcatcccctccacctttccggaactctgaggccgggaggcagcaggcaatttccgtgtgatccccaattcctttgccgtcttctccacactttggcatctctgtgaagtctacctggagatcttctaagggggctgctccataagcttgtatgccgggtggaacggctggaccttgcctcgctttatgctgtcggcaggtaacacaccgctgcctcaccgttttggcaagggctgagaaacgcgagatgtagaaataccggcctaacaacttttccagtgactcctgacctcgataggtggtttcttgcacagccagtacaactgcagctcctagcagctgtggcgcagctactctccatccttcctccat

SEQ ID NO: 129451 - DNA, 245 bp, Homo sapiens; identical to SEQ ID NO: 119932

SEQ ID NO: 129452 - DNA, 429 bp, Homo sapiens
ctttgccgtcttctgtaccaaggcagccaaaaatgcaggcccgttgtctgagccgatccataagggcggtcgaaatctacgaatcagatctcgaagaaggacaggggttacttcacgagttttctcagttcgtgttggataggcctccacccacccagagtaggtacgcccaagaactagtacatacttgttacctccacactttggcatctctctgaagtctacctggagatcttcaaagggggctgctccataagcttgtatgccgggcggaacggctggaccttgcctcgcatcatgctgctgttggcagatctgagctttttttttggacaccttatacccacagtcctccaggtgccggtgtggggcatccgttcccgtggcacacccgactgccgtggggtgtcccagcagaaggtcatcaac

SEQ ID NO: 129453 - DNA, 895 bp, Homo sapiens
ctagatgggtggtttcatgaacagccagtacaactgcagctcctagcatctgtggcacagctactctcccatctggtaaccgaacccatccttcctttatcacctgtcctccctctgcctggagaaagtctttttcttctttagaataagtaggtacaagaccaggtgcttgagggaacaggggggctgtgattgaggcctggaagaggtcagatgctgctttttgagcctctaagtcagtgcaggaattccccaagcccaccaaggttgaagcttgctgatgtcctctctccaccatgtgaccatcctcatctatcccagtataccactgctctctcaggggcatttgtatcccagttttgggtcttaaacgagctgccaatgtaggggtttctctcgaggcttcacctcctctcttgtctactccgggtggcctagggatatgtttgtcttgtggaggcacaaggactgtgggctcaagagtggggagcatctttccctggtaaggggagggcaccactgggatcactggttccatctcctgcaagggatcttctgatgttgggtcaaacagaacttcaggagttgatttccctcggcgggtggagtaggatccttccttggcaatctgtccctttgctactagcactgctgctgcctgccctcttagccactgtggggggtctagcaccagctgtaaccaagtggctatgtatggaaactggtctgagtgtcctgacttaccagttaccttgtgccataccttagaaacaagggacctctccaggtttccttctgatggccaacccacttctaattttgaccaatctatttcaaaataagttctacatttccctggtgtcatagtaaccccatagtctccattaaatccctt

SEQ ID NO: 129454 - DNA, 708 bp, Homo sapiens
tcagaggatccagaactgcagcccgtcctcgctgggttgtcccggtccatgtatctggtcatggtgctgaggaacctgctcatcatcctggctgtcagctctgactcccacctccacacccccatgtacttcttcctctccaacctgtgctgggctgacatcggtttcacctcggccatggttcccaagatgattgtggacatgcagtctcatagcagagtcatcttttatgcgggctgcctgacaccgatgtctttcttggtcctgagattctgatttcccggcacctgtgtgagtatgtggacttttctggcgtgcgccccaagggccggcgccggcccccgcagcgcgacgggtgaaggccaagcaaggttccttgtgtattgaacggaagccatctcggattgaggccagggcgcgaccccaagccgtcgtcacgatgttaattctaccatgagtgtcgggtgatacgcaccgagctagcggccccccgtagtctgagataattcttgtgtttgggatgatcgccttcactgtgtaggcagaagacaaaacaaccccctttaaggtcccgccttcaaaaagatggcattcctttgcttccactaaaggctctttaggtcttaaaaggcctctccttaacataggtccataaacccatttatacccataggttttgcctttatctctgaggattccaggacccat

SEQ ID NO: 129455 - DNA, 780 bp, Homo sapiens; identical to SEQ ID NO: 117666

SEQ ID NO: 129456 - DNA, 930 bp, Homo sapiens
atggggacacaaatgcccctgagagagcagcagtatactgggatagatgaggatggtcaagtgctggagaggcgtgtttttggctaccagtccttcacctgcgtcgatcttctcaactggaaaaacaatacaccgccctatagcgaaaagccacaagccctaattgatttgctccaagctgttatccagacccacgaccccacctgggctgattggcaccagttgctcatgttcctctttaacagcgaagaaaggcggagagtcctccaagcagtaactaagtggctagaggaacacgcaccagctgattatcaaaacctccaagagtatggaaggacccagttgccaggaaccgacccccagttggacccacatgaaagagaggagatgcaaaggctaaaccgagacagggaagctctcttggaaggattaatgaggggagctcaggaagccacaaacgttaacaagctctctgaggtcattcagggaaaagaagaaagtccagcacaattgtatgagagagaattgtgggaggcctatcgtatgtatactccctttgatcccgatagccctgaaaatcagcgcatgattcacatggctttagtcagtcaaagcgcagaagacatgagaagaaaactgcagaaacaggctgggcttgcagggatgaatccaccacaattactagaaatagctagccaggtgtttgtaaacagggatgcagttgatgaccttctgctggaacaccccacggcagtcaggtgtgccaagggaacagttgtcctacactggcacctggaggactgtgggtatcagttgtccaagaagaaagctcagatctgccgacagcagactgggtctctaaaggatggcccccctgttggagggccttggcagcaactgccctgccagtacaagaagcaaataagctga

SEQ ID NO: 129457 - DNA, 1461 bp, Homo sapiens
tcatacagttttatgctgtttgtcaatttctgtggcggggatgaacttatcgtagttctcatagaccagggtttgcatgtcgctgtctagagcccggatctgctgcaccatgtccgtctcactgtccatcagctgggccagagggcactctctaggcagcttgtctaggtaaacttccgggttgaagtgtgccccgttcagatcagtggggtccagggggtcggtccccgcgaggagtctcaccgcctccccttccgagaggccgttgtaaagctttaacatcctgtgtgccttccgccgacgctccgtgagcctccccctcgggcccttctggggagtccccaggtccacaccccgggctaggcccagtgacagctgccgccgccatagctccaactgcagccgacgggggtaactttttatatttttacgttggatacatgaagatacttggcttttgctttcatcacatcgttgaggaaagaggtggttgcttatggtacccctgtttttactgcaacctctctctccttgggggttgaagaagctgctcccatacacgtatagttcccagtctactgatgcccaagcttggtcccggaggtcaggtctgctagagtcaactgaatccaacacttctacacaatcaggctcgacagggctctctgactccggatcttcccactgaaaggcaaacagcttctgcctctcaggggctaatctgataggaaagaaagcgtctttcaggttccagaaggtgaaccagctgtcttcagctggcggcaacaccaataatgtggacgggttaggtactgttggatgtaaagtcagtgtagcttgatggagcaagcgcaaatcctgtaccggccggtagtccttggtccgtggtgtatccttgtttacaaacacctggctagctatttctggtaattgtgatggattcatccctgcaagcccagcctgtttctgcagttttcttctcatgtcttctgcgctttgacggagataggcctcacacaatctctcgtagaattgtgctggactttcttcttctccctgaatgacctcagagagcttgttaacatttgtggccttctgagctcccctcattaatccttccaagagagcttccctgtctcggtttagcctttgcatctcctctctttcatgtgggtccaactgggggtcggttcctggcaactgggtccttccatactcttgggggttttgataatcagctggtgcatgttcctctagccacttagttgctgcttggaggactctccgcctttcttcgctgttaaagaggaacatgagcaactggcgccaatcagcccaggtggggttgtgggtctggataacagcttggagcaaatcagttagggcttgtggcttttcggtatagggcggtgtattgtttttccagttgagaaggtcgacgcaggtgaagtgtccccgcat

SEQ ID NO: 129458 - DNA, 1863 bp, Homo sapiens; identical to SEQ ID NO: 117677

SEQ ID NO: 129459 - DNA, 2118 bp, Homo sapiens
tcagaggatccagaactgcagccggtcctcgctttgctctccctgtccctgtccatgtatctggtcacggtgctgaggaacctgctcagcatcctggctgtcagctctgactcccacctccacacccccatgtacttcttcctctccaacctgtgctgggctgacatcggttacacctcggccacggttcccaagatgattgtggacacgcagtcgcatggcagagtcatctctcatgctggctgcctgacacagatgtctttcttggtcctttttgcatgtatagaagacatgctcctgactgtgatggcctatgactgctttgtagccatctgttgccctctgcactacccagtcatcgtgaatcctcacctctgtgtcttcttcgttttggtgtcctttttccttagcctgttggattcccagtttattcctccggtcacagagggtgttcaccctgtgatatttttcatcatagctttgtgggatgttactcctaaagtcacacggggtgtacacagagtcacacagtgatatgagctgtaatattaggtgagacccataggtggagaaggctttatacttcccacctgatgatgaaaccctcagaatggaggaaacaattttatcgtaagagaaaagtgtccccgagatgggaagaaaaccaaatatggcatcagggaaatacaggattatgttattgttgaaggtgtcacaacatgcaagatgggggagttgagaagggtcacagaagaaattaggaatttccacatccttgaagcaggtcatttgtaaggcaatcaaattgtacagctgggcatctaaaagatcaggagtatgtctgtcttccatgcctccaaaaatggcaaagagagacatctgagtcaggcagcctgcataggagatgactctgctgtgagattggatgtccacagtcatcttggggactgtggtggaggtgaaactgatgtcaggcaaggacaggttggagaggaagaagtacatgggggtgtggaggtgggagtcagggctgatggccaggatgatgagcaggttccccagcgccatgaccaggcacgtggacaggaacagcccagtgaggaccggctgccgttctggatcctctgagctttgaacggcccttcccctctgctgggccatgaccacggagaacaggtccactgtcctccccacacaagaaaaaggatgcaagagatcatgagattcgactgttctgctgcgcagcctccgcagggcgctttgaatgtccctgtttctctggctgtagatgaaaaggttcagcatgggggtgaccacagcgtacatcactgacgccacgacaccattcctggggggtgctgccacagctgaagtcaggtacacgccaatgtctctggtggtcagaagggagtcgtttggtaggaagaacccagaaagtttggctttttgcaattgggggcttgtgggaggaggaaatttaatccttacaaactccatctctgcttgcagaggctcctttgctaagcctggggttatttgaggagggggtggtgtgcagtttatggctcttccaagttccttgttttgcctccgtggcacgctgatcttgacagctcccctgtacctgaacgtttgtgggaacattttagctgcattgctgcctttcatctgtgctctttccataagaagcctcacgtgggaaaagaagggtcgagtctcacctaaggtcattgtactggttattaagccattttctttccgtttcaaacctgcccttttgtactctgctttgtgatgccgaggtggggattctgccgagaggtgcccctggcggccaggctgctgctggccatggccctcatggatgagtggttctacctctgccctgaccacttcttcattgcctcttgatggtccatggcagatgccaggcactgtccctgtggccacttcaggataggacagagtcaaaaaccgctcacttgggctgccctgggaaatgaggtcagctagaccatagaagaggtcttgggacagaattccagggccctccaaccttgagaagaaatagagggccattttgggcagttctgtttggggactttctctagaatacat

SEQ ID NO: 129460 - DNA, 2691 bp, Homo sapiens
atgtccggccagtttgattttttattgtggactcccgaggaggacaactcggacgagagcgacgcggagggcgagcatggggacggcgcggaggaggaggcgccgcccccggtgcccaggcctggccccaagcccgctggactcggccgccggccctgcccctacgaacaggcgcaggggggcgacgggccggaggagcagtggatgagcttttgctgggacatcccacggaagtcgggtgcgccaagggaacggattaccctacgtcgacacctggaggactgtgggtgtaaggtgtccaagaagaaagctcagatctgccgacagcagaaagacccccaagaagaaagtccggcacaattctacgagagactgtgtgaggcctacggtatgtatactccctttgatcccgatagccctgaaaatcagcgcatgattcacatggctttagtccgtcaaagtgcagaagacatgagaagaaaactgcagaaacaggctgggcttgcagggatgaatccatcccaattactagaaagagctagccaggtgtttgtaaacagggatgcagtaagccataaggaaaacagcaaagagaatggagggagagaggatgatatgactcccaatatcgcagggggggtacacaaccctgtgatattgttcctaacatccggagagaaagaagatgatatgactctcaatatcacagggggtgtacacccctcctgtcctattgttctgaataccctttccggaactctgaggccgggaggcggcatgcagtttccgtgtgatccccaataccgttgccgtcttctgtagcaagtcagccacaaacgcaggcccgttatctgagccgatccggaagggcagttccaatctaggaatcagatctcgaagaagcacacgggttacttcacgagctttctcagctcttgttggataggtctccacccacccagagtaggtacgcccaagaactggtaaatacttattccctccacactctggcatctctgtgaagtctacctggagatcttcaaaggcggctgctccataagcttgtatgccgggcggaacggctggaccttgcctcgcatgatgctgtcggcagctgacacaacgctgcctcaccgttttggcaagggctgactccggatcttcccactgaaaggcaaacagcttctggctctcaggggctgatctgataggaaagaaagcgtctttcaggtccaagcaggtgaaccagctgtcctcagctggcagcaaccccaacaatgtggacgggctaggtactgttggatggaaagtcagggtagcttgactaagcaagcgcaaatcctgtcccggcctgtagtccttggtccatagctcttcccttgcttctttggggggaccgctctgattgctgcagctaaccaacaggtcggcgtttcgccgggcctgacgttcattctctttgcgcttttcctcgcggcttactgcgtccccgtttaccaacacctgcttagcacaggcctcacacagtctctggtggaattgtgctggactttcttcttttccctgaatgacctcagagaccttgttaacgtttgtggccttctgagctcccctcttgaatccttccaagagagcttccctgtctcggtttagcctttgcatatcctctctttcatgtgggtccaactggggctgggttcctggtaactgggtccttccatactcttgggggttttgataatcagctggtgcatgttcctctagccacttagttgctgcgtggagccctctccgcctttcgcctttcatctctcctgtgacacccatcctaatacccagcgggtagagtatgacatgactgccaacatagcgatcaatgtacagccacccggtgatattgctcctaatattcacggaagaagcgtacgatattaatcccaatatcgcagggagtgtacacctcttctgtgatattgttccgggtggctgtacattcattgctatgttgggagtcatgtcatactctaccccctggatattaggatcagtgtcacagggtgagtgtacatctactgcgatattaaaactaatatcatgccctccatccctggatattaggagcaatatcacaggtaggtgtacacgccccccagtatcgcagggggtgtacaccccttgtgtgacattgctcctaaagcgcagcgggggagaggaagatattacagccaatatcgcaggggatgtacacccccttgtgacattcttccttctatccctgactttccatccaacagtacctagcccgtccacattgttggggttgctgccagccgaggacagctggttcacctgcttggacctgagagacgctttctttcctatcagattagccccggagagccagaagctgtttgcctgtgctgggctgacatcggtttcaccttggccacggttcccaagatgattgtggacatgcagtcgcatagcagagtcatctctcatgcgggctgtctgacgcagatgtctttcttcatcctttttgcatgtatagaaggcatgctcctgactgtgatggcctatgactgctttgtagccatctgtcgccctctgcactacccagtcatcgtgaatcctcacctctgtgtcttcttcgttttggtgtcctttttccttagcctgttggattcccag

SEQ ID NO: 129461 - DNA, 2886 bp, Homo sapiens
atggcactgcatactaggaacaatatcacagaagaggtgtacactccctgcgatattgggagtaatatcatacgcttcttccgtggatattatactcggatcaatatcactggctgggtgtacacctactgcgatattgaacgtaatatcatgctctctccctccctggacattaggagcaatatcacagctcgtttacgacccaaaacggggatacaaatgcccctgagagagcagcggtatactgggatagatgaggatggtcacgtggtggagaggcgtgtttttgggtaccagcccttcacctgcgtcgaccttctcaactggaaaaccaatacaccgccctataccaaaaagccacaagccctaattgatttgctccaaactgttatccagacccacaaccacacctgggctgattggcacctgttgctcatgttcctctttaacagcgaagaaaggcggagagtcctgcaagcagcaactaagtggctagaggaacatgcaccagctgattagcaaaacccccaagagtatggaaggacccatttaccaggaaccgatccccagttggacccacatgaaacagaggatatgcaaaggctaaaccgagacagggaagctctcttggaaggattaatgaggggagctcagaaggccacaaacgttagcaagctctctgaggtcattcagggaaaagaagaaagtccagcacaattcgacgagagactgtgtgaggcctatcgtatgtatactccctttgatcccgatagccctgaaaatcagcgcatgattcacatggctttagtccgtcaaagcgcagaagacatgagaagaaaactgcagaaacaggctgggcttgcagggatgaatccatcacaattactagaaatagctagccagatgtttgtaaacagggatgcagtaagccctaaggaaaacggcaaagagaatggagatggggtttctaaaggatggcccccctgtttgagggccttggcagcaactgccctgctagtacaagaagcaaataagctgactcttgggcaaaacctgaacataaaggcctcccgtgctgtggtgactttaatgaatactaaaggacatcattggctaacggatgccagactcatcaagtaccaaactttgctctgtgagaatccccgtataaccattgaagtttgtaacaccctacaccccgcctccttgctcccggtatcagagagcactgtcgagcctgattgtgtagaagtgttggattcagttgactctagcagacctgacctccgggaccaagcttgggcatcaggagactggaaactatacgtgtatgggagcagcttcttcaacccccaaggaaagagagaggtgcaggcccttgccaaaacggtgaggcagcggtgtgttacctgccgacagcatgatgcgaggcaaggtccagccgttccacacggcatacgagcttatggagcagccccctttgaaggtctccaggtggacttcaaagagatgccaaagtgtggaggtaacaagtatgtactatttcttgggcgtacctactctgggtgggtggaggcctatccaacacgaactgagaaagctcgtgaagtaacccctgtgcttcttcgggatctgattcctaaatttcgaccgcccttatggatcggctcaaacaacgggcctgcatttttggctgccttggtacagaaaacggcaaagatattaggaaaaaatgtcactggggatgtgaacagccctgcgatattgagagtagtatcatcctctccccccttgtatattgggaacaacatcacagaggatccagaactgcagccagtcctcgctttgctgtccctgtccctgtccatgtatctggtcacggtgctgaggaacttgctgagcatcctggctgtccgctctgagtccccgctccacacaaccatgtacttcttcctctccatcctgtgctgggctgacatcggtttcacctcagccacagttcccaagatgattgtggacatgcagtggtatagcaaagtcatctctcatgcgggctgcctgacacagatgtctttcttggtcctttttgcatgtatagaaggcatgctcctgactgtgatggcctatgactgctttgtaggcatctgtcgccctctgcactacccagtcatcgtgaatcctcatctctgtgtcttctttgttttggtgtcctttttccttagcctgttggattcccagctgcacagttggattgtgttacaattcaccatcatcaagaatgtggaaatctctaattttgtctgtgacccctctcaacttctcaaacttgcctgttctgacagcgtcatcaatagcatcttcatatattttggtagtactatgtttggttttcttcccatttcagggatccttttgtcttactataaaatcgtcccctccattctaaggatttcatcgtcagatgggaagtataaagccttctccacctatggctctcacctagcatttgtttgcttattttatggaacaggcattggcgtgtacctgacttcagctgtggcaccacccctcaggaatggtatggtggcgtcagtgatgtacgctgtggtcacccccatgctgaaccctttcatctacagcctgagaaacagggacattcaaagtgccctgtggagggaagtcctcacttcattttggaattccctgaaaattgactttatggaagcaatgtacagcaggtcctccaacaccactgacgtctcacccacgatagcagggaatgggtccctctatactattccctcagaacaacaaaaagatgatgaaggtgatgatgaggataaagaggatgatgacagacaccaccgcatcatgaacacttactga

SEQ ID NO: 129462 - DNA, 5021 bp, Homo sapiens
  misc_feature (1)...(5021): n = a,t,c or g
atgggactctcagaggatccagaactgcagcccgtcctcgctgggctgtccctgtccatgtatctggtcacggtgctgaggaacctgctcagcatcctggctgtcagctctgactcccacctccacacccccatgtacttcttcctctccaacctgtgctgggctgacatcggtttcacctcggccacggttcccaagataattgtggacatgcagtcgcatagcagagtcatctcttatgtgggctgcctgacacggatgtcttttttggtcctttttgcatgtatagaagacatgcttctgactgtgatggcctatgactgctttgtagccatctgtcgccctctacactacccagtcatcgtgaatgctcacctccgtgtcttcttagttttggtgtcctttttccttagcctgttggattcccagctgcacaggatccttttgtcttactgtaaaattgttccctccattctaaggatttcaacatcagatgggaaatataaagccttctccacctgtggctctcacctggcacttgtttgcttattttatggagcaggcattggcgtgtacctgacttcagctgtgtcaccaccccccaggaatggtgtggtggtgtcagtgatgtacactgtggtcacccccatgctgaaccctttcatctacagcctgagaaacagggacattcaaagcaccctgcggaggctgctcagcagaacagtcgaatctcatgatctgttccatcctttttcttgtgtggggaagcgcaaatccaaccaagaatgtgataccacacatttggatggatgtgataaacaaacaagcattggtgaaactagagggaaggagtacaccctgtgtgacagtaggagtaacctcacccaaggatataaggaacaaatacagaggatgcacacgtgttgtgacattagcagtaacatccatttaggatattacgaatattaccacaatgtgaataccccctgtgatattaggagtaacatccccctacaatattgggaaccatatcacacggtgtacaccccctgtgacattagagggaggcccatgaaccgaggaagcaggtggccatctgtggcagctgtcacagcccagcataaagctaagcacttctacttattatatcattcaaaagctgcctcagcctgcaagggcagtaattccccaaagcaggctccagggcccaaggaaagccctcggcagggaaacattgagtgtcaggcacagggaatcaggccatcgggtcacctggacaccgtaaggctccaagagctgccccctctccaccaggaggaactgacttaccaaggtgacagtctagagactgcttgcccaattaaagccatgatccccaatctcacactccaactacgggaggacattcaaaccaaaggcaaagaagttgaaaactttgaaaaaaatttagaagaatgtataactagaataaccaatacggagaagtgcttaaaggagctgatggagctgaaaaccaaggctcgagaactacgtaaagaatgcagtagcctcaggagccgatgccatcaactggaagaaagggtatcagcaatggaagatgaaatgaatgaaatgaagtgggaagggaagtttagagaaaaaagaataaaaagaaataagcaaagcctccaagaaatatgggactatgtgaaaagaccaaatctacgtctcattggtgtacctgaaagtgacggggagaatggaactaagttggaaaacactctgcaggatatcgtccagaacttccccaatctagcaaggcagaccaatgttcagattcaggaaatacagagaacgccacaaagatactcctcgagaagagcaactccaagacacataattgtcagattcaccaaagttgaaatgaaggaaaaaatgttaagggcagccagagagaaagaaatacaaactaccatcagagaatactacaaacacctctacgcaaataaactagaaaatctagaggaaatggataaattccttgacacatacactctcccaagactaaaccaggaagaagttgaatctctgaatagaccaataacaggctctgaaattgtggcaataatcaatagcttaccaaccaaaaagagtccaggaccagatggattcacagccgaattctaccagaggtacaaggaggaactggtaccattccttctacaactattccaatcaatagaaaaagagggaatcctccctaactcattttatgaggccagcatcatcctgataccaaaggctggcagagacacaaccaaaaaagagaattttagaccaatatccttgatgaacgttgatgcaaaaatcctcaataaaatattggcaaaacgaatccagcagcacatcaaaaagcttatccaccatgatcaattggacctatggcggcggcagctgtcactgggcctagcccaggatgtggacctggggactccccagaagggcaggagcgggaggctcacggagcgtcggcggaaggcacacaggatgctaaagctttacaaaggcctctcggaaggggaggcgttgggactccctgcggggcccgaccccctggaccccactgatctgaacggggcgcacttcgacccggaagtttacctggacaagctgcctagagagtgccctctggcccagctgatcgacagtgagacggacatggtgcagcagatccgggctctagacagcgacatgcaaaccctgacctcccagtgccaagtgtataagtgtgtccagaattggtgggttcttggtctcactgacttcaagaatgaagccgcggaccctcctggagtgaagctgcagaccttctcagtgagtgttacagctcataaaggcagtgtggacccaaacagtgagcagcaacaagatttattgcaaagagcaaaagaacaaagcttccacagtgtggaaggggaccccactgcagcaatcagagctgtccccccaaagaagcaagggaaggggggccctggaaaagaaactcagcttggctgtcagagtttgcagcataaccagtgtgcttattgtaaagaaataggacagtggaagaacaaatgccctcagctcaaaagaaaacaaggtgactcagagcaggaggccccggacaaggaggaaagggccctgctcatcctggtagaagggttgatgagcttttgctgggacaccccacggcagtcgggtgtgccaagggaacggattgccctacgccgacacctggaggactgtgggtataaggtgtccaagaagaaagctcagatctgccgacagcagttgactctagcagacctgacatccgggaccaagcttgggcatcagtacactgggaactatacgtgcatgggagcagcttcatcaacacctaaggagagagaggtgcagggtatgcgtgataacctggacactgttgttgaagccagatcgatgccccagggcacttcagcccagaaagctgaactcattgctttcattcgggccttagaactcagtgaggcccttgccaaaacggtgaggcagcgatgtgtcagctgccgacagcatcatgcgaggcaaggtccagccgttccacccggcatacaagcttatggagcagccccctttgaagatctccaggtagacttcacagagatgccaaagtgtggagatattaggaaaattgtcactggggatgtgaacacccctgcgatattgggagtagtatcatcctctcccccctcgcatattgggaacaatatcacagggtgacgtacatttcccgcgatactgagggcagtattattgtcttccccgccctggtcacgatgctgaggaacctgttcatcatcctggctggcagctctgacccccacttccacacccccatgtacttcttcctctccaacctgtcctgggctgacattggtttcacctcggccacagttcccaagatgattgtggacatgcagtcgcatagcagagtcatctcttatgcgggctgcctgacacagatgtctttctttgtcctttttgcatgtatagaagacatgctcctgactctgatggcctatgaccgatttgtggccatctgtcgccctctgcattacccagtcatcgtgaatcctcacctctgtgtcttcttcgttttggtgtcctttttcctcagcctgttggattcccagctgcacagttggattgtgttacaattcaccttcttcaagaatgtggaaatctccaattttgtctgtgacccatctcaacttctcaaccttgcctgttctgacagtgtcatcaatagcatattcatatatttagatagtattatgtttggttttcttcccatttcagggatccttttgtcttacgctaacaatgtcccctccattctaagaatttcatcatcagataggaagtctaaagccttctccacctgtggctctcacctggcagttgtttgcttattttatggaacaggcattggcgtgtacctgacttcagctggtgtcaccaccccccaggaatggtgtgatggcgtcagtgatgtacgctgtggtcacccccatgctgaaccttttcatctacagcctgagaaacagggacatacaaagtgccctgcggaggctgctcagcagaacagtcgaatctcatgatctgttatctcaagatctgctccatcctttttcttgtgtgggtgagaaaggtcaaccacattaaatctctacatctgcaaatcctgcctgttagtcacattatttttgtgggcttgatgggcttttattcctttccgcatttcctttgtgaatattgctttcttcgttatgcctttaactgggaatggggtgaggattctggggatcccttgtttagcagaaacctcatgactgaatcctttatacctaggcggcctcaatagtttatgagcaataaccctgtcatccaggtggagtcccatccttcttttcatatcnnnnnggnttcccgacngttatcaggtctcattncccccg

SEQ ID NO: 129463 - DNA, 3195 bp, Homo sapiens
atggaggaaggatggattcggttaccagatgggagactagctgtgccacagctgctaggagctgcagttgtactggctgtgcaagaaaccacccatcgagatcaggagtcactggaaaagttgttaggctggtatttctacatctcacttctgtcagcccttgccaaaacgatttcgaccgccttacggatcggctcagacaacgggcctgtgtttttggctgccttggtacagaagacagcaaaggtgtccaagacacagagagccacggaatctcacaggtgtctgagaattcctcctcctgggactctcagaggatccagaactgcagccggccctcgctttgctgtccctgtccctgtccatgtatctggtcacggagctgaggaaccttttcagcatcctggctgtcagctctgactgccccctccacacccccatgtacttcttcctctccaacctgtgctggcctgacatcggtttcacctcggccatggttcccaagatgattgtggacacgcagtcgcatagcagagtcatctctcatgcgggctgcctgacacagatgtctttcctgctccttgctgcatgtatagaaggcatgctcctgactgtgatggcctatgactgctttgtagccatctgtcgccctctgcactacccagtcatcgtgaatcctcacctctgtgtcttcttcgttttggtgccctttttccttaccctgttggattcccagctgcacagttggattgtgttacaattaacccttatcaagaatgtggaaatctctaatttggtctgcgacccctctcaacttttcaaacttgcctgttctgacaggggcattcactaaccatattcatatatttccataaggatccagaactgcagccggtcgtcgctgggctgttcctgtccatgtgcctggtcacggtgctggggaacctgctcatcatcctggccgtcagccctgactcccacctccccacccccatgtacttcttcctctccaacctgtccttgcctgacatcggtttcacctccaccacggtccccaagatgagcgtggacatccagtctcacagcagagtcatctcctatgcaggctgcctgactcaaatgtctctctttgccatttttggaggcatggaaaaaagacatgctcctgagatattaagatccaaatggcaggggggcgaggcgccccccgcgattcggggagtaataccacccgcctctccccccgcatatattaagatccaaatggcagggaggcgaggcgccccccgcgatgcggggaattatattcggatcaatatcaccggctgtgtgtacacctactgcgatattgaacgtagtatcatgctctctccctccctggagattaggagcaatatcacagctcgtttacgacccaaaacggggacacaaatgcccctgagagtgcagcgttatactgggatagacgaggatggtcacgtggtggagaggcgtgtttttggtgaagaaaggcggagagtcctccaagcaggaactaagtggctagaggaacatgcactagctgattatcaaaacccccaagaatatggaaggacccagttgccaggaaccgacccccagttggacccacatgaaagagaggagatgcaaaggctaaaccgagacagggaagctctcttggaaggattaatgaggggagctcagaaggccacaaacgttaacaagctctctgaggtcattcagggaaaagaagaaagtccagcacaattctacgagagactgtgtgaggcctatcgtatgtatactccctttgatcccgatagccctgaaaatcagcacatgattcacatggctttagtccgtcaaagcgcagaagacatgagaagaaaactgcagaaacaggctgggcttgcagggatgaatccatcacaattactagaaatagctagccaggtgttcataaacagggatgcagtaagccctaaggaaaatggcaaagagaatggaggatggcccccctgtttgagggccttggcagcaactgccctgctagtacaagaagcaaataagctgactcttgggcaaaacctgaacataaaggcctcccgtgctgtggtgactttaatgaatactaaaggacatcattggctaacggatgccagactcaccaagtaccaaactttgctctgtgaaaatccccgtataaccactgaagtttgtaacaccctacaccctgccaccttgctcccggtatcagagagccctgtcgagcctgattgtgtagaagtgttggactcagttgactctagcagacctgacctccgggaccaggcttgggcatcagtagactgggaactatacgtggatgggagcagcttcttcaacccccaaggagagagaggtgcagggtatgcagtggtaaccctggacactgttgttgaagccagatcgttgccccaggccacttcagcccagaaagctgaactcgttgctttcattcgggccttagaactcagtgaggttgagactgtcaacatttacactgattctcgaggacaccagcgagcttccaccttgctgggtttggggaattcccgcgctgactcagaggctcgaaaagcagcatctgcccccttctgggcatcagtgctccctcaagcacctgatcttggacctacttcttctaaagaagaaaaggaccttctccagatttcgaccgccttacggatcggctcagacaacgggcctgtgtttttggctgccttggtacagaagacagcaaagatattaggaaaaaatgtcactggggatgtgaacagccctgcgatattgagagtagtatcatcccctccccccttgcatattgggaaacaacatcacagcaaaaaggaatgtagtaggagtcagggtgataataaggagaaggtcagcaacgaacatgtgagcaatagaatctatgtcatcatgaagttcacgggaaggttctatgactggacgtgtacgaaccttctgtcatggaaccagagattggagaccgtgggaacacatccaaatccacatctccgtgacaaggtggtgctgatttccagtggtcctccctggtgggggaatcacgtagctctgactctggagcgtgttgttgtgtttctctttcagtacgagcttgtctgtggccctgcagttcctcccttatga

SEQ ID NO: 129464 - DNA, 1911 bp, Homo sapiens
atgcaagccatcagtgcattcggcgagggaagggtaaagagccacttttattgggaaaaagagatttacataagctgcttagaaacagagttcattggttcccgaggtcgaagccagagttgtcgtcagtgctttggtggagacgccagtgctgggcgaatgttcttccgagagcgccttatctgcgttgctgcagtcctgcagaatgtcgagtggatcatgggaacaatatccctgggggattatattctgatcaatatcaccggctgggtgtacacctactgcgatattgaacgtaatatcatgctctctccctccctggacattagaagcaataacacagctcgtttacgacccaaaacggggacacaaatgcccctgagagagcagcggtatactgggatagataaggatggtcacttggtggagaggcgtgcttttggctaccagcccatcacctgcgtcaaccttctcaactggaaaaacaatacacagaactataccgaaaagccacaagccctaattgattttctccaagctgttatccagacccacaaccccaccttggctgattggcaccagttgctcatgttcctctttaacagcgaagaaaggcggagagtcctccaagcagtaactaagtggctagaagaacatgcaccagctgattatcaaaacccccaagagtatggaaggacccaggaatcagtagactgggaactatacgtggatgggagtagcttcttcaacccccaaggagagagaggtgcagggtatgcagtgataaccctggacactgttgatgaagacagatcattgccccaggccacgtcagcccagaaagctgaactcattgctttcattcgggccttagaactcagtgagggtgagactgtcaacatttacactgattctcggggacaccagcaagcttccaccttggtgggcttggggaattcccgcgctgactcagaggctcgaaaagcagcatctgcccccttcggggcatcagtgctccctcaagcacctgatcttggacctacttcttctaaagaagaaaaggactttctccagcctcagaaggtccaggcgagaagctggcttctggctgcatctgccccagtgtcctctgaggcattcggatggggcgatgactataaaaaccacgtgaaatgcataagtgaagatcagaagtatggtggcaaaggctatgaaggtaaaacccacaaaggcgacatcaaacagcaggcgtggattcagaattggatgaagaacagtttaaaagttcataatgaatccattctggaccaggtgtggaatatcttttctgaagcttccaacagcccacttagttgctgcttggaggactctccgcctttcttcgctgttaaagaggaacacgagcaactggtgccaatcagccaaggcaaaaggtgtccaaactctacagacccacagaatctaacaacagatgtctcaatattcctcgtcctagaactctcagaggatccagaacggccagctggtccttgctggactgttcctgtccatagtgactggtcatggtgatggggaacctgctcatcatctctggccgtcagccctgactcccacctccacacccacatgtacttcttcctcatccaacctgtccttgcctgacatcggtttcacctccaccacggtccccaagatgattgtggacatccagtctcacagcagagtcatctcctatgcaggctgcctgactcagatgtctctctttgccatttttggaggcatggaagagagacatgctcctgagtgtgatggcctatgactggtttgtagccatctgtcacccgctatatcattcaccatcatgaacccgtgtttctgtgcctttctagttttgttgggtttcatcagagg

SEQ ID NO: 129465 - DNA, 1089 bp, Homo sapiens
ctcaacttcagtgtacatacctaaaaaatgaacaacctgatcccatcatgtggactccggagggacaatcagctgtacaacaaataaaggaaattctgactaatgccccagccttagggcacccgaactacaaattgcctttctcccttttcatacacgaagttggaggtactgcatccggagtactgacccagaaacatggtgatcatcagagacctataggctattatagccaacagctggaccctgtggctcaagggctgcctccctatgtgagagcaatagcagccacggcccttccgtataagtctgttgaagaaataattataggttccccccttaacatttttgtgccacattctcttaaaaccccctcatgactgtgttttgatgactgacttctcacccccaggacagacctacaagagatgccactggataatgctgagatagaatggtatacagatggatcttatttaagaggagaggtattccaatggtatgatcacttagctttaatctttgtaccacagacaggtattgaagatgttatatggcatatagaggccttacccaattacatccaaaaagtctgtgaacgcaggaacccttataaccaaatcctttctctccagtgtgcacagcatgaaatttttctggtgtcttggaaacttgtctgcaaacagcttgaaggggatgatgacatgttagtaggcactactgcttctaatctcctattagagtctgaacagagcaccagcaatctgaatgagaaaattaaccatttagaatatgaagaccaatataaagataataattttggagaaggaaatgatggtggaatattagaagacaaacttattagtaataaatgggtgggcctgatagtcctgattcagtgaatcctgttgaaccagccaactatgactgatcaaacaacacttgttccaaatgaggaagaagcatttgcattggaacctattgatataactgttaaagaaacaaacgccaagaggaagaggaagctaattgttgacagtgtcaaaaacttggatagcaagacaattagagcccagcttaatgattatt

SEQ ID NO: 129466 - DNA, 809 bp, Homo sapiens
cttttaaggatgacgacatgttagtaagcactactacttctaacctcctattagagtctgaacagagcaccagcaatctgaatgagaaaattaaccatttagaatatgaagatcaatataaggttgataattttggagaaggaaatgatggtggaatattagatgacaaacttattagtaataatgatggcggtatctttgatgatccccctgccctctctgaggcaggggtgatgttgccagagcagcctgcacatgacgatatggatgaggatgataatgtatcaatgggtgggcctgatagtcctgattcagtggatcccgttgaaccaatgccaaccatgactgatcaaacaacacttgttccaaatgaggaagaagcatttgcattggagcctattgatataactgttaaagaaacaaaagccaagaggaagaggaagctaattgttgacagtgtcaaagagttggatagcaagacaattagagcccaccttagtgattattcagatattggtactactttggatctggcaccgcccaccaagaaattgatgatgtggaaagagacaggaggagtacaaaaactgttttctttacctgctcagcctttgtggaataacagactactgaagctctttacacgctgtcttacaccgcttgtaccacaagaccttataaaaaggaggaaaggaggagaggcagataatttggatgagttcctcaaagaatttgaacatccagaggttcctagagaggaccagcaacagtagcatcagcagcgtgatgttatcgatgagcccattatt

SEQ ID NO: 129467 - DNA, 596 bp, Homo sapiens
atggtgaacagaagccacttcagaggggtcggtgagccttgccaccagcagaacagccatgggcatctgaactcaataacagaaacatccaacagcccaacactgagagctgctcccttacagcccacaagggacccaagtgacatggcagtgtttgagattgatgaactcccagagggcgctgtgaagcctccagcaaacaagtatcctatcttcttttttggcacccatgaaactgcatttctaggtcccaaagacctttttccatataaggagtacaaagacaagtttggcaagctcaaacaaacggaaaggatttaacgaaggattgtgggaaatagaaaataacgccaggagtaaagtttactggctaccaggcaattcagcaacagagctcttcagaaactgagggagaaggtggaaatactgcagatgcaagcagtgaggaagaaggtgatagagtagaagaagatggaaaaggcaaaagaaagaatgaaaaagcaggctcaaaacggaaaaagtcatatacttcaaaggttactaagaaacttctcattgttattaatgttatatgcatatccattaaacatttttag

SEQ ID NO: 129468 - DNA, 870 bp, Homo sapiens
cggccgctccgacgaggggaatcggcgaggcggcggctgaggcaaggggtgggcggggggcgcatcaggcccggcaaatcacggcccggcagcgggggggcggtctcccggcatgcttcgcggcgaccaaggactaccaggaaggggagcggctgggatggcgcgtccgcggtcccgcgagatacaaagcgggcgacctggtcttcggccaagatgaagggctacccgcactggccggcccggattgatgaactcccagaggcgtctgtgaagcctccaacaaacaaagtatcctatcttctttttttggcaccccatgaaaccggcatttctaggtccccaatgacctttttccatattaggagtacagaggcaagtttgggaaagtcaaacaaccgaaaaggatttaacgaaggattgtggggaaatagaaaataacccagggagtaaaggtttactggctaccaggcaaattcagcaacagagctccttcagaactgagggagaaggtggaaatactgcagatgcaagcagtgaggaagaaggtgatagagtagaaagagatgggaaagggcaaaagaaagaatgaaaaagcaggctcaaaacggaaaaagtcatatacttcaaagaaatcctctaaacagtccccggaaatctccaggagatgaagattgacaaagactgcaaagaagaggaaaacaaaagcagctctgagggtggagatgccgggcaacgacacaagaaacacaacttcagacttgcagaaaaccagtgaagggacctaactaccataatgaatgctgcatattaagagaaaccacaagaaggttatatgtttggttgtctaatattcttggatttgatatgaac

SEQ ID NO: 129469 - DNA, 1275 bp, Homo sapiens
atgtggagtggggcaggccctggactggctgtgtggcctcaacttgtcactgttctttctctgagcctcagtagactcaactgcaagtggggcttgtcattcttggcctgcttgcttcttggagatatggcggatgccgccatgcagcactacggggtgaacggctactcactgcacgccatgaactcactcagcgccatgtacaacctgcaccagcaggcagcccagcaggcccagcatgcccccgactaccggccttcagtgcatgcgcttacattggctgagcgcctggctgacatcatcttggaggcccgttatggttcccagcaccgcaaacaacgtcgcagccgcacagcgttcacggctcagcagctcgaggccctggaaaagaccttccagaagactcactacccagatgtggtgatgcgtgagaggctggccatgtgcaccaacctgcctgaggcccgggtgcaggtgtggttcaagaaccgccgggccaagttccggaagaagcagcgtagcctgcagaaggaacagctccagaagcagaaggaggctgagggctcccatggggaaggcaaggccgaggcccccactccagatacccagctggacactgagcagcccccacgtctgcctggcagcgacccccctgctgagcttcacctgagtctgtctgagcagtcagccagtgagtcagcccccgaggatcagccggaccgtgaggaggaccccagggcaggggctgaggaccccaaagctgagaagagccctggggctgacagcaaggggctgggctgcaagaggggcagccccaaggcagattccccaggcagcctgaccatcactcctgtggccccagggggtggcctcctgggcccctcccactcctattcctcgtccccgctgagcctcttccgtctgcaggagcaattccgccagcacatggcggccaccaacaacctggtgcactactcgtccttcgaagtagggggtccggcccctgctgctgcagcggcggctgctgctgtgccctacctgggcgtcaacatggccccgctgggctcactgcactgccagtcctactaccagtccctgtcagcagccgctgctgcccaccagggtgtgtgggggtctcctctgctgcctgcacccccagcaggcctggctcctgcatcagctaccctgaacagtaaaaccacaagcatcgagaacctgcggctccgggccaagcagcacgcggcctccctgggactcgatacgctgcccaactga

SEQ ID NO: 129470 - DNA, 1155 bp, Homo sapiens
atggttggagatggccgggcgtggtggctcacgcctgtaatcccagcactttgggaggctgagatgggtattggtgtccccattatgctggcatatgtttatggggttgtgcccatttctctttgtcgtggaggtggctgtggagttagcacagccaacggaaaaggagtgaaaattgaatttgatgaagatgatggtccaatcacagtggcagatgcctggagagccctcaagaatcccagcattggggaaagcagcattgaaggcctgactagtgtattgagcactagtggaagccctacagatggacttagtgttatgcaaggtccttacagcgaaacggccagctttgcagccctctcagggggcacgctgagtggcggcattctctccagtggcaagggaaaatatagcaggttagaagttcaagccgatgtccaaaaggaaattttccccaaagacacagccagtcttggtgcaattagtgacaacgcaagcactcgtgctatggccggttccataatcagttcctacaacccacaggacagagaatgcaacaatatggaaatccaagtggacattgaagccaaaccaagccactatcagctggtgagtggaagcagcacggaggactcgctccatgttcatgctcagatggcagagaatgaagaagaaggtagtggtggcggaggcagtgaagaggatcccccctgcagacaccaaagctgtgaacagaaagactgcctggccagcaaaccttgggacatcagcctggcccagcctgaaagcatccgcagtgacctagagagttctgatgcacagtcagacgatgtgccagacatcacctcagatgagtgtggctccccccgctcccatactgcagcctgcccctcgacccccagagcccaaggtatctcgggggagctttgtgccttgatggatcaagttcatcatatgcagcactcaaaatggcagcatccttcggacctcaccacgcgaaagccagaattgaaagcaccttttgagatcgaccagtccaacgccttcattcgacaaagaaggaaacgaaggcacaaggaggaagacataaaaaccacgaggccgagtgcctacagctccctcagtcgcctcctgaggccagtggacctgagctga

SEQ ID NO: 129471 - DNA, 762 bp, Homo sapiens
  misc_feature (1)...(762): n = a,t,c or g
ctggtaagaaattgtgaatttctcagaatttccctgggcaaaaacctgtgaccagagaatctgtgaaattaaaattacataaatctctaccccttggaaaaaaaaaaaaaaaaattcccaaaaagatgcagttacaagtgtgcttctcagaacaggagcattcattcccacttcatactctggcttctccaccttctggcttcaaagacaagtttgtccttcggctagggccagaaaaggttcatatgggcaacttgggctcggtgcacctttgggctcttgggggtcgaagggccaggcttcaagtatgggagcgcggggagccacactcatctaaggtgatgtctggcacatcgtctgactgtgcatcagaactctctaggtcactgcggatgctttcaggctgggccaggctgatgtcccaaggtttgctggccaggcagtctttctgttcacagctttggtgtctgcaggggggatccttttcactgcctccgccaccaactaccttcttcttcattctctgccatctgagcatgaacatggagcgagtcctccgtgctgcttccactcaccagctgatagtggcttggtttggcttcaatgtccacttggatttccatattgttgcattctctgtggagacaaaatccactttgctgantcatgcatggatcatgctaaacctgtcctgtgggttgtaggaactgattatggaaccggccatagcacgagtgcttgcgttgtcactaattgcaccaa

SEQ ID NO: 129472 - DNA, 2423 bp, Homo sapiens
atgggctccgagaaggactccgagtcgccgcgctccacatcgctacatgcggccgcacccgaccctaagtgccgcagcggcggccggcgccggcgcctcaccttgcacagcgtcttctctgcctcggcccgcggccgccgcgcccgggccaagccgcaggccgagccgccgcccccggctgcgcagccgccgcccgccccggcccctgccgcggcccagggcccgccgcccgaggcgctgcccgccgagccggccgccgaggccgaggcggaggccgcggcggcggcggcggagcctgggttcgacgatgaggaggcggcggagggcggtggcccgggcgcggaggaggtggagtgtccgctgtgcctggtgcggctgccgcctgagcgggccccgcgcctcctcagctgtccgcaccgctcgtgccgggactgcctccgccactacctgcgcctggagataagcgagagcagggtgcccatcagctgccccgagtgcagcgagcgactcaacccgcacgacatccgcttgctgctcgccgacccgccgcttatgcacaagtacgaggagttcatgctgcgccgctacctagcctcggaccccgactgccgctggtgcccggccccggactgcggttatgctgttattgcctatggctgtgccagctgcccgaagctaacttgtgagagggaaggttgccagactgagttctgctaccactgcaagcagatatggcatccaaatcagacatgcgatatggcccgtcaacagagggcccagactttacgagttcggaccaaacacacttcaggtctcagttatgggcaagaatctggaccagcagatgacatcaagccatgcccacgatgcagtgcatacattatcaagatgaatgatggaagctgtaatcacatgacctgtgcagtgtgtggctgtgaattctgttggctttgtatgaaagagatctcagacttgcattacctcagcccctctggctgtacattctggggcaagaagccatggagccgtaagaagaaaattctttggcagctgggcacgttgattggtgctccagtggggatttctctcattgctggcattgccattcctgccatggtcattggcatttcctgtttatgttggaaggaacattcacagcaggtatgatgggaaggaaaacctccaaacacaagaggaatttggctatcactggaggagtgactttgtcggtcattgcatccccagttattgctgcagttagtgttgggtattggtgtcccccattatgctggcatatgtttatggggttgtgcccatttctctttgtcgtggaggcggctgtgggagttagcacagccaacggaaaaggagtgaaaattgaattttgatgaaggatgatggtccaatcacagtgggcagatgcctggggagagcccttcaagaatccccagcattggggggaaagcagcatttgaagggcctgactagtgtatttgagcactagtggaagccctacagatggacttagtgttatgcaaggtccttacagcgaaacggccagctttgcagccctctcagggggcacgctgagtggcggcattctctccagtggcaagggaaaatatagcaggttagaagttcaagccgatgtccaaaaggaaattttccccaaagacacagccagtcttgttgcaattagtgacaacgcaagcactcgtgctatggccggttccataatcagttcctacaacccacaggacagagaatgcaacaatatggaaatccaagtggacattgaagccaaaccaagccactatcagctggtgagtggaagcagcacggaggactcgctccatgttcatgctcagatggcagagaatgaagaagaaggtagtggtggcggaggcagtgaagaggatcccccctgcagacaccaaagctgtgaacagaaagactgcctggccagcaaaccttgggacatcagcctggcccagcctgaaagcatccgcagtgacctagagagttctgatgcacagtcagacgatgtgccagacatcacctcagatgagtgtggctccccccgctcccatactgcagcctgcccctcgacccccagagcccaagacggcggacttacaggggaggcgccacctgaagacgttccagggccccataagaccctatcttccggaggggaacggatcgaccaccggtgtgtgcccacaaaaaattcaactcctaagtcctcagtttctagtcccgggaagaaagccagaattgaaagcacctttgagatcgaccagtccaacgccttcattcgacaaagaaggaaacgaaggcacaaggaggaagacataaaaaccacgaggccgagtgcctacagctccctcagtcgcctcctgaggccagtggacctgagctga

SEQ ID NO: 129473 - DNA, 540 bp, Homo sapiens
gccccgcaattcccgggtcgacttcatctaccagtactggaagctgaagaggaaagccaatgccaaccagccgctgctgacccccaagaccgacgaggtggacaacctggcccagcaggagcaggacgtcctctaccgccgcctgaagctcttcacccatctgcggcaggacctagagagggttagaaatctgtgctacatggtgacaaggcgcgagagaacgaaacacgccatctgcaaactccaggagcagatattccacctgcagatgaaacttattgaacaggatctgtgtcgagagcggtctgggaggagagcaaagggcaggaagagtgactcgaagaggaagggctgcgagggctccaagggcaccactgagaagaaagaaaaagtgaaggcggtgcctgactcagtcctggggcagctgggcctgtccacctcattccccatcgatggcaccttcttcaacagctggctggcacagtcggtgcagatcacagcagagaacatggccatgagcgagtggccactgaacaatgg

SEQ ID NO: 129474 - DNA, 691 bp, Homo sapiens
tcacggacgactccaggcaaagcccccaaggagacctggggccaggatgcaggcagtggcaaggggggtcaagggccacctaccaggaagccaccacgtcggacatcttctcacttgccgtccagccctgcagccggggactgtcccatcctagccacccctgaaagccccccgccactggcccctgagaccccggacgaggcagcctcagtagctgctgactcagatgtccaagtgccctggccctgcagcaagccctaagcctttgggccggctccggccaccccgcgagagcaaggtaacccggagattgccgggttgccaggcctgatgctggggatggggaccacctttcagctgtggctgagaggcccaaggtcagcctgcattttgacactgagactgatggcttacttctctgatggggagatgagcgactcagatgtagaggccgaggacggtggggtgcagcggggtccccgggaggcaggggcaaaggagggtggtccgcatgggcgtactggcctcctaactcacccccttccctgtcccaggccctgccctggtccccccacaaggcctcagcccagtcacaactgccatttccagtctctgctgagtgtcccagaccctcgaggctgccactccgtcgtggttttatttttaatatagagagagttttgaattctaa

SEQ ID NO: 129475 - DNA, 2990 bp, Homo sapiens
atgctcctggtcatgtattgggcccctgccccgccccctgtgcacatgtcccagttcctcactactggtcctaagtgcctagaactgagtctggaccatgggagggactcacaggagatcacagcatctggccttttgtggctacaacatgctgcctgtggcctggctcagtggaaccaaaaaccacatcctccatttctaactttattgcaggcagaggagccctttgagagagccaggtcatgcgacatctacatccgcatcaagatgctccaaactgcccagcagcaccaagtcgggctggccccgacagaacgaaaagaagccctccgaggaagtcagagtccccagaagtcagccagtgggcagaggcctgggtctctggaccgggagctgctgatgctgatcaaaatcagcaagtgcttaagagtacctagtgggcctagctcagtgctggggacagaaagcacaggccctgtccctggggagcttgtcctttgtcagcaggatgcaggtgctacacaggaaggtgtctgttatgggagggagttgatgatctgtagatgtgactccttcccgagactcatggagccctggggggtgaagggaaccccagaggttttccggacagacttgatcacagccatgaagatcccggactcataccagctcagcccggatgactactacatcctggcagacccatggcgacaggaatgggagaaaggtgtgcaggtgcctgccggggcagaggccatcccagagcccgtggtgaggatcctcccaccactggaaggcccccctgcccaggcatccccgagcagcaccatgcttggtgagggctcccagcctgattggccagggggcagccgctatgacttggacgagattgatgcctactggctggagctcatcaactcggagcttaaggagatggagaggccggagctggacgagctgacattagagcgtgtgctggaggagctggagaccctgtgccaccagaatatggccagggccattgagacgcaggaggggctgggcatcgagtacgacgaggatgttgtctgcgacgtgtgtcgctctcctgagggcgaggatggcaacgagatggtcttctgtgacaagtgcaacgtctgtgtgcatcaggcatgctacgggatcctcaaggtgcccacgggcagctggctgtgccggacgtgtgccctgggtgtccagccaaagtgcctgctctgccccaagcgaggaggagccttgaagcccactagaagtgggaccaagtgggtgcatgtcagctgtgccctatggattcctgaggtcagcatcggctgcccagagaagatggagcccatcaccaagatctcgcatatcccagccagccgctgggctctgtccggccagcctcggcaaggaatgcacaggccccggcatccagtggtccatgccttcctgcggtcacagcgttccatgtcacatgcgccttttgaccacggcctggaaatgcggcttatattagcagccaacgatgaggccaagttcaagtcattctgccaggagcacagcgactgggggcccacgtaatgagcccacatctgagcgggcggaacccagccaggctggcgaggacctggaaaaggtgaccctgcgcaagcagcggctgtatcagctatgaggaggacttctacgagctggtggagccggctgaggtggatgagcggctgcaccttgctgaggcactggtcgacttcatctaccagtactggaagctgttgaggaaagccaatgccaaccagccgctgctgacccccaagaccgacgaggtggacaacctgggccaacaggagcaggacgtcctctaccgccgcctgaagctcttcacccatctgcggcaggacctagagaggggctcccccaacccattagtgcccttgcctcacccaagcccagtcaccacctccagctgctcccaggttagaaatctgtgctacatggtgacaaggcgcgagagaacgaaacacgccatctgcaaactccaggagcagatattccacctgcagatgaaacttattgaacaggatctgtgtcgagagcggtctgggaggagagcaaagggcaagaagagtgactcgaagaggaagggctgcgagggctccaagggcagcactgagaagaaagagaaagtgaaggcggggcctgactcagtcctggggcagctggcaggcctgtccacctcattccccatcgatggcaccttcttcaacagctggctggcacagtcggtgcagatcacagcagagaacatggccatgagcgagtggccactgaacaatgggcaccgcgaggaccctgctccagggctgctgtcagaggaactgctgcaggacgaggagacactgctcagcttcatgcgggacccctcgctgcgacctggtgaccctgctaggaaggcccgaggccgcacccgcctgcctgccaagaagaaaccaccaccaccaccaccgcaggacgggcctggttcacggacgactccagacaaagcccccaagaagacctggggccaggatgcaggcagtggcaaggggggtcaagggccacctaccaggaagccaccacgtcggacatcttctcacttgccgtccagccctgcagccggggactgtcccatcctagccacccctgaaagccccccgccactggcccctgagaccccggacgaggcagcctcagtagctgctgactcagatgtccaagtgcctggccctgcagcaagccctaagcctttgggccggctccggccaccccgcgagagcaagctccagcagctcagctgtgaatgggaagagctcagcgtcctcaactgtggaatcagcatgggatgctggcaggaaatcagccctggggctgagggggtatctgggtggccagcccacctggccatgaacaccattgtggcggctgactcatctgtcaccaggacactctccacgtga

SEQ ID NO: 129476 - DNA, 404 bp, Homo sapiens
  misc_feature (1)...(404): n = a,t,c or g
cnnnnnnnnnnccttaattcctggataccaatacctgcaggaaaggcagcccaagaaatagcaggagatgttgttggggtttcaccacttccaccatcaaaagtctccgcagcctcaaaaccaccaaaatcatcatcatccattcttcaagtggcgcaattttagcaatctgatgaaaatgttttataaaatgtatttctccaaaaattaaaactaagcaggtcatccacgtatagcacctgctcccctctctcgctatccgcaaccgccgctgcgccgctcacccacaatgcccggtgagccacccccagcacacagacccctacgcgcacacccgaggcacggccccaggcccttgaggaaagaccgcggcccagccacacaggttggggtagcccccgcac

SEQ ID NO: 129477 - DNA, 422 bp, Homo sapiens
ttctctggtgatgaaataatggcatcagaagagaggcagccaatggaagaagagtggtcacggtccagtacaatttcagaaaaagatggtgaaagatggcttccagatactgcaggaaaggcagcccaaggaatagcaggagatgttgtttgggtttcaccacttccaccatcaaaagtctccgcagcctcaaaaccaccaaaatcatcatcatccattcttcaagtggcacctgctcccctctctcgctctccgctgccgccgctgcgccgctcacccacgctgcccggtgagccacccccagcacacagacccctacgcgtacacccgaggcacggccccaggcccttgaggggagaccgcggcccagccacacaggttggggtagcccacgcaccacccggcttcgaacacctacgaaa

SEQ ID NO: 129478 - DNA, 703 bp, Homo sapiens
cgaagctgtatgttagatacattggctccaggatcctcagaatcatccacaagggcaattgttccattacttttttcatcagttaaacccaatggaaaaagtgagatatccagatgagtgtgtgttgattgctgaatctgtgcttttggaatagtttgactcacaatgctatttgctgcatgtgtattctctggtgatgaaataatggcatcagaagagaggcagccaatggaagaagagtggtcacggtccagtacaatctcaggagaagatggtgaaagatggactccagatactgcaggaaaggcagcccaaggaatagcaggagatgttgtttgggtttcaccacttccaccatcaaaagtctccgcagcctcaaaaccaccaaaatcatcatcatccattcttcaagtggcacaattttagcaatctgatgaaaatgttttataaaatgtatttctccaaaaattaaaactaagcaggtcatccacgtatagcacctcataatgaatcttcattcacaagtaaagtattagatgcatgagacagaatactttcatcagaattaatcctggaacttggaatgaggtctcctttctctgagtcacataaaggagggttagaagcctgctcccctctctcgctctccgctgccgccgctgcgccgctcacccacgctgcccggtgaattccacgacactgc

SEQ ID NO: 129479 - DNA, 627 bp, Homo sapiens
tcacgtgttcgtgggcgtagactttcgaaaacactcgattctgggacgtgcagataccggtacccaccggcgagcgcaggaacgagtgggcactcccacccccgggagctggctccgttcccgcaggaggttggtcacgccccctgactcctggtcgctgcgacagccaagggcgaggccgcagcaggcgggctgctcccctctctcgctctccgctgccgccgctgcgccgctcacccacgctgcccggtgagccacccccagcacacagacccctacgcgtacacccgaggcacggccccaggccctctcatctttgcctgtctgaactctcaagcaccggatgcaagtagactgagagcctccgccaaccagtaagatgactttggtcaaagaattctgctctagagttacttttgttcttgtcttcaactccagatcacagcaattcatacgtgccatctctgttgcagagttttcttgcaaagcctttcttaaaagctttctgtcaaatagcttgtcaggtctggagtctaagaagttcaagattaagacaccagcagattggatgtctagtggggccctgctttctgggtcatagattgtgccttctagctgtgtcctcat

SEQ ID NO: 129480 - DNA, 420 bp, Homo sapiens
agggctgtttccaaactgcagcgcaggcacagtgacgtgaaagtctacaaggagttctgtgacttttatgcgaaattcaacatggccaacgccctggccagcgccacttgcgagcgctgcaagggcggctttgcgcccgctgagaagatcgtgaacagtaatggggagctgtaccatgagcagtgtttcgtgtgcgctcagtgcttccagcagttcccagaaggactcttctatgagtttgaaggaagaaagtactgtgaacatgactttcagatgctctttgccccttgctgtcatcagtgtggtgaattcatcattggccgagttatcaaagccatgaataacagctggcatccggagtgcttccgctgtgacctctgccaggaagttctggcagatatcgggtttgtcaagaatgct

SEQ ID NO: 129481 - DNA, 2661 bp, Homo sapiens
atgatcatcaacaccatcatcaccaccaccaccaccatcaccattatcttcatcatcaccatcatgtcatcatcaccaatcaccatcaccaatatcatcaccatcatccaacatcatcaccaccacaatgaccagcggccatctctgggcaaatgcaggggcctctacattcgagtccggaaggtccctggggagcgggccacagcaaacagcaggtgcccaataaatgcccagggcattgaaagctgctggaatggagtgatggctttgtggctgggccccaacagcacctgcagtcggctcccagaactcacagacagcgaggactgccagccagcagactccccaggggatgaggaccccaagccctggtgggacccaccccatgaggcccccctcacaggctacttccacccatatggtgctgcctttgtgccacgccatgccggaaacttcaaggacaggagagaggtgccccaccaggacaccagcttctgctcagcaggtcagttctggattctgccttctgcttgcaagacaggaagagtggccttgactctgaccttgctgattggtgcttatcaaacgctaacagaagctgatgttaagggactgacagcagcccgggcagcgagtccaggggcgaagtggaggacacagttcccctgcccagcaggcacctgcagctcccaggcaggcaacggccagctcgaggactgtctgccctaccccccggggccttccgccccagtggggtccctgagccggagctctgccaacggtgaattcatcattggccgagttatcaaagccatgaataacagctggcatccggagtgcttccgctgtgacctctgccaggaagttctggcagatatcgggtttgtcaagaatgctgggagacacctgtgtcgcccctgtcataatcgtgagaaagccagaggccttgggaaatacatctgccagaaatgccatgctatcatcgatgagcagcctctgatattcaagaacgacccctaccatccagaccatttcaactgcgccaactgcggtattaagctgggtgtctttctcacagacaggaaggatctgactgccgatgcacaggagctgaaaggggagctatactgcctgccatgccatgataaaatgggggtccccatctgtggcgcttgccgacggcccatcgaagggcgtgtggtgaacgccatgggcaagcagtggcatgtggagcattttgtttgtgccaagtgtgagaaaccctttcttggacatcgccattatgagaggaaaggcctggcgtattgtgaaactcactataaccagctatttggtgatgtttgcttccactgcaatcgtgttatagaaggtgatgatgagggggatggatttgcccaccgctactcaccttatgactcttgtgaggttgatcagtctcccctggaaggccaacagctgaagtccatcagaaagggtcctctggcccagagccagcccctgcccacccctgtcatgctgcacccagggtgcaagacccagatcagagaagcgcccggaagtgctgccttggagtcggtgagaaggcggccacggccaggcctggtgcctgaagaggagtcggagtcggcggctgtagaggctgtgcgccacatacatctgcagaacttctcacgctctctgcttgagaccctcaatgggcagaagctgggtgggcacttctgcgacgtgactgtgtgcattcatgaagcttcgctgcgtgcgcaccgctgcgggctggcaatcggctcgccctccttccaagacaagctgctgctcggcccctctgagatccgtgtgccttcggtggtgcctgtgcagacggtgcgacagctagtcgagctcctgtacagcggttcgctcgttgtggcacagagtgaagccccgcaggtactcatggctgcgtcggtgcttcgcatagacagttatcgacgaatgcacgcagattatcgcacgcgctcctctgcacccgcgagcacctctgcacccgcgcccctgcccacccctgtgcccccgccactcgcacctgagcagctgcgtcaccgcctgcgccacctgctggctgcgcacccccggggcaccccggtgccgcgcacagcgctgcctgcgcccccgacacctgccaaagccgaggggcttggtgcctacccctcactgtccgcggcccctgacgaccgaggtgacaacgatgacgaggaaactgacgatgagaccgatggcgaggacggcgaaggtggcggcccgggagagagccaagcacctccttccttcccagactgtgctgccggcttcctcactgctgctgctgacagcgcgtgcgaggagttccatgcacccactggcctctctgactacagtgcaccatccgtgccagcccctgcgcccccacccgccttctaccccacactccagcccgaggcagcccccggcactcagctgcgggaggccccggctccctctgctgctcccaccacggccccctcaggcaccactgctcgcactcctggtgccgagccacttgcctatgcgtgcggccactgttgcaagacgttcagctcaagtaaaaacgacaccaagcacatgttcatccactcgggggagaagccgcaccagtgcgccgtgtga

SEQ ID NO: 129482 - DNA, 1751 bp, Homo sapiens
atggccagggttgtggaagcccaggtccaggcagggttcaaatgctcctcagagtgtgccagcagcctcagcctcagggagagcttgtcaggggatgttttacaaggtctccaaaagcctcttatgccctccagagtgaaaagcacggcattgttgatgaagtcttgtggcaaatatgcaaggcacgtgtggatatttctttctcttggaggcttacaaggtagccccggtctcctgagctctcaagcacccacgatggccttctcaggccgagcgcgcccctgcattatcccagagaacgaagaaatcccccgagcagcccttaacactgtccacgaggccaatgggaccgaggacgagagggctgtttccaaactgcagcgcaggcacagtgacgtgaaagtctacaaggagttctgtgacttttatgcgaaattgagccatcctgagctggcccatacaattttattgactggactttgggtgggagttttccagggtggtagggctccgaggggctcgcagcgcagcatgtttagggagacaggagactgccttgtcgtgttgtttgatcttcgatctaagaagtggctgacggtctgcaacctgctgttctttgcgtgttacagcaacatggccaacgccctggccagcgccacttgcgagcgctgcaagggcgtgctttgcgcccgctgagaagatcgtgaacagtaatggggagctgtaccatgagcagtgtttcgtgtgcgctcagtgcttccagcagttcccagaaggactcttctatgagtttgaaggaagaaagtactgtgaacatgactttcagatgctctttgccccttgctgtcatcagtgtggtgaattcatcattggccgagttatcaaagccatgaataacagctggcatccggagtgcttccgctgtgacctctgccaggaagttctggcagatatcgggtttgtcaagaatgctgggagacacctgtgtcgcccctgtcataatcgtgagaaagccagaggccttgggaaatacatctgccagaaatgccatgctatcatcgatgagcagcctctgatattcaagaacgacccctaccatccagaccatttcaactgcgccaactgcgggaaggagctgactgccgatgcacgggagctgaaaggggagctatactgcctcccatgccatgataaaatgggggtccccatctgtggtgcttgccgacggcccatcgaagggcgcgtggtgaacgctatgggcaagcagtggcatgtggagcattttgtttgtgccaagtgtgagaaaccctttcttggacatcgccattatgagaggaaaggcctggcatattgtgaaactcactataaccagctatttggtgatgtttgcttccactgcaatcgtgttatagaaggtgatgtggtctctgctcttaataaggcctggtgcgtgaactgctttgcctgttctacctgcaacactaaattaacactcaagaataagtttgtggagtttgacatgaagccagtctgtaagaagtgctatgagaaatttccattggagctgaagaaaagacttaagaaactagctgagaccttaggaaggaaataagttcctttattttttcttttctatgcaagataagagattaccaacattacttgtcttgatctacccatatttaaagctatatctcaaagcagttgagagaagaggacctatatgaatggttttatgtcatttttttaaa

SEQ ID NO: 129483 - DNA, 713 bp, Homo sapiens
tttcgtgccacggcgcccggcgggcaagacaccctcagatcacagggttctgccaagagcccggccgagtgcagctcgagcgccgacgtcgccaaggatacacagtgctgacgcagtacacaagtgcgtcacagtggtcctccgccggctacgtcagtggctttcaggcgctttcctgttggaattggcgactgctgcggggctgagcgctggtttcacgcgtctcgggagccaggttggcggtgcgatgaggcgcagcaaagcctacggggagcggtaccccgcctcggtgcagggctccgccccgtcgcctcgacagaagtcaatgaaaggattctattttgcaaagctgtattatgaagctaaagaatatgatcttgctaaaaaatacatatgtacttacattaatgtgcaagagagggatcccaaagctcacagatttctgggtcttctttatgaattggaagaaaacacagagaaagccgttgaatgttacaggcgttcagtggaattaaacccaacacaaaaagatcttgtgttgaagattgcagaattgctttgtaaaaatgatgttactgatggaagagcaaaatactgggtcgaaagagcagcaaaacttttcccaggaagtcctgcaatttataaactaaaggaacagcttttagattgtgaaggtgaagatggatggaataaactttttgacttgaaaaaaa

SEQ ID NO: 129484 - DNA, 1867 bp, Homo sapiens
tcacatatccgactgagtcacctcctgggactcctcagtgccaagtttccaagctggattccttaattcttcttctggggattgcatcaatgcatcaccctcatcaaagcagcttacatgaattaaagccttactgagtcttgcactgctctgcgtgatatgccaggaaccacatttaatacttgcagaagactgcaccgaaacttcatgagaccttcccctcgctgtgcacggacaagtgtctgactctggagcccaggctgttgcttcccggtctggtgatgaatcctccatagtttgtttgaaggaagaaagtactgtgaacatgactttcagatgctctttgccccttgctgtcatcagtgtggtaagttttactgctaaatgtcaagtaaaaagtgaattcatcattggccgagttatcaaagccatgaataacagctggcatccggagtgttccgctgtgacctctgccaggaagttctggcagatattgcatttgtcaagaatgctggtagacaggaaggatctgactgccgatgcacaggagctgaaaggggagctatactgcctgccatgccatgataaaatgggggtccccatctgtggcgcttgccgacggcccatcgaagggcgtgtggtgaacgccatgggcaagcagtggcatgtggagagagaacagtacatggacccgggaatcctcagtgccttaatagatcctaagtacttacttattctttcccatagaggcttacacatgaagtcaatgaaaggattctattttgcaaagctgtattatgaagctaaagaatatgatcttgctaaaaaatacatatgtacttacattaatgtgcaagagagggatcccaaagctcacagatttctgggtcttctttatgaattggaagagaacacagagaaagccgttgaatgttacaggcgttcagtggaattaaacccaacacaaaaagatcttgtgttgaagattgcagaattgctttgtaaaaatgatgttactgatggaagagcaaaatactgggtcgaaagagcagcaaaacttttcccaggaagtcctgcaatttataaactaaagaacatgggtgggtcagaggccaaatggttcctaagccagatgatgagggggtgcaggtcaggggacgttcaggaaggccagatgcagggtggaggctcaacagaaggtcttctgttggaggaagtgcctggaggctcaggcctcagggcagctgactcgctaggcttcaggacctcgcaggtgtccagggggccacaggggtctgcatgcgagggcaggggcagcaggtgggtgcatcacaatggggcgttggtgacagtgatgtcctgcggtcccccacctgccacctccgttcagggaggtttccttgggcccaccccagccggagagaccttgcccgaagtcaccctcttccatgctatgtgccctgtagctgcagtttactgttcattttgccgcacttcttactttgacggtgccatttgtgggattcctgtttgcccatcttcctttcgtgccgaggaggcaagtgcatcccttcaccaggccaccactgcaggtgaccttgtgggcctgatccacggtgaaaggtggggagagggtactggagcagggcagagggactggatgagcctgcatggggaggaaggcgtgactgagggaagacagctcagccccccaggggaaacctgagttcagtgttggggaatgtgaggacacaatggcggggcaggatggccctggcaccagcggtgctggggaccgtagggggccatgctttgtgagaggcaaacttggctccaaggatgtgaggctgggagcacgaatggcgaa

SEQ ID NO: 129485 - DNA, 444 bp, Homo sapiens
  misc_feature (1)...(444): n = a,t,c or g
gaggagagnnccnnntttgannccactgaggacntctgaaccagcgtggtggatttcgaagacacaacccccgccagggacgagaagaaggtgggggccatggctgcctagcaggacagcgacagtgatggggaggccctgggcggcaacccgatggtggcagggttccaggacgatgtggacctcgaagaccagccacgtgggagtcccccgctgcctgcaggccccgtccccagtcaagacatcactctttcgagtgaggaggaagcagaagtggcagctcccacaaaaggccctgccccagctccccagcagtgctcagagccagagaccaagtggtcctccataccagcttcgaagccacggagggggacagctcccacgaggaccgcagcacccccctggccaggcggtgtctctgttcgcacaggtccggagaagcgg

SEQ ID NO: 129486 - DNA, 2446 bp, Homo sapiens
atggaaacatccctgatggtccaggtttgtggtgggagagattgcaacgctctgcttcctggaaatctgtgttcacagccaacacaggtgctgcccttggaagtggatggggatgatggccccggtgggctgcccctcaatgccgccccaccatcctctgtgccccctgtaccaccctcagaggccctgcccccacctgcgtgcccctcagcccccgccccatggcgtagcatcatctctaggctgtttgggacgtcacctgccgccgaggcagcccatccacctccaggtggggccctggatttcggagcgctccgcacttcttcctgcttgtcccagtcccacgggcacatcccgggtgggcctggcttggggttgggtgcagtgagggttccggtgccgagtgaagaggacccagcgtcactgttcacagagccagtcccggccgcagaggccccagcaacagtccagagtgtggaggacttcgttgccaatgaccgcctggaccgcagcttcctggaagacatgacccccgccagggacgagaagaaggtgggggccaaggctgcccagcaggacagcgacacggggagggcctccagggcgcccgagcagcagattccacatggaggccattggcgaggccactccaggtcatatgagcggttcaggccaccagatatggtctctgcagggccaggtcccagtgatggggaggccctgggcggcaacccgattgtggcagggttccaggacgacgtggacctcgaagaccagccacgtgggagtcccccgccgcccgcgggccccgtccccagtcaagacatcactctttcaagtgaggaggaagcagaagtggcggatcccccaaaaggccctgccccagctccccagcagtgctcagagccagagaccaagtggtcctccataccagcttcgaagccacagagggggacagctcccatgacggccgcagcatccccctggccaggtggtgcctctgttcacacaggtctggagaagtgcagcagcaccaggccccctgctgagattgagccagggaagggtgagcaggcctcctcgtccgagagtgaccccgaggggcccatcgctgcacaaatgctgtccttcgtcatggatgaccccgactttgagagcgaggcatcagacacacagtgcagggcagtaagacgagtcctcccagcgcagagggccgaaaatgcctatggctccgctttccagccaggagccctgaaaccggagtgcagacccaccctaaagggcgggccaggccccgtgcctagcaaggctggcaagaagaccgaggcaacatccccacgacccacaggaggagccagtcccctagcccacggagccacggtgggtgcggcctggggacttggcatggcaagctggcccatagggtcgtccctagcacctaccagagcgcgtacgagggagccgaggctgcagcgccgggtgggcagcgagctccctggagacccatgcagcgggtcaggtgccagctgccgccaggtctgtgcgcggggccgggccaccagcgtgcggcttcccgctctggagagtttatggcccctgtcctcggacggctccgcagccgccagggagggactggagggaccgcggctgagacaggctgctgcaccaggcggccctggaccgccgctgccgcccctaagccgccctcccagcccagcgcgccgaatgcggggtggggctgctgtcgcaggccgtggagccgcagccccgctggagggcagggtccggctgggcgtcgggttcctggcagagacagcggtgagagcaggagcaggtgcactggcagctgcagacgcgccgccaggctcccggacaccgcgggcgcgccccctggtggcagccggctccggagccgcgggagggcggtgcccagtccccagccggcggcagcgcgaagcgccttccccgcttgggggagcgggcgtggacctgcagctggagtgccttactagtgaaaaagctggggttggagctgccacggggggagtactggaagccctagccagagcaatcagacaaaagaaggaaatagaggaaatccaaatcggtaaagaggaagtcaaactgtcactggttgctgacgatatgatgtttctccttgagaaccctacggactcctctagaaagctcctagaactgatgaaagaattcagcaaagtttccagatacaagattaatggacacaaatcagtagctcttctatatatcaacagccaccaagcagagaatcacatcaagaactcaaccccttttacaatagctgcgacaaacaacaacaacaaaaaaacaaaacttaggaatatacctagcaaaggaatcaaaggacagctacaatgaaaattacaaaaccgctactgaaagaaatcatagatggagccaagcacgg

SEQ ID NO: 129487 - DNA, 966 bp, Homo sapiens
atggatgtgctagacaaagggatgattcatgatctgggcaggacagaacagaaaggtgcaagacttcgtcatacaactcagaatgctcactccagtggtcccgccgccccaagccgccccgaacgcccagcagccccgagccgcggcctccgccccgcagactcgagtacgcgcgccccgctggcctctgggaaatgtagtcgtcctggggacagaggacgcggctgggccttcgcgacccgcgtcggagccgcccgcctcgcctgcccttcctggcccagccctcgagctcggactcccaaaccacccaaaacaaacccccggcctcgtctggcacccagacgctctcatccgaaggactcctgcactatttttaagcttaactcctttctgaagaatatcaaatttaacaacagtgttggtgaccaggtgaatttggattacaaattaatttctgggacagaatatgatattctcaacttttggaacttcaggattcttgctaaaactgggtgcagcaaggatggacacagaaatccaaggtccaggcctactcaagaagagggctcagggaagcctaagaaaagtctggtcaaggagaggtctggggctcaggaggacttaccagttccaccggaggagaagcttgaactcagtgggacttcaatgggcccctgctgtttctccaagaccagctacggcatcccgcacataatatacatcttgtcctacaaggggacaactgcaactgctggtcatagatggcctgctgcatacccagctcccctgaattgctctgtgcctcctccagagaccaccatgccagtgtctgacctgggaagtccccttcactgggcctctcgcatagccacaccaccatccatgtggctatgctgtctcttggcagctgctttaagagttcttgctgtgtccaatagttctgctgaggtgtactctcagagttaa

SEQ ID NO: 129488 - DNA, 1308 bp, Homo sapiens
cgattggcgatcacgggtcgcgactactatcggagatatactagttggataccaacatacatgcaaattaaccttaatatagatcgacctatggaagatccacgagatgtgcatagagttcgtccctcgtcatcatcgcgacaacgtcgcacgagcggacaggctagcagcctacacatagaggactatgtcgaatcagcaatgatgcaacctcagatccctgtcctggacatagaaagccctgttctggagcctcctggtgtggccagtggtgactggacattcctgggcctcaagccactagataaagctgtggttgtgggtgagtgggggctggagtgggacaaagaactaggagaaatagcttttcctgaaggctccagtcctgggaatacaagacaagctccactgcctcactccagctcagaggcaggaaatgaacagggccagacatctttagaagtcagtttaaacccagagaagctgttgttcatgaaccagttcaatgcctcgcagtctaacactaaggaagatcaatcacacgcttctctgctcctggagtcagcctgcattgcaaataaagaagctgctgccaccacagacacatttaatggattttcaaagcaaggtgcaaactcactggctggctgtgtgcctgcctgggtccacatcacctccctcatcagctctggccccctgggaatgctgcttaatctctttgaatctcagtttcctcatctgtatgatggggtaactaaagtatctctagtaaagggctgccatgaaacttacatgagcttgaaggagcaagccatgcagatccagccacaatgtgttctcctggtgggcacactccaggccttgttgcccctggtcaggatacagctcccgcctctgttgtctgtcttgctgtatcaccctcgggccttatcagctgaaaaacaggcagcaaaggaacggcagctacaagtcattcggaaattatttgtgtgtgggaaacaggttgctattttgggtgtggataattttccagggcaaaggaaggagctgttgccgaggagtgactgggtgacatcctataaggtcatggtgagcaatgacagccacacgtgggtcactgttaagaatggatctggagacatgatatttgagggaaacagtgagaaggagatccctgttctcaatgagctacccgtccccatggtggcccgctacatccgcataaaccctcagtcctggtttgataatgggagcatctgcatgagaatggagatcctgggctgcccactgccagggtgggagcactga

SEQ ID NO: 129489 - DNA, 377 bp, Homo sapiens
ggcacgagaattattaaaagcagtatggagaccccacaaggtggcagttatgcattgcagaggacaccagcgagcttccaccttggtgggtttagggaattcccgtgctgactcagaggctcgaaaagcaccatctgccccattccgggcatcagtcacagcccccctgctccctcaagcacctgatcttgtacctacttattctaaagaagaaaatgactttctccaggcaaagggaggacaagtgatggaggaaggatgaattcggttaccggatgggagagtagctgcagttgtactggctgtgcatgaaaccacccatcgaggtcaggaattacttgaaaagttgttaggctggtatttctacatctcacatt

SEQ ID NO: 129490 - DNA, 679 bp, Homo sapiens
  misc_feature (1)...(679): n = a,t,c or g
cccacgcgtgcggataatccataaaagaatctataacaagtaaataaaagaaggaaatggaataatattaatttaaaagatgaaaacaaaccagatgggactgaaatcaaaagtagtggaaatgaatgcaactatatcagaaattagattaaacataaacagaaaagacgtagaatatcaacaagaaatcttgcagttagaagcagtatggaaactccacaaggtggcagttatgcattgcaaaggacaccagcgagcttccaccttggtgggtttggggaattcccgcactgactcagagtctccaaaagcagcatctgcccctttgcgggcatcagtcacagcccctctgctccctcaagcacctgatcttgtacctacttattctaaagaagaaaaggactttntccaggtagagggaggacaagtgatggaggaaggatgcattcggttactagatgggagagtagctgtgccacagctgctaggagctgcaattgtactggctgtgcatgaaaccacccatcttaggtcaggagttcacttggaaagttgttaggccagttattttctaccatctcgcattttgtcagcctttgccaaaacttgacacagcggtgtgttacctgccgacagcataatgcaaggcaaggtccagccgttccacccggcatgcaag

SEQ ID NO: 129491 - DNA, 951 bp, Homo sapiens
tcacgctcgctgcacggggatcgccgccagggctgggctgctggatccccgccacacgggggaagcactggcggcacgatcccggatcgacctcgcgaggcgcccgcactggccgcggggctgcgggactggcggcggcggcggcggctgcgcggggctgggcggggcttggctgcggggaaatgacgtcgccgtccccgcgcgcgccctggtaacggcggctcccgcgtcctcctccatgtccccgcctatccccgccgcagcccgccccgtctcctcctccctccgcagcctcgccgagtcctcggtgcgggctgcgagcgggacccgcggagctgcgctgtcctcgacgcctccgccaggcgcgggccgaggagcctccaagagctggcccggcccccggccgccgccgcccaaccccgggcatctgccccgcgccgttgtccccgcggcttcgggccggcgggaccgccccgtcccttccaggggtgacccgggggtcgcgggtgggacggcgcctgcggccgagtctggggggcgccgggtgtcgggtcgggaagcggccgccgcgactcttgcctcccgggcgtcgttgctccacgggcctgcctccacccgcggggacaggtgccccggctggggtctgttgggaagatggcgaccccgggcatgagctggcagcagcactattacggcggctcggcggccaaattcgcgccctcgccggccaccgcacagctggctgggcacagcatggactgtctccccgggaggcagtgcgccctgcgcccgcagcgaggggaactctactcctccgccgaagcaacagccggagacacctccaaaaccctgcaaactttggtggaacgctggcaacatgaatttaagcttagcactagtacatgccaaatgcagcatctctttttctttgttacattgtagctttgccat

SEQ ID NO: 129492 - DNA, 502 bp, Homo sapiens
gcggccgccgcgactcttgcctcccgggcgtcgttgctccacgggcctgcctccacccgcggggacaggtgccccggctggggtctgttgggaagatggcgaccccgggcatgagctggcagcagcactattacggcggctcggcggccaaattcgcgccctcgccggccaccgcacagctggctgggcacagcatggactacagccaggagatgcacctgaaaatgagcaagaaaatcgcccagctcaccaaggtaatatatgctttaaacactaaaaatgatgagcatgaatctgcaattcaagccctcaaagatgctcatgaagaagaaattcaacacattcttgctgaaacaagagaaaaaatatttgcagtataaaagcaaagtaacagaggagctagaccttagaagaaagattcaagttttagaatcatcattagaagatcacataaaaatgaagcagcaggctttgacagaatttgaagcttataagcacagag

SEQ ID NO: 129493 - DNA, 319 bp, Homo sapiens
atgcggaggcttgcattgtacattttagctccagatcgactgcaagaacaaaccagcaatcctgagaggacccacagaccctctgaaggaagcggactgctactgcaggacttgggagagaccccaaatacttctacccaaatgggaaggaaccagaaaaccaatcctggtaatatgacaaaacaaggctcatcaacatgcccctcaaatcacactacttcaccagcaatgaatccaaaccaagaagaaatacctgatttacctgaaaaagaattcaggagtttagttattaagctaatcagggagagaccagagaaag

SEQ ID NO: 129494 - DNA, 368 bp, Homo sapiens
ctcctgaattcttctccaggtaaatcagggatttcttcttggtttggatccattgctggtgaactagtgtgatttttttgggggggtattgaagagccttgttttgtcatattatcagggtcggttttctggttccttctcatttgggtaggtgcttcagcttctccagttgtgggggacgtgtttgggagaggagggtctccctttcccacttccactgttggggcattcacagttttgtggggggtctcctgggtccttaagagggtctgtgggtcctcttgggattgctgatttgttcttgcaatcaatctggagctaaaattcacaatgtgagccccccctcgctgctctgtccacagctgcat

SEQ ID NO: 129495 - DNA, 660 bp, Homo sapiens
ttaatgcttcagtttgatgaagagtacacagtcacgcagacatatgattgaaccaaaggggtatgatctaatggtactaaactggaagaacttggcaaggcctgtttcctcagattcttctgtgtcctcatgtcttccttcatggataagaatgttaacaaaggtcttaagacctccggaattctttttcaggtaaatcaggatttcttcttggtttggatccattgctggtgaactagtatgatttgttgggggtgttgaggagccttgtttttttatattaccacagttggttttctgctttcctctcatttgggtaggctctggggccagcaacagcaggcagctgccaaccttggccccttctagtaactgtttccttctcttgctagaacttgggagggagtccttgtcagatggaagaacaaagctactatcaaactcaggtccattggctgcccctccgctccctgctccaagtccccggccgccgcagcccactgggagtcctgctaagggaagctgagaaagggggtcctgggaaagcgttcctagtgctcctgaggaaagcgagtctgcatggtgctggctcggttcctgggagtcacacttcgtcttcgccctttgtctcttcaggtttgcagcttcatctgaagccat

SEQ ID NO: 129496 - DNA, 1869 bp, Homo sapiens
ttagcttaggattgacttggtgatgcaggctcttttttggttccacatgaactttaaagtagttttttccaattctgtgaagaaagtcattggtagcttgatggggatggcattgaatctataaattaccttgggcagtatggccattttcacgatattgattcttcctacccatgagcatggaatgttcttccatttgtttgtatcctcttttatttcattgagtagtggtttgtagttctccttgaagaggtccttcacgtcccttgtaagttggattcctaggtattttattctctttgaagcaattgtgaatgggagttcaatcatgatttggctctctgtttgtctgttattggtgtataagaatgcttgtgatttttgtacattgattttgtatgctgagactttgctgaagttgcttatcagcttaaggagattttgggctgagatgatggggttttctagatatacaatcatgtcatctgcaaacagggacaatttaacttcctcttttcctaattgaataccctttatttccttctcctgcctgattgccctggccagaacttccaacactgaggctcgtatatctgagagtgacttgccccacgcgctgcagatggtggcaaaggcagtcttcaaagggcaccctgcgggcaacaactcctctctctggtccgcactgcctcctgcctccatccagtctgttgctgatgtaaagaatccaggcttctttctcttcttttttggaggagtagaatgttgagagtcagcagtagcctcatcatcactagatggcatttcttctgagcaaaacaggttttcctcattaaaggcattccaccactgctcccattcatcagttccataggttggaatcactcgaatacttctatctacttcgtcagaataagggtgtctaacagctacaatcgtgtcaaaatccttttgtccattcgaaactgcactaccaatcgcaatggcttctgcacaaacagttactcgtcctatatacgcttcaatatgtactgccgaaatgatttctcctgttttcgtacgaattgccgctcccacatgatgtttattatcctcataaagcattgtaatcttctctgtcgctacttctactaattctagatcttgttgagaaatgttaaatgttttcatatattcttcttcctccgatttctggttgctgactaattgagatgcatgctttgcatacttctgcctgctggggagcctggggactttccacaccctaactgacacacattccacagctagcgctatatgcgttgatgcaatttctatgcgcacccgttctcggagcactgtccgaccgctttggccgccgcccagtcctgctcgcttcgctacttggagccaaggagtcaaaattagatgcagatttttgactgcacgaggaggggtgccagtactcctaacccacaaattgttcaagggtccactaaacctcctgaattctttttcaggtaaatcaggaatttcttcttggtttggaaccattgctggtggactagtgtgatttttggggaatgttgaatattgctgttttttcatattaccagggttggttttctggttcttctcatttgggtaggctttgttagagggaaggtctagggctgaagactgttgttcagattcttctgtcccatgggatgttcccttaatgtagtactctccccctttacctatgaatgtgacttcctggctctgggctggtactgggggttgtctgcacagagtcttgtagtatgaaccatctatgggtctctcagccatggacaccagcacctgttccggtggaggtggcgggatgaggggtgcaatggactccat

SEQ ID NO: 129497 - DNA, 696 bp, Homo sapiens
atggcaagcaagcaagttcacagtcaggaagaagtttggtatgtccctgaaacaggaagctacaatgacttgaaaatcgactgcaagaacaaaccagaaatcccaagaggacccacagaccctctgaaggaagcgactactcctgcaggacccaggagacaccctaaatactgtgagtgccccagctgcagaagtgggaaagggagagcctcctctcccaaacacacacccccgctggagaagctgaaggtctgtttgcgggagaagtttccaactttacttggagctgagtcagaacctacccaaatgagaaggaactggaaaaccaaccctggtaatatgataaaacaaggatggtcaacaccccccacccccaaaatcacactaattcaccagcaatggatccaaatcaagaagaaatccctgatttacctgaaaaagaattcaggagagaaaactccaagtattttttgcaaggaaaagttgatgatactgatgatgatggtgatggtgatggtggtactgattagagtgctgatggtagtagtcctggtccacaacctggcatttagtggtaggcctggagctgctcttggtcaacagtgtcagaagttgggaagaagagctgcatatcaagcagaagagaatgagaagaaacaggaacccacttctgcatctgtctatagcaacatctga

SEQ ID NO: 129498 - DNA, 525 bp, Homo sapiens
atgttgagacagagaagatggtacctgctgcatccttggagattcaaaatgtcatcatggcattctaggctagactggcagtggagaaatcacttcaactttgaccactttgaaattttgcgagccattgggaaaggcagttttgggaaggtctgcattgtacagaagaatgataccaagaagatgtacgcaatgaagtacatgaataaacaaaagtgcgtggagcgcaatgaagtgagaaatgtcttcaaggaactccagatcatgcagggtctggagcaccctttcctggttaatttgtgttcaccagcaatggatccaaaccaagaagaaatccctgatttacctgaaaaagaattcaggaggttagctattaagctaatcagggaggaaccagagaaaggtgaagctcagtgcaagggaatccaaaatatgatacaagaagtgaagggagaaatattcaagcaaatagatagcttaaagaaaaaacaatacaaaattcaggaaactttagacacactttaa

SEQ ID NO: 129499 - DNA, 669 bp, Homo sapiens
gccatcagaacctaagcacgtgtgcttgcttcagcagcacatgtactggaattagaatgatgcagagaagattagcatggtccctgcacaaggatgatgcacaaatccgtgaagtattccatataaaaacaaagaagaagaagaaggaaaagggggagagtattacatcaagggaacatgccatgggacaaaaggatctgaacaacagccttcagccctggaccttccctctgacagagcctacccaaatgagaaggaaccagaaaactgactctggtaattaatatgacaaaacaaggctctttgacactccccaaaaaatcacactagctcaccagcaatggatccaaaccaagaaaaaaatccctgattaacctgaaaaagaattcaggaggttagttattaagctaattagggaggcaccagagaaaggtgaagcccaatgcaaggaaatccaaaaatcaatacaagaagtgaagggagaaatattcaaggaaatagatagcttaaagaaaaaacaataaaaaattcaggaaacttcagacacacttttagaaatgcaaaatgctctggaaagtctcagcaatagaattgaacaagtagaagaaagaaattcagaactctaagacaaggtctttgaattaacacaatccaacaaagacaaagaca

SEQ ID NO: 129500 - DNA, 614 bp, Homo sapiens
  misc_feature (1)...(614): n = a,t,c or g
gccgtcgcagccactgctgtggtcgccggtcgncgaggggncnnatactggttgcccgcggtgtaagcagaattcgacgtgtatcgctgccgtcaagatggaggggcctttgtccgtgttcggtgaccgcagcactggggaaacgatccgctcccaaaacggatgtaaccattactaacgatggtgcaaccatcctgaagttactggaggtagaacatcctgcagctaaagttctttgtgagctggctgatctgcaagacaaagaagttggagatggaactacttcagtggttattattgcagcagaactcctaaaaaatgcagatgaattagtcaaacagaaaattcatcccacatcagttattagtggctatcgacttgcttgcaaggaagcagtgctntatntcantgaaaacctaattgttaacacagatgaactgggaagagattgcctgattaatgctgctaagacatccatgtcttccaanatcattggaataaatggtgatttctttgctaacatgtagtagatgctgtacttgctattnatgccagacatagaggccagcacgctatccagtcantctgttatattgaagccatggagagtcaat

SEQ ID NO: 129501 - DNA, 1864 bp, Homo sapiens
  misc_feature (1)...(1864): n = a,t,c or g
cgccgtcgcagccactgctgtggttcgccggtcggccgaggggccgcgatactggttgcccgcggtgtaagcagaattcgacgtgtatcgctgccgtcaagatggaggggcctttgtccgtgttcggtgaccgcagcactggggaaacgatccgctcccaaaacgataaagagagttttaatgagcaaaaaacttgcagaatctgaaggaaaaggctggtatagctgtacgaagtggcagagcatgaaattgttatggctgcagcttcgattgccaatattgtaaaaagttctcttggtccagttggcttggataaaatgttggtggatgatattggtgatgtaaccattactaacgatggtgcaaccatcctgaagttactggaggtagaacatcctgcagctaaagttctttgtgagctggctgatctgcaagacaaagaagttggagatggaactacttcagtggttattattgcagcagaactcctaaaaaatgcagatgaattagtcaaacagaaaattcatcccacatcagttattagtggctatcgacttgctttgcaaggcnagcagtgcgttaatatcaatgaaaacctaattgttaacacagatgaactgggaagagattgcctggattaatgctgcttaagacatcccatgtcttccaaaattcatttgggataaatggtgatttctttgctaacatggtagtagatgctgtacttgctattaaatacacagacataagaggccagccacgctatccagtcaactctgttaatattttgaaagcccatgggagaagtcaaatggagagtatgctcatcagtggctatgcactcaactgtgtggtgggatcccagggcatgcccaagagaatcgtaaatgcaaaaattgcttgccttgacttcagcctgcaaaaaacaaaaatgaagcttggtgtacaggtggtcattacagaccctgaaaaactggaccaaattagacagagagaatcagatatcaccaaggagagaattcagaagatcctggcaactggtgccaatgttattctaaccactggtggaattgatgatatgtgtctgaagtattttgtggaggctggtgctatggcagttagaagagttttaaaaagggaccttaaacgcattgccaaagcttctggagcaactattctgtcaaccctggccaatttggaaggtgaagaaacttttgaagctgcaatgttgggacaggcagaagaagtggtacaggagagaatttgtgatgatgagctgatcttaatcaaaaatactaaggctcgtacgtctgcatcgattatcttacgtggggcaaatgatttcatgtgtgatgagatggagcgctctttacatgatgcactttgtgtagtgaagagagttttggagtcaaaatctgtggttcccggtgggggtgctgtagaagcagccctttccatataccttgaaaactatgcaaccagcatggggtctcgggaacagcttgcgattgcagagtttgcaagatcacttcttgttattcccaatacactagcagttaatgctgcccaggactccacagatctggttgcaaaattaagagcttttcataatgaggcccaggttaacccagaacgtaaaaatctaaaatggattggtcttgatttgagcaatggtaaacctcgagacaacaaacaagcaggggtgtttgaaccaaccatagttaaagttaagagtttgaaatttgcaacagaagctgcaatcaccattcttcgaattgatgatcttattaaattacatccagaaatccttcggattaaacatggaagttatgaagatgctgttcactctggagcccttaatgat

SEQ ID NO: 129502 - DNA, 401 bp, Homo sapiens
tttctgcggagaggcgggaggcgctgagagtctgcgcggaggtccgtgcacagactgctttgcctgttgtggctcttcggaggcggcgatccccgaaggcgagctgaaatacggctgcaggctacaatttgcagccgacgattaaggaagacgacgagcgggagaggtggcccaccctcatggagcgcttgtgctcggatggcttcgcatttccccattactacattaaaccgtatcatctgaagaggatccacagagctgtcttacgtggtaatgaggataaagtgaagaaccttctgctgacgtattatgacgccaatagtagagacaggaaggaaaggactgtcctacattgtggcctgtgtcaatgggcatccggaaattgtcgatcctcttgagcg

SEQ ID NO: 129503 - DNA, 2482 bp, Homo sapiens
atggagagaaaccagagcaggaaagctgaaaattccaaaaatcagagcgcctcttctccaaaggatcgcagctgctcaccagcaacggaacaaaactggacagagaatgactttaatgagttgacagaagtaggcttcagaagcatctgtttccaccagtcaccagcaaggggaggatcgtataaggacacccttcagtgtcagtgtgcttcactatgctcaaaatcaccggatttggaggtggatgtggagggtgaagaactgggaggactcttagagatcacgtatttcaacttcctcacggagtggcatgcaggcagcagcagccttgggaaccccgattgcccctcctcacacctgcccatcacaggacttgggcgacggggtggtgaagtcaggctgtgcccccagcggcgccacgaggccaaaaaccggcgctcagcctcatcccggtggctgcagagtgccaagcgccaggtcctgcgctccgggcgcgggtcagaagcagctggcaagggcagcgcagcctgtgggcccttgggcgctggccggccgcagctccgggaagccacgtcagcccacggggtctgcagctgcagccgccaccagcacatggagcaggggtccccgaggattgggaatccccgaccaggcctgcgcctccagccgcgcggaccccggggccagcctggccgcggcaagtcaggcagtctgcggcaggagcgccgggcatgggcttcggccgggggtgcaggaggcgcgcaccctccggccggatggcggcgcactcagggctcaggaggccatcccacgggagccccgccagcccccgccggagcccgagctgcagtgccgcctgcaagtggtgcgctggctgcagctgtggcaaccccagatcccgtcctcccgcctcgcacccatcagcgcggaccccgggggcgacgcagtggcgatgtcgggctgtgggcccagcggtggcactaggcggagaagcaccactcaaccccatccctgggctgcagagggcccagcgcggggggctccgagcgtcgggagcctgtggaagagaagagcgcgcgggcgacagttaaacaggccctgggcagggcgcgcctccgtccagggagccccgccctcccgcggcacctccgcagcaaccgccgcctgcaccgggcgcgcgagagctgctagggcggtttctctgcctcgggcctgttgggcagggccggctaaggtgcgcgtgctcgctggttctaacccttctgttgggcgtttctgcggagaggcgggaggcgctgagagtctgcgcggaggtccgtgcacagactgctttgcctgttgttgctcttcggaggcggcgatccccgaaggcgagctgaaatacggctgcaggctacaatttgcagccgacgattaaggaagacgaccagcgggagaggtggcccaccctcatggagcgcttgtgctcggatggcttcgcatttccccattactacattaaaccagtatcatctgaataggatccacagagctgtcttacatggtaatctagagaaactgaagtaccttctgctcacgtattatgacgccaataagaggagacaggaaggaaaggaccgccctacatttggcctgtgccactggccaaccggaaatggtacatctcctggtgtccagaagatgtggagcttaacctctgcgaccgtgaagacaggacacctctgatccaaggctgtacaacttgaggcaggaggcttgttgcaactcttctgctgcaaaatggcgcccgatccaaatattacggatgtctttggaaggactgctctgcactacgctgtgtataatgaagatacatccatgatagaaaaacttctttcatatggtgcaaatattgaagaatgcagcgaggatgaatatccgccactgttccttgctgtgagtcaaagaaaagtgaaaatggtggaatttttattaaagaaaaaagcaaatataaatgccgttgattatcttggcagatcagccctcatacatgctgttactcttggagaaaaagatatagtcattcttcttctgcagcacaatattgatgtgttttctcgagatgtgtatggaaagcttgcagaagattatgccagcgaggctaagaacagagtcatttttgaactaatttatgaatatgaaagaaagaaacatgaagagctttctataaatagcaatccagtgtcttctcagaaacaaccagccttgaaggctacaagtggcaaggaagattctatctcgaatatagccacagaaataaaggatggacaaaaatctgggacagtgtcttctcagaaacaaccggccttgaaggatacaagtgacaagaacgattctgtttcgaacacagccacagaaataaaagatgaacaaaaatctgggacaagtgtcttctcagaaacaaccggccttgaaggatacaagtgacaagaacgattctgtt

SEQ ID NO: 129504 - DNA, 675 bp, Homo sapiens
agcacgtggggaaaggggcggctgtgggcacagcttcagcagacttaaatgttcctgcctgctggctctgaaaagagcagcagatctcccaccacaacactcgagctctgctaagggacagactgcctcctcaagcaggggtcaaaagacaactcatacaggagagctccagctggcatctggaggatggccctctgggacgaagcttccagagaaaggaacaggcagcaaaatctttgctgttctgcaacctccactggtgatacccaggcaaacaaggtctggagtggacctccagcaaaatccagcagacctgcagcagagggaaagcaatagcatcaacatcaacaaaaaggacatccacaccaaaaccccatatgaaagtcaacaatatcaaagaccaaacgtagataaatccacgacgatgaggaaaaactcgcacaaaaaggaggaaaattccaaaaaccagaacaccttttctccaacggatcacaactcctcgccagcaagggaacaaaactggacagagaatgagtttgacaaactgacagaagtaggcttcagaaagtgggtaataacaaactcctctgagctaaaggagcatgttctaacccaatgcaaggaagctaagaaccttgaaaaaaagttagaggaattgctaactaaaataaccag

SEQ ID NO: 129505 - DNA, 467 bp, Homo sapiens; identical to SEQ ID NO: 129286

SEQ ID NO: 129506 - DNA, 634 bp, Homo sapiens
agcacctgggggaaggggcagctgtgggcacagcttcaggacacttaaacgttcctgcctgctggctctgaagagagcagcagatctcccagcacagtgctcaagttctgctaagggacagactgcctcctcaagtgggtccctgacccctgtgcctccggagtgggagagaccttccagcaggggtcaacagacatctgaaaggaatagcgtcaacatcaacaaaaaggacatccacacaaaaaccccatccgaaggtcaccagcatcaaagaccaaaggtagataaatccatgaagatgaggaaaaaccagtgcaaaaaggctgaaaattccaaaaaccagaacaccttttctcctgcaaaggatcacaactccttgccagcaagagaacaaaactggatggagaatgagtttgacgaatttacagaaggaggcttcagaaggtgggtaataacaaactcctctgagctaaaggagcatgttctaacccaatgcaaggaagctaaaaatgaaaaaaggctggaggaattgctaactagaataaccactttagagaagaacataaatgatctgatggagctgaaaaacacagcacgagaccttcgtgaagcatacagaagtatcaatagctga

SEQ ID NO: 129507 - DNA, 894 bp, Homo sapiens
atgtgctatctttcaagaaaaggaaaaaaggaccccagagccacaattcagacttcatcagggctgccaatcctatcactggtccagagtgcacaggccaggggtgcaaggctgcctccacgaagtttcaccagatgcagtcaggcctccgcaggggctgctgagccgcagtgtctccaggaagacccgctgatgagtcacactccaatccactcatcagaccaccgtgctgctggccttctgttgtctgctatggcaaggataacatccctgcctctgggagcctggcagcaccttttgcatactggtgagattgcactctggcctgtgcagaagaggaggctactggatagcatgagactctgtggtgatgggagagagggcacaggagtaattgacgaaggaagcaatagcatcaacatcaacaaaaaggatgaccactcaaaaactccatccaaaggtcaccaacatcaaagatcaaaggtagacaaatccatgaagatgaggaaaaaccagtgcaaaaaggctgaaaattccaaaaaccagaatgcctcctctcctccaaaggatcacaactccttgccagcaagggaacgaaactggacagagaatgagtttgatgaattgacagacataggcttcagaaggtgggtaataacaaactcctccaacttaaaggagcaagttttaacccaatgcaaggaagctaagaaccttgataaaaggttacaggaactgctaactagaataaccagtttagagaagaacataaatgacctgatggaggtgaaaaacacagcacgagaacttcgtgaagcatacacaagtatcaatagccaaatcgatcaagcagaagaaaggatatcgaggttgaaaatccccttaatgaaataa

SEQ ID NO: 129508 - DNA, 716 bp, Homo sapiens; identical to SEQ ID NO: 127020

SEQ ID NO: 129509 - DNA, 1143 bp, Homo sapiens; identical to SEQ ID NO: 121076

SEQ ID NO: 129510 - DNA, 1479 bp, Homo sapiens; identical to SEQ ID NO: 121079

SEQ ID NO: 129511 - DNA, 1188 bp, Homo sapiens
atgaacacagcaagagcaaggggttacagaagacaggctgtggaggaggcaaaatccacagtcattgatgatgcatgggacatgggggaagaaagaaaaagaggactgaagatggttgtcaggcttccagctggcgcaactggttgtgcctctgaaatacagagttcaggagagagctgtgcaatggttcttccacccaccaccacagaccgtcgtgtgaaacccctgcaccgtcgacgcacttacccggttccactctgggccaatcaggcacccggctttgtgctcacacgttggataatatcagtgctgctggagaaaatccagtgtggtggagcaggactctccttcctgccaccggcttcttttcctcctctccttcccctggtgacctccgaggaggagtgtgaggcagcacttttcctccagaggcattcatggggggtcatcacgtcacagttttttcatgatacgttaacaagcaggggagaaagagacaattggcacctgcaccagacccagtgtagaaatgggagccagtgcgaaacagagctcacgaccactggtttagagctgctcctgtcacatgggcagcaagtaagctccagcaccaagagcaacaccaaagcagatgctggcaattgcacacagagctgccttgtgcagccgtggtcagggccaggtgtgtgggcagggaactgccagtgtctgctacagccatctcacctgtcgggtacccagccctcttcatgccagctttctaaccccttctccgtgatgctagcagcatcagagacagcatcacaagtggagagattgcaggaaggtaaattatctgctgtagcttcattcatggccatgaaactaggcaacaacgacagcctgcctgatgactttaatctgatgaggaaggaaggaggaaggaaggaaggaaggagggaaaggagggaggatcacaactcctcgccagcaagggaacaaaactgtatggagaatgagtttgatgaattgacagaagtaggcttcagaaggtgggtaataacaaactcctctgagcagaaggagcatgttctaacccaatgtaaggaagctaagaaccatgataaaaggttacaggaactgctaactagaataaccagtttagagaagaacataaatgacctgatggagctgaaaaacacagcatga

SEQ ID NO: 129512 - DNA, 2370 bp, Homo sapiens
atgaggaaaaaccagtgcaaaaatgctgaagattccaaaaaccagaatgctgcttctcctccaaaggttcacaactccttgccagcaagggaacaaaactggacagagaataagtttgacaaattgacagaagtaggcatcagaagatgggtaataaactcctctgagctaaaggagcatgttctaacccaatgcaaggaagctaagaaccttgataaaaggttacaggaactgctaactataatagccagtttagagaagaacataaatgacctgatggagctgaaaaacacagcaagagaacttcatgaagtatacgcaagtatcaatagccaaattgatcaagtggaagaaaggatatcagagattgaagatcaacttaatgaaatcaagtgtgaagacaagattagagaaaaaagaatgaagaggaatgaacaaagcctccaagaaatatgggactatgtgaaaagaccaaacctacgttggattggtgtacctgaaagtgacagggagaatggaaccaagttggaaaacacacttccggatattacccaggagaacttccctaacctagcaagacaggccaacattcaaattcaggaaatacagagaacaccacaaagatactcctcaagaagagcaaccccaagatacataatcatcagattcaccaaggttgaaatgaaggaaaagatggaagtgggcgcagggatcctaacagtgtgtctgttcaatggcactgataggcgtctttttgttcaaaggaggacttgttcccaacgccctggcactgatccagtgcaagcagcccggggacttgcacccagggccaccggattccatattccgaggccagggctgcctctcccagtgctccggctgcccctcaagttaaataaggcaggtgacatgcgacactggagtcgaccaccgcccgaggcaagaataatttcagagtttttgggctgcaaggaggcagttagcacagggaactacgtagtgagggacatggagactaaacagcagctggcccatctttctggcttctcatggccaagcctgggacacacagctgccctcgtgcaggtccagaactatggcactttgttccctcaggacccatcctcaaagccagtgacttggtctttttcctatgacaaaggagctcccaaaatgtggcagtcccccttcctagagggagaatctgactgggtcagggaggcacccccggtttgcagagcccccattgaagaagaaatcggtacagacacgcagagggaagggcatgtgaggacatgggaaggaaatgccacttgcaagccaaggagaaaggcctcagaagaaaccagccctcctgacaccttgatcttagacttccagcctccagaacttctcagcactctgaagaagcgtgcttgtgagcgccgcgggacgatccaggatggccagaattggggaccatcctgttcttcccatgtggcctggatcacagttcctcaagctttgggatacaaacgaatcacctgggatttggataaaatgcagattcgtgttcagcagccctggcattctgcatttctcatgagctccagggagacgctggtgctgctggggcaggaccacactttgggtggcaagggcttggcaggcaattccagagtgagtgctttttccaaatcttcccagagagatggctatccatggtcaagccatgagctgtccagccagaggggcagccatctccagttggcatggaggcccatagatacttgtggccatgtgaatcagagtcctcatggtcatcataagtgggacatcagagaaaaagatattcagaaaacatggcccaggtgtgatgtgggttgtttacccaagagatggaggactgagcaatcttccaccctaaaatataagaggctttataagaaaaaacttcctgtgaaagggtcaagtctacctaagaactatgagttattcaaaatccacaaggaaaataacgatggccctgattttcataagaagacatttggaaacaggattgagaaaagtgttgctcaaaacaggagctgcccaacccagagaacagagtctccatgtggtgtgaggaagccccaacagcctgtggagaggacccaagaccactggtccacatcttcagttgagctcttaactgataacctctaccatgctaccaaccatatgaatgaaccatctaagaacagatccccagtactcagttgcaccttcccagctactttggaatgtggatgtgggcagctaggcctccaactgcctgctatcttgggtcatgagaaaaagggtcattctagagatggtagaacagacgacttcagagagccaggtttctga

SEQ ID NO: 129513 - DNA, 747 bp, Homo sapiens
atgaggaaaaaacaaggcaaaaagtctgaaaattccaaaaaccagaacgcctcttctccttcaaaggagtacagctccttgccagcaagggaacaaaactggatggagaatgagtttgacaaattgacagaagtaggcttcagaaagtgggtaataacaaactcctccgagctaaaggagcatgttctaacccaatgcgaggaagctaagaaccttgaaaaaaggttagaggaactgctaactagaataaccagtttagagaagaacataaatgatctgatggagctgaaaaaaaaaacagcaggagaactttgtgaagcatacacaagtatcaatagccgaattgatcaagcagaagaaagggtatcagagattgaagatcagcttaatgaagcctgccttacaagagctcctgaaggaagcactaaacatggaaaggaacaacaggcgccagccactgcaaaaacatgccaaattgtaaagaccgtcgacactgtgaaaactaacacaaggacagaaaaccaaacaccacatgttctcactccggttctcagacttcccccttgtgtgggttgcctggcaacctggggctggagcaatcaaaccgtggccagcgcttctccagcccagactgggagacgatttactggtggaactgaccaagaggctaccctgctttacgactgttccattgttaagagaaccagggacatagaaattgaggctttgaagatggtggaggcctag

SEQ ID NO: 129514 - DNA, 1515 bp, Homo sapiens
atggctgagaattcttcctggattgatggaagcagacactttgcatggctggtcttcagagagtacacataccagttgtctggtcttcccaggctccacttcatggattctttctccaacactctgctgttcttgagtcttgtaacccactccttctctaagcccaagcccaagactaggttattgaatacgtcatttatatggagactgaaatctcctgctggggtaaagcagaaaacccactcacaaaaggcctgtggtctgatacccctacggcaagagcagtttccactggagtcaggtgattcttgtcatccgtggagagcctccagaccaatggctgatttgtggtcctcagggttaatggtgcggtacacaggagaacctgtgcaggccgaaagggagatgctgttattctgtccacttgaactaaggtacctgccacagattcgccttgaaatggattcagaggcaatggctcttaattcaaatgtcatctccatagagatggctttcccatcaaccctggctaaccaccttgatatggtttgggtttgtgtccttgctcaaatctcaagtcgaattgtcatccccagtgttggaggaggggcctgggtgggaggtgtaactgtccagattggagcccttgctgccggcctggcccaaccatcaggtggatacccaagagagtttggaactagccccactacagccttgtacattgatgaagagtcccactcttttggctttgtcattgatacctttcaaggaaatgatcttgatgttggtcatcctgccccatgtacgggggctgagggtcagacctcaagccctgaaaaagagatgcagataggagcggagtgtgccagagcagcactgtcttgttttcctagcaaggtctgggagaaagaagacctgcagaagaggggcctgttagaaggaaaactaacaaacagcaatagcatcaacatcaaaaaggacaatcgtgcaaaaatcccatccgaaggtaaccaacatcaaagaccaaaggtagataaatccatgaaaatgagaaaaaaacagtgcaaaaatgctgagacttccaaaaactggaatgcctcttctcctgcaaaggatcacaactccttgccagcaagggaaaaaaactggacagagaatgagtttgacaaattgacagaagtaggcttcagaaggtgggtaataacaaactcctctgagctaaaggagcaagttctaacccaaagcaaggaagctaagaaccttgataaaaggttacaggaactgctaactagaataaccagtttagagaagaacataaatgacctaacggagctgaaaaacacagcacgagtactttgtgaagcatatataagtatcaatagccaaatcaatcaagtggaagaaaggatatcagagattgaagatcaacataaggaaataaagccggaagacaagattagagaaaaaagaatgaaaaggaatgaacaaacctccaagaaatatgggactgtgtga

SEQ ID NO: 129515 - DNA, 1200 bp, Homo sapiens
atgttcccgccgtgctgcgcgccgccgcggcgaccctcactgccccccaaccgcgcacgcccccgcaggcccacacacgaaccgcgcacgcgcgcgttcgacgcgccccgctccccgcgcgcccggcctcgggccctctgcagctggccgctgttcccagtgtctcacccacccccgccggaaccgtccgactgggcggacttggatatctttgtgtgcttcttggggcccttggaagggtgtctgtggggtttccgtgaggccaaagacagaggttccttctcacaaggatggtgtttgctttcacatggacagcccagaccacctggaaccaagtgcacagaagccccaccatccctgggcctcccaggtgtgatgggtgaggagtccaagtccgccggagatccaaggctctttgtggttgaatctgtggagtttttgcaggatgtcatagagttcatgtctgcagctcacagtgtcattgcctgtgtccgcagctccacgtactggcaggtgtactgcaagctgggcagagtggccgcgaacccaaaggtgcgggaacaagtgcggctggagctgagcttggtcaactcagacctgcagatgctcaaggaagagctggaggggctgaacatctcacataataagagtgccacatactccgtgggaatgcagaaaaagtactccatgatctgcttagccattgatgatgacaacaaaactgataaaacccagaaaatctccaagaagctttccttcctgagttggggcaccaacaagaacagacagaagtcagccagcaccttgtgcctcccatcggtcggggctgcacggcctcaggatcacaactcctcaccagcaagggaacaaaactgtacagagaatgagtttgacaaattgacagaagtaggcttcagaaggtgggtaataacaaactcctctgagctaaaggagcatgttctaacccaaggcaaggaagctaagaacattgaaaaaatgatagatgaattgctaactagaataaccactttagagaagaacataaatgacctgatggagctgaaaaacacagcacgagaactttgtgaagcatatacaagtatcaatagccaaatcaatcaagcggaaaaaaggaaatcagagattgaagatcaaattaatgaaataaagtgtgaagacaagattagagaaaaagaatga

SEQ ID NO: 129516 - DNA, 717 bp, Homo sapiens
atgacaccttacacttatggaatttacgtcagaagaggcctgccatactacattcgcttaaattttgcagagaaagaaaaacagcctcaggcaggtccttcaggaaatattccagaaggcattgttatcataggagatgatcactcagtgtgtgttactgtccctgaagaccttctagtgggacaagatctagaggtggaagacagtgagattgatgatcctgatcctgtagcacttggagaaaggggcagctgtgggcgcagcttcagcagacttaaacgttcctgcctgccggctctgaagagagcagcagatctcccagcacagtgctcaagttctgctaagggacagactgcttcctcaagtggatccctgacccccatgtatccttactgggagacacctcgcagcaggggtcgacagacacctcatacaggagagcttcggctggatcacaactccttgccagcaagggaacaaaactggacagagaatgagtttgacgaattgacagaagtaggtttcagaaggtgggtaataacaaacttctcagagctaaaggagtgtgttctaacccaatgcaaggaagctaagaaccttgaaaaaaggttagaggaattgctaactagaataaccagtttagcgaagaacataaatgacctgatagagctgaaaacacagcttgagaacttgataaagcctaaggatcgactctag

SEQ ID NO: 129517 - DNA, 601 bp, Homo sapiens
ggagtggactttcagcaaactccagcagacctgcagcatgagggtcctgactgttagaaagaaaactaacaaacagaaaggaatagcatcaacatcaacaaaaaggacagccacacaaacacccgatccgaagatcactgacatcaaagaacaaaggtatataaattcaccaagatgaggaaaaaccagcccaaaaagcctgaaaattccaaaaacagaatccctcttctccttcaaaggatcataactccttgccagcaagggaagaaaactggatggagaatgagtttgacaaattgacagaagtaggcttcagaaggtgggtaataacaaactcctctgagttaaaggagcatgttctaacccagtgcaaggaagctaagaaccctgataaaaggttagagaaactgctaactagaataatcagtttagagaagaacataaatgacctagtggagctgaaaaacacagcatgagaacttcttgaagcatacacaaatatcaatagccaaattgatcaagtggaagaaaagatacgagattgaagatcaacttaatgaaataaagcttgaagatgagattagagaaaaaaaaaaaaaaa

SEQ ID NO: 129518 - DNA, 477 bp, Homo sapiens
atgtggaaggtgacagggaagcaagacacgtcttacattggcagtagggagcctctgctggtgatactcaggcaaacagggtctggagtggacctccagcaaactccagcagacctgcagaagaggggcctgactgttagaaggaaaactaacaaacgaaaagcaataacgtcaacatcaaaaaacaggatgttcacacaaaaaccccatctgaaggtcaccaacatcaaagaccaaagggatcacaactccttgccagcaagggaacaaaactggatagagaatgagtttgacgaactgacagaagtgggcttcagaaggtgggtaataacaaactcctctgagctaaaggagcatgttctaacccaatgcaaagaagctaagaaccttgagaaaaggttgcaggaactgctaactagaataaccagtttagagaagaacataaatgacctgatggagctgaaaaacacagcatga

SEQ ID NO: 129519 - DNA, 2175 bp, Homo sapiens
atgggcaaagacttcaggactaaaacaccaaaagcaatggcaacaaaagccaaaattggcaaatgggatctaattacactaaagagcttctgcacagcaaaagaaactgtcaacacagtgaacaggcaacctacagaatgccttaacctaaacaagtctagcaggtatcagggcaaccagatgaagcatgaaaagtctaatcataaccctgaagatcataccccaaatttatcctgtttgcagttcagggatcacaactcctcgccagcaagggaacaaaactggatggagaatgagtttgacgaattgacagaagtaggcttcagaaggtgggtaataacaaactcctccgagctaaaggagcatgttctaacccaatgcaaggaagctaagaaccttgataaaaggttagacaaattgctacctagaataaccagtgtagagaagaacataaatgacctgatggagctgaaaaacacagcacaagaacttcatgaagcatacacaagtatcaatacccaaatcgatcaagcagaagaaaagatatcagagattgaagatcaactcaatgaaataaaaccaaatctacgtctgattggtgtacctgaaagtgatggggagaatggaaccaagttggaaaacactctgcaggatattatccaggagaacttctccaacctagcaaagcaggccaacattcaaattcaggaaatacagagaacaccacaaagatactcctcgagaagaacaaccccaagacacataattatcagattcaccaaggttggaatgaaggaaaaaatgttaagggcagccagagagaaaagtcgggttacccacaaaggaaagcccatcagactaacagtggatctctcggcagaaaccagaaaagagtgggggccaatattcagcatttgtaaagaaaagaattttcaacccagaatttcatatccagccaaactaagcttcataagcgaaggagaaataaaatcctttacaaacaagcaaatgctgagagattttgtcaccaccaggcctgccctacaagagctcctgaaggaagcactaaatatggaaaagaacaaccgaccactagccagactaataaagaagaaaagagagaagaatcaaatagacacaataaaaaatggtaaaggggatatcaccactgatcccacagaaatacaaactaccatcagagaatactataaacatccctatgcaaataaactagaaaatctagaagaaatggataaattcctggacgcacacaccctcccaagactaaaccaggaagatgtcgaatccctgaatagaccaataacaagttctgaaattgaggcagtaattaagagcctaccaataaaaagaagtccaggaccagacagattcacagctgaattctaccagaggtacaaagaagagctggtaccattccttctgaaactgtcccaatcaatagaaaaagagggaatcttccctaactcattttatgaggccagcatcatcctgataccaaaacctggcagagacacaacaaaaaaagaaaattttaggccaatatccctgatgaacatcgatgtgaaaatcctcaataaaatactggcaaaccgaatccagcagcacatcaaaaagcttatccaccatgatcaagtgggcttcatccctgggatgcaaggctggatcaacatatgcaattcaataaacgtaatccatcacataaacagaaccaatgacaaaaaccacaacatgattatctcaatagatgcagaaaaggcctttgacaaaattcaacaacacttcatgctaaaaactctaaataaactaggtattgatggaacatatctcaaaataataagagctatttatgaaaaacccacagccaatatcatgctgaattggcaaaaactggaagcattccatttgaaaaccagcaaaaaacaaagatgccctctctcaccactcctattcaacatagtattggaagttctggccagggcaatcaggcaagagaaagaaataaaggatattcaattaggaaaagaggaagtcaaattgtctctgtttgcagatgacaagattgtatatttagaaaaccctatcatctcagcccaaaatctccttaagctgataagcaacttcagcaaagtcttaggattcaaaatcaatgtgtaa

SEQ ID NO: 129520 - DNA, 2106 bp, Homo sapiens
atgaaactcatggaaacacttaaccagtgcataaacgctggtcatgaaatgacgaaggctatcgccattgcacagtttaatgatgacagcccggaagcgaggaaaataacccggcgctggagaataggtgaagcagcggatttagttggggtttcttctcaggctatcagagatgccgagaaagcagggcgactaccgcacccggatatggaaattcgaggacgggttgagcaacgtgttggttatacaattgaacaaattaatcatatgcgtgatgtgtttggtacgcgattgcgacgtgctgaagacgtatttccaccggtgatcggggttgctgcccataaaggtggcgtttacaaaacctcagtttctgttcatcttgctcaggatctggctctgaaggggctacgtgttttgctcgtggaaggtaacgacccccagggaacagcctcaatgtatcacggatgggtaccagatcttcatattcatgcagaagacactctcctgcctttctatcttggggaaaaggacgatgtcacttatgcaataaagcccacttgctggccggggcttgacattattccttcctgtctggctctgcaccgtattgaaactgagttaatgggcaaatttgatgaaggtaaactgcccaccgatccacacctgatgctccgactggccattgaaactgttgctcatgactatgatgtcatagttattgacagcgcgcctaacctgggtatcggcacgattaatgtcgtatgtgctgctgatgtgctgattgttcccacgcctgctgagttgtttgactacacctccgcactgcagtttttcgatatgcttcgtgatctgctcaagaacgttgatcttaaagggttcgagcctgatcacctaacacctgctggaaattgctatgttgttaggagaaatgaggattgtattggatttttcagtggattctacaacgtaattagtctaggagtatacctggttgagcagcagaaaggatgggaggacacccactcaaaaaccccatccaaaggccatcagcatcaaagatcaaaggtagataaatccacaaagatgaggaaaaactggtccaaaaatgctgaaaattccaaaaaccagaatgccttatctcctccaaatgatcgcaactcctctccagcaagggcacaaaactggatggagaataagtttgacaaattgacagaagtaggcttcagaaggcaggtaataacaaacacctctgagctaaaggagcatattctaacccaatccaaggaagctaagaaccttgataaaaggttacaggaactgctaactagaataaccagtttagagaagaacataaatgacctgatggagctgaaaaacacagcaagagaacttcgtgaagcattcacaagtttttgtgttaactgtgaagcagtttcactaataaccagtctaagggaggattcccactggttggaggatagtaaaggtcatcgtatgccaggcaccaggaatagaagtgtgaatactttcacccaccgcatcctgggctgcagttttaccagttgcctgaatctgactcccatagtgaccctctctggccacatggaggcagtttcctcagttctgtggtcagatgctgaagaaatctgcagtgcatcttgggaccatacaattagagtgtgggatgttgagtctggcagtcttaagtcaactttgacaggaaataaagtgtttaattgtatttcctattctccactttgtaaacgtttagcatctggaagcacagataggcatatcagactgtgggatccccgaactaaagatggttctttggtgtcgctgtccctaacgtcacatactggttgggtgacatcagtaaaatggtctcctacccatgaacagcagctgatttcaggatctttagataacattgttaagctgtgggatacaagaagttgtaaggctcctctctatgatctggctgctcatgaagacaaagttctgagtgtagactggacagacacagggctacttctgagtggaggagcagacaataaattgtattcctacagatattcacctaccacttcccatgttggggcatga

SEQ ID NO: 129521 - DNA, 1603 bp, Homo sapiens; identical to SEQ ID NO: 129292

SEQ ID NO: 129522 - DNA, 1416 bp, Homo sapiens
atgggcacttcttattgcccagtggggaagaacatcctagctccctacttggccttctctgacactgtccaggaaggagtgaagctgcagaccttcgtggtgagagttacagctcttaaaggtagtgtggacccaaagagtgagcagcagaaagatttattgcaaagagtgaaaaaacacagcttccaccttctggaaggggacctgagctggttgccattgctggctcaggcaacctgcttttattctcttatctggccccacccacatcctgctgattgcccttgggtggtcattgggactgggcgccttggagcagggggcggtgctcatcggggaggctcgggctgtgcaggagcccacggtgcccctctgggacgaagcttccagaggaaggaacaggcagcaatctttgctgttttgcagcctccgctggtgatacccaggccaacaggttctagagtggacctccagcaaactctggcggatctgcagcagaggggcctgactgctagaaggaaaactaacaaacagaaaggaatagcacatccacgtcaaagaccccatccgaaggtcaccaacatcaaagaccaaaggtagataaatccacaaagatggggagaaaccagtgcaaaaaggcctgaaaattccaaaagccagaatgcctgttgtcctccaaaggatcacagctccttgccagcaagggaacaaacctggatggagaatgagtttgacgaattgacagaagtaggcttcagaaggtgggtaataacaaactcctccaaactaaaggagcatgttctaacccaatgcaaggaagctaagaaccttgaaaaaaggttagaggaattgctaactagaataaccaatttagagaagaatataaatgacctgatggagctgaaaaacacagcacgagaacttcgtgaagcatacacaagtatcaatagccgaattgatcaagcgaaagaaaggatgtcagagattgtagatcaactgaatgaaagaaatgacagggagaatggaaccaagttggaaaacactctgcaggatattacccaggacaacttcccctacctagcaaggcaggtcaacattcaaattcaggaaacacagagaatgccacaaagatactactcgagaagagtaaccccaagacacataattgtcagattcgccaaagttgaaatgaaggaaaaaatgttaagggcagccagagagaaagacacatcagtgaaacagaaagttaacaaggatatccaggaattgaactcagctctgcaccaagtggacctaatagccatctacagaactctccaccccaaatcaacggaatatacattcttctcagcaccacatcacacttattccaaaactgaccacatagttcattcgatactctgcgactctggttaa

SEQ ID NO: 129523 - DNA, 679 bp, Homo sapiens
ccaccctcatattgtcttatgcccaatttctgcctcaaaagaaagagtaaaaactaaaagccagaaatgaaatccacaggcagacagcccggtgccacaccctgggcctggtagttaaagatcgacccctgacctaaccggttgtgttatctatagattctagacattgcatagaaaagcactgtgaaaatccctgtcctgttctgttccgttctgattaccagtgcatgcagcccccagtcacataccccctgcttgctcaatcaatcacgaccttctcacgcagacccccttagagttgtgagcccttaaaagggacggaattgctcactcagggagcttggcttttgagacgcaagtctgctgaagttcccagctgaataaagctccttccctctttaacccggtgtctgaggagttttgtctgtggctcctcctgctacaaaaggaattgctaactagaataaccagtttagagaagaacacaaatgacctggtggacctgaaaaacacagcatgagaacttcatgaagcacacacaagtatcaacagctgaattgaccaagtggaagaaaggatatcagagtgtgaagaccaccttactgaaataagacattcagaaaagatgaagactgccttactgaaataagacatgcagacaagaagagagaaaaaaaaa

SEQ ID NO: 129524 - DNA, 2092 bp, Homo sapiens
atggatggagatctccacaagggagtggctgtgttctggccaccagatgctgctggaggccacacctgctgcaggagcatggtctgcaggagcctgctaggaggagcacagtggaaatttcatagttttaggtgtaggatccgttttgaattaattttacatatgatacaagaaaggaatagcatcaacatcagccaaaaggacgtccacacagaaactccatctgaaactcaccatcatcaaagaccaaaggtagataaatccatgaagatgaggagaaaccagtgcaaaaaggctgaaaattccaaaaaccagaaagcctcttctcctccaaaggaacacaactcctggagagcaagggaacaaaactggacagagaatgagtttgacaaattgacggaagtaggcttcagaaggtgggtaataacaaactcctctgagctaaaggagcatattctaacccaatgcaaggaagctaagaaccttgaaaaaacattagaggaattgctaactagaataaccagtttagagaagaacataaatgacctgatgaagctgaaaaacacagcacgagaacttcgtgacgcatacacaagtaaatcagggatttcttcttggtttggatccattgctgggagacacctcccagtaggggccgacagacacctcatacaggagagcactggctggcatctggcaggtgcccctctgggatggagcttccagaggaaagagcaggcagcaatgttttgctgttctgcagcatctgctggtgacacccaggcaaacagggtgtggagtggacccccagcaaactccagcagacctgcagaagaggggcctgactgttagaaggaaaactaacaaacagaaaggaatagtatcaacatcaacaaaaaggataactacgcaaaaactccatccaaaggtcaccaacagcaaagaccaaaggtggataaatccacgaagatgaggaaaaaccagcacaaaaaggcttgaaaattcccaaaacccgggatgccctcttctcctccaaagggatcacaactgctcgccagcaagggaaccaaaactggatggagaattgagtttaatgaatttgacgaattgacaggagcaggcttcagaaggtgggtaataacaaactcctctgagctaaaggagcatgttgtaacccaatgcaaggaagctaagaaccttgaaaaaaggttaccaggaactgctaactagaataaccagtttagagaagaacataaatgacctgatggagctgaaacaggatattacccaggagaacttcatgaagcatacacaagtatcaatagcccaagccgatcaaggcaggaaggaaagggtattcagagattgaagatccaactttaatggacataaagtgtgaagacaaaattagagagaaaaaaaaaagaaaaggaacgaacaaagcctccaagaaatatggggctatgtgaaaagaccaaacctacgattgatcagtgtacctgaaagtgacggggagaatggaaacaagtaggaaaacatacttcaggatattatccaggagaattttccttccccaatctaacaagacaggccaacattcaaattcaagaaacacagagaacactgcaaagataccccttgagaagagcaaccccaagacatataattatcagattcaccaaggttgaaatgaaggaaaaaatgttaagggcagccagagagaaaggtcgggttacccacaaagggaagcccatcagactaacagaaaatctctctgcagaaaccctataagccagaagagagtagtagccaatactcaacattcttaaagaaaggaattttcaacccagaatttcatatcgagccaaactaagcttcataagcaaagcaaaagagaaataaaatcctttatagacaagcaaacgctaagggattttgtcaccactaggcctgccttacaagagctcctgaaggaagcagtgaatatggaaaggaaaaaccagtaccagccactgcaaaaacataccaagttgaaaagaccattgacactatgaagaaactgcatcaactaatgggtaaaataaccacctag

SEQ ID NO: 129525 - DNA, 315 bp, Homo sapiens
atggcaggtctggcaacagaactggagccggacttaaggagaaagaggaaggaacttcagctctggcacctgcagacccccgaaagtgacctacggaagctggcagcagggactgcaattgagcattctctcacctttcccttctcagagctccccaagcctatgcccagcatcaccatgaacggagagaccatcgcctgtgctgagggctgccaggccattgttgacaccggcacctctctgctgaccggcccaaccagccccattgccaacatccagagcgacatcggagccagcgagaactcagatggcgac

SEQ ID NO: 129526 - DNA, 2778 bp, Homo sapiens
atgaagtggctgctgctgctgggtctggtggcgctctctgagtgcatcatgtacaaggtccccctcatcagaaagaagtccttgaggcgcaccctgtccgagcgtggcctgctgaaggacttcctgaagaagcacaacctcaacccagccagaaagtacttcccccagtggaaggctcccaccctggtagatgaacagcccctggagaactacctggatatggagtacttcggcactatcggcatcggaactcctgcccaggatttcactgtcctctttgacaccggctcctccaacctgtgggtgccctcagtctactgctccagtcttgcctgcaccaaccacaaccgcttcaaccctgaggattcttccacctaccagtccaccagcgagacagtctccatcacctacggcaccggcagcatgacaggcatcctcggatacgacactgtccaggttggaggcatctctgacaccaatcagatcttcggcctgagcgagacggaacctggctccttcctgtattatgctcccttcgatggcatcctggggctggcctaccccagcatttcctcctccggggccacacccgtctttgacaacatctggaaccagggcctggtttctcaggacctcttctctgtctacctcagcgcgctcagtgtcctcatggtaagtggaaacaacagtgacggtgcccactgcatgggccctggcctaagaggaaaagaaaccacattggtcacaccccaggacagccctggaaagtgcccaatcaacggtcgctctgaggaggcaacagcagatggtcacacaaatggacgaacaaaaaaattcatgtcttctcccctcactttccacagcgatgacaagagtggcagcgtggtgatctttggtggcattgactcttcttactacactggaagtctgaactgggtgcctgttaccgtcgagggttactggcagatcaccgtggacagcatcaccatgaacggagagaccatcgcctgtgctgagggctgccaggccattgttgacaccggcacctctctgctgaccggcccaaccagccccattgccaacatccagagcgacatcggagccagcgagaactcagatggcgacatggtggtcagctgctcagccatcagcagcctgcccgacatcgtcttcaccatcaatggagtccagtaccccgtgccacccagtgcctacatcctgcagagcgaggggagctgcatcagtggcttccagggcatgaacgtccccaccgaatctggagagctttggatcctgggtgatgtcttcatccgccagtactttaccgtcttcgacagggcaaacaaccagaaacctaccgtgacttgccttcaggccatgcatctaataacctttaaaatcaggtctcttgaaacaggtctgatcattctgccctttgagaagctgccagatttccaggcaaggctcacccgttccaactcgaagtgccagggccagctggaggtctacctcaaggacggatggcacatggtttgcagccagagctggggccggagctccaagcagtgggaggaccccagtcaagcgtcaaaagtctgccagcggctgaactgtggggtgcccttaagccttggccccttccttgtcacctacacacctcagagctcaatcatctgctacggacaactgggctccttctccaactgcagccacagcagaaatgacatgtgtcactctctgggcctgacctgcttagagtgtctcattgcagaaccccagaagacaacacctccaacgacaaggcccccgcccaccacaactccagagcccacagctcctcccaggctgcagctggtggcacagtctggcggccagcactgtgccggcgtggtggagttctacagcggcagcctggggggtaccatcagctatgaggcccaggacaagacccaggacctggagaacttcctctgcaacaacctccagtgtggctccttcttgaagcatctgccagagactgaggcaggcagagcccaagacccaggggagccacgggaacaccagcccttgccaatccaatggaagatccagaactcaagctgtacctccctggagcattgcttcaggaaaatcaagccccagaaaagtggccgagttcttgccctcctttgctcaggtttccagcccaaggtgcagagccgtctggtggggggcagcagcatctgtgaaggcaccgtggaggtgcgccagggggctcagtgggcagccctgtgtgacagctcttcagccaggagctcgctgcggtgggaggaggtgtgccgggagcagcagtgtggcagcgtcaactcctatcgagtgctggacgctggtgacccaacatcccgggggctcttctgtccccatcagaagctgtcccagtgccacgaactttgggagagaaattcctactgcaagaaggtgtttgtcacatgccaggatccaaaccccgcaggcctggccgcaggcacggtggcaagcatcatcctggccctggtgctcctggtggtgctgctggtcgtgtgcggcccccttgcctacaagaagctagtgaagaaattccgccagaagaagcagcgccagtggattggcccaacgggaatgaaccaaaacatgtctttccatcgcaaccacacggcaaccgtccgatcccatgctgagaaccccacagcctcccacgtggataacgaatacagccaacctcccaggaactcccgcctgtcagcttatccagggccttga

SEQ ID NO: 129527 - DNA, 1017 bp, Homo sapiens
atgaagtggctgctgctgctgggtctggtggcgctctctgagtgcatcatgtacaaggtccccctcatcagaaagaagtccttgaggcgcaccctgtccgagcgtggcctgctgaaggacttcctgaagaagcacaacctcaacccagccagaaagtacttcccccagtgggaggctcccaccctggtagatgaacagcccctggagaactacctggatatggagtacttcggcactatcggcatcggaactcctgcccaggatttcaccgtcgtctttgacaccggctcctccaacctgtgggtgccctcagtctactgctccagtcttgcctgcaccaaccacaaccgcttcaaccctgaggattcttccacctaccagtccaccagcgagacagtctccatcacctacggcaccggcagcatgacaggcatcctcggatacgacactgtccaggttggaggcatctctgacaccaatcagatcttcggcctgagcgagacggaacctggctccttcctgtattatgctcccttcgatggcatcctggggctggcctaccccagcatttcctcctccggggccacacccgtctttgacaacatctggaaccagggcctggtttctcaggacctcttctctgtctacctcagcgccgatgaccagagtggcagcgtggtgatctttggtggcattgactcttcttactacactggaagtctgaactgggtgcctgttaccgtcgagggttactggcagatcaccgtggacagcatcaccatgaacggagaggccatcgcctgcgctgagggctgccaggccattgttgacaccggcacctctctgctgaccggcccaaccagccccattgccaacatccagagcgacatcggagccagcgagaactcagatggcgacatggtggtcagctgctcagccatcagcagcctgcccgacatcgtcttcaccatcaatggagtccagtaccccgtgccacccagtgcctacatcctgcag

SEQ ID NO: 129528 - DNA, 3163 bp, Homo sapiens
atgtgggccggactgctccttcgggccgcctgtgtcgcgctcctgctgccgggggcaccagcccgaggctacaccgggaggaagccgcccgggcacttcgcggccgagagccggggctgcccccactgtgtctggcagcttccaatattgctttcctgctgccataagatggcaggtctggcaacagaagtggagccggacttaaggagaaagaggaaggaacttcagctctggcacctgcagacccccgaaagtgacctacggaagctggcagcagggactgcaattgagcactctctcacctttcccttctcagagctccccaagcctatgcccagagcagccattccttctctgcagctcaccttggcagctgtggcggtcggcagacagctgcatgcccggcccacactcgcacacaaacccaccttctgtgttcacacagtggccctcgcaggaggaggttacacattcgtcaatgtctggaaagacagaaagcacgtgtttacacagtggtcctcgcaagaggaacttacacatttacaacaaacaccgccctacacctacagcagcagctcctcgccaaagcacaacaaccctccctctagccctccacacaacacaatactccttatctctcctcctcacctacatcgtcctctcttgaaagggttcgccgtcattcatgtgtctcctcggttggtaactacacgtctaggtcctcactatattgccttgcactgtgagatgttcgcaccaaaggtggggctcagtgtcctcatggtaagtggaaacaacagtgacggtgcccactgcatgggccctggcctaagaggaaaagaaaccacattggtcacaccccaggacagccctggaaagtgcccaatcaacggtcgctctgaggaggcaacagcagatggtcacacaaatggacgaacaaaaaaattcatgtcttctcccctcactttccacagcgatgacaagagtggcagcgtggtgatctttggtggcattgactcttcttactacactggaagtctgaactgggtgcctgttaccgtcgagggttactggcagatcaccgtggacagcatcaccatgaacggagagaccatcgcctgtgctgagggctgccaggccattgttgacaccggcacctctctgctgaccggcccaaccagccccattgccaacatccagagcgacatcggagccagcgagaactcagatggcgacatggtggtcagctgctcagccatcagcagcctgcccgacatcgtcttcaccatcaatggagtccagtaccccgtgccacccagtgcctacatcctgcagctttggatcctgggtgatgtcttcatccgccagtactttacctcttctacagtgcatacaaccaggtcggcctggcgcgtgtggtttaagcacactgacgaatgcctagggactccctgtcagcagagatgtaaaaacagcattggcagctacaagtgttcctgtcgaactggcttccaccttcatggcaaccggcactcctgtgtagagaaagtccccaagtgctttgagctaagggacgggcggaagaagggctccgtagcccaaacaaagcagctgtccgcagcgaggacctcccgcagacgcaaacgagtgtcggacgccatcggagacgcgagtctgtcaccattcctgccacaacaccgtgggcagcttcgtatgcacatgcggacctggtttcaggacgggaaggtgacctgtgaaaaggccagtgagggcaagcgtgtgacgagctttgttaactttttcgctgcatgtgatgcccgtgtaacagatagttattctgaggatcactctcctttagtgatgaagtgggtgctgttcctggacataaaggcagacctgtgcttcacatggattgatctgtcttctggcagtgaagtgcaggtgctgctgctgcctccactgtactcagacccaggtagcacaggattgtccatcttccagcagctcagtgcaacggtgtgaactcagcctgtttcagagcctccacaccatgacctccaagaagctggtgaactcggtggctggctgtgctgatgacgctcttgctggcctggtggcctgcaaccccaacctgcagctcctgcagggccaccgcgtggccctccgttctgacctggacagcctcaagggccgggtggcactgctgtcgggtgggggctctggccatgagcctgcccatgctgcaaaatccattcatttggcaaacactcatgagcccactgtgtacctggcgctgtactgggcactagggataccagacaggcaaggtttcatagggaaggggatgctgactggggtcatcgcgggagctgtgttcacctccccggcagtgggcagcatcctggcagccatcacggccgtggcccagcctcccacacgcaagcgtcgcatgcaccacggcattgggggcgcctctgggggttcgaccccggtcggccccaacgcccgctccgacggaacctctccagtcgccgctgccctccgccaaacccccaggggcctccgatggggccagagcgcagtccgcaggggggtttaccgcgtcctgagcggagtggtccccttcacggttcgtggggcaccagctgggtgctgcagccccggaggggtgctgttggggtcgcaaactcgagtaactgagacaccgcggtggaccgtgaagaccatggtcaacaccgctgagaagcccagtctgactaaccccattccactgggatgtgtcgtggctacagtcagtgccaccctgtcctgcaagtgctttgacattgttctctggcttttccttggttccgtttgcctctgcaatgagaaatacgtgcagaaaatgtcccaagccctctgctccttcggctgtgggagtggcatctgcatcgctcccaatgtctgctcctgccaggatggagagcaaggggccacctgcccagaaacccatggaccatgtggggagtacggctgtgaccttacctgcaaccatggaggctgtcaggaggtggcccgagtgtgccccgtgggcttctcgatgacggagacagctgttggcatcaggtgtacaggatggtctccagtgtattgcaaggctaagctgagccaagataggctctga

SEQ ID NO: 129529 - DNA, 1298 bp, Homo sapiens
atgaagtggctgctgctgctgggtctggtggcgctctctgagtgcatcatgtacaaggtccccctcatcagaaagaagtccttgaggcgcaccctgtccgagcgtggcctgctgaaggacttcctgaagaagcacaacctcaacccagccagaaagtacttcccccagtgggaggctcccaccctggtagatgaacagcccctggagaactacctggatatggagtacttcggcactatcggcatcggaactcctgcccaggatttcaccgtcgtctttgacaccggctcctccaacctgtgggtgccctcagtctactgctccagtcttgcctgcaccaaccacaaccgcttcaaccctgaggattcttccacctaccagtccaccagcgagacagtctccatcacctacggcaccggcagcatgacaggcatcctcggatacgacactgtccagagtgggtaccaccatggaaaccacagactcaacctaaaaggcctgtgttcttccaaacgtagttccaccactcccccgctgtatgaccttgggcaggtggcctcacctccctcaggctcagtgtcctcatgcgatgaccagagtggcagcgtggtgatctttggtggcatttactcctcttactaccactggaggtctgaactgggtgcctgttaccgtcgagggttactgggcagatcaccgtggacagcatcaccatgaacggagaggcccatcgcctgcgctgagggctgccaggcccattgttgaacccgggaccttttttgtgaccgggcccaaccagccccattgcccaacatccagagcgacatcgaagcccagcgaagaactcgatggcggacagtgtgctcatctgctcagccatcagcagtcctgcccgacatcggtcttcaccatcaaatggagtccagtaccccgtgccacccagttgcctacatcctgcagagcgaggggagctgcatcagtggcttccaggggcatgaacctccccaccgaatctgaagagctttggatcctgggtgatgtctttcatcccgccagtactttaaccgtctttcgacagggcaaacaaccaggtcgggcctggcccccgtggcttaagcctaagtctcttcagccacctcccaggaagatttggcctttgtcctgtgcccactttagatgtatctaattttcctgactgttcttcccaggggagtgtggaggttttggccctgttccctgtcctaccaataacgtagaataaaaacataacccactgaaccagaaaaaaaaaaaaaaaa

SEQ ID NO: 129530 - DNA, 768 bp, Homo sapiens
atggcgggcgatgtgcaaaaagcactggaagaacgcaatatttttagcgttatttatgatggcacccaacctaaccccaccacggaaaacgtcgccgcaggtttgaaattacttaaagagaataattgcgatagcgtgatctccttaggcggtggttctccacacgactgcgcaaaaggtattgcgctggtggcagccaatggcggcgatattcgcgattacgaaggcgttgaccgctctgcaaaaccgcagctgccgatgatcgccatcaataccacggcgggtacggcctctgaaatgacccgtttctgcatcatcactgacgaagcgcgtcatatcaaaatggcgattgttgataaacatgtcactccgctgctttctgtcaatgactcctctctgatgattggtatgccgaagtcactgaccgccgcaacgggtatggatgccttaacgcacgctatcgaagcatatgtttctattgccgccacgccgatcactgacgcttgtgcactgaaagccgtgaccatgattgccgaaaacctgccgttagccgttgaagatggcacatggcattacattggcatctgtggaggctttgcattcatcctactgcagttggtgcttattacagcttttgcccattcctggaacaagaactgcatttgtgactggggcaaataccccaactgtcagctgcggattgtctggaattatttaaagagtgtgaagccgatcataactgtggcagaagaaaacgcagaaggttga

SEQ ID NO: 129531 - DNA, 854 bp, Homo sapiens; identical to SEQ ID NO: 120818

SEQ ID NO: 129532 - DNA, 896 bp, Homo sapiens
tgccttccatttggtggacctaagcctaatccctgggacaaggatggtgggtgccaaggccggccccagccccggcacctccctgggcctggcacagcagcacagcggaggcagcagtgtcctagtgaaaagtcccttctgtcaggtggccctctctcaccgcatccacttgcagccgcctgttctacatcctcctccatgtgggggcctcagcaatctgctgcctcctgctgtcaaggacagtagtggaaagggtgtggggcaagacacacaggtgctcagtggctctggggctgtgtaccgagtatgtgcaggaaccgccaccttccacctgctgcaggctgtgttgctggtccacctccactcccccaccagcccgcgggcacagctgcataatagcttctggctcctcaagctgctgttcctgttaggtctctgtgctattgccttctgcattcctgatgagcatctcttcccagcatggcattacattggcatctgtggaggctttgcattcatcctactgcagttggtgcttattacagcttttgcccattcctggaacaagaactgcaatgaggcctcctacctggctgaggtatttggacccctgtggattgtcaaggtttacagctatgagtttcagaagccctcactgtgtttctgctgccctgaaacagtggaggcagacaaagggcaaaggggtggggctgcgaggccagctgaccaagaaacccctccagctcctccagtccaagtccagcatcttttcctacaactattctgccttccacttcgtcttcttccttggctcactctatgtcatggttacccttaccaactggttcaggcttcagcaggatgtggatgcaaaccttttgccccttactcactga

SEQ ID NO: 129533 - DNA, 1025 bp, Homo sapiens
atggagcggcgcgggccgggggccgccacggcgaggggccgggccaggccgggcggagggccttctgtggggttactggctactggctcctctctaaaccccagtttccacggggtagctaggattgtccctggctttataaggatagccaggcctcgtgatggttcattcgcatatgagtctgtgccttggcaacaaagcgccactcagccggctggatcgctgtctgtggtcactactgtgtggggagttggcaacgcgacacagagccaggttttggggaaccccatgggccctgcagggagtccctctggcagctccatgatgcctggtgtggcagggggcagctccgccttgacctccccacagtgcctgggacagcaggcgtttgctgaaggcggcgccaacaagggctacgtgcagcaaggcgtgtacagccgcgggggctaccctggggcccccggcttcaccaccgggtatgcaggcggcccggggggcctgggcctcccctcacatgctgcaagaccctccactgacttcacgcaagcggcagctgctgcagctgtggctgctgcggcagccactgccaccgccacagccacagccaccgtggctgctctccaggagaagcagagccaggagctgagccagtatggagcgatgggggccggacagtcttttaacagccagtttctgcagcatggaggtccccgggggcctagtgtccccgctggcatgaaccctactggcataggaggggtaatgggcccctctggcctctcccccttggctatgaaccccacccgggcagcaggaatgacacccttgtatgcagggcagcgtctgccccaacatgggtatcctgggcctccccaggcccagccactgccccgacagggggtcaagagaacctactctgaggtgtatccagggcagcagtatctgcaaggagcctacccggtccattccgggctatcccagtttcccacttggcaggaaaccccacgccacccatgaacccccac

SEQ ID NO: 129534 - DNA, 585 bp, Homo sapiens
atgggagtgaagatgcttctggttcttcaaagtgagacaggaagaggaagaagaagaagaggaggaagaggaggaagaagaggaagaagaaggaggaggaggagggaagagaagaagaaggaggacgaggaggaggaggaggcggtggcagtggcggtggaggaggaggagggggaggaggagggggaggagggggaggaggagggggtggaggaggaagaagaaggaagaagaggaaggaagaagaagaaagaagaagaaagaagaaggaagaagaagaagaaagaagaaggaagaagaagaaagaagaagaagaacactgtttggtgggagctatattccaggctccatagctggttactccaagtgaagaaaatgcggcttcaagaggttgtgaggcttacgtggcaggatgagggaagtaaatcagggatttcttcttggtttggatgcattgctgggatgtggcttcctgagggccaagctgtagtgattgttatctctcttctggatctagccacccagcaagtctaccaggctccggattggtactggggattgtctgcacagaatcctgtgatgtga

SEQ ID NO: 129535 - DNA, 885 bp, Homo sapiens
atggacgccttccgcttccgcctgccgcttccgcctgccgcttccgcctgccgcttctgccgccgcttctgccgccgcttctgcctgcgcccccgcaaaaggactagcttttgctcctttggaagttttggtcgttcctggacgcaccattccctgacactggcgtctgtaaacaagaaagtgcagacagtgctgccagagacaggaggattttcacatgagactgaaaaagccgacacacccttacaactaagtcatggtcgagtcggacctgccatccacctccaccagtccctggaacccggcagccgccccgcccagggctcccggagcccggttccccccaacagccgcaccgcccagggctccccgaacccagctccccccaacagccaccccgcccagggctccccgaacccagctccccccaacagccaccccgcccagggctccccgaacgcagttccccccaaaagccaccccgcccagggctccccgaacccagttccccccaacagccaccccgcccagggctccccgaacccagctccccgccccacagccccccgccggacagggctccccgaacccagttcctccccacagccgccctgcccagggctccccgaacccagttcctccccacagctgccccacccagggctcccagaacccagttgccttggctgccttcctcctgcctggacggcttgggatagggtgccctgtgcctgtcctcaaggccgcacgagtccaccccggaaaggtgccacctcacatggtctcaaggtagctgctcaggccccacaaggtgcagaaccccagcgcgatctgcctgaacaaaaccccactgtggtgacggagcggcagagacgcctgctgtga

SEQ ID NO: 129536 - DNA, 440 bp, Homo sapiens
tggggccctggccaaggccagtggcctatctctcaaaacaactatacagggtttccaaaggctggcccccaggtctaagggccctagcagaaatggccctgttagcacaagaagcagataaactaacccttaggcaaaacccgaatataaaggcccccatgctgtggtaactttaatgactaccaaaggacatcattagttcacaaatgctagattaacctatgtgaaaatccccacataaccactgaagttcgcaacaccctaaaccccaccaccttgctcccggtatcagagagcccagtggaacataactgtgtagacgtgttagactcagtttattctagcaggcccaacctccgagaccatccttgaacatcagtagactgtgaacggtacgtggacaggagcagcttcaccaaccgctgcaaagtgacacgaaa

SEQ ID NO: 129537 - DNA, 368 bp, Homo sapiens
tgtcagagagcccagttgaacataactgtgtagaggtgttggactcagtttattctagcaggcccgacttccgagaccatccttggatgtcactagactgggagctgtacgtggacgggagcaactttgtcaactcacaaggagagaggtgtgtgggatatgcagtggtaaccctggatgctgtcattgaagccaaatcgttgccccagggcacttcagcccagaaggccgaactcattgctttaattcgggcctcagagctaagtgaaggtgatcgggtgtggatcaaggattggaacgtagcccccttgcggccatggtggaaaagaccccagaccatcatcttgaccactcctacagttgtaaag

SEQ ID NO: 129538 - DNA, 404 bp, Homo sapiens
  misc_feature (1)...(404): n = a,t,c or g
ttaatctacatctattcatccaaacagcaacaagcttntcatgagttaaaagaaaaacgtaggccccagccctggggctatcagacctgacaaaaccctttacaccctatgtgtcagaaagagaaaaaatgcagttggagttttaacccagactgtgggaccctggctaaggccagtggcctatctctcaaaacaactagacggggtttccaaagcctggcccccgtgtctaagggccctggcagcaacggccctgttagcacaagaagcagataaactaacccttggacaaaacctgaatataaaggccccccacgctgtggtaactttaatgactaccaaaggtcatcactggttaacaaatgctagattaaccaagtaacaaagcnngccccgtgaaaatc

SEQ ID NO: 129539 - DNA, 1713 bp, Homo sapiens
atgaggccaagagacatatggtcctgttctcctgaggctgcagtctacgcggagctgaaggatcccagccggcaccaaggacagcagcagcagcgtggtgactcctcgttcctgagctgctgtagtgagagggcagactccgcgagcagcggctacctggtcctcttggctctgcaccgctttctccccctggtaactgtgcactggggaaagggaaatgatcagacatttcggggactactggacactggctctgagctgatattgattccagggcacccaaaatgtcattgtggtcctccagttaaagtaggggcttatggaggtcagaagacagatgaatcttggagaatgtcagtggattatcgtaagcttaaccaagtggtgactccaattgcagctgctgtactagatgtggtttcattgctcgagcaaattaacacatcttctggtacctggtacgtggtcattgacttggcaagtgcctttttctccattcctgtccataaggcccgccagaagcaatttgcctgcagctggctgggacagcaatatacctttactgtcctaccccagaggtatatctattctctggctttgagtcataatcttattcggagagaccttgatcgctttttgcttccacaagatatcacattggtccattacattgatgacattatgctgattggatccagtgagcaagaagtagcaaatgcagtggacttattgaaagggatgtttgcaataagtcagaaagttgaggcatgtcgaagaattgtctgtgaaagtcgtgaaagaaaaaaaatgtgctataaaaagcaacttatgcaagaaatgctgtataatttcaaagtaattaggcctcctgaatgtaaaactattgaagaaacagtttatatgcaagagagcccagttgaacataactgtgtagaggtgttggactcagtttattctagcaggcccgacctccgagaccatctttggacatcagtagactgggagctgtacgtggacgggagcagcttcatcaacccacaaggagagaggtgtgcgggatatgcggtggtaatcctggatgctgtcattgaagccaaatcattgccccagggcacttcagcccagaaggccgaactcattgctttaatttgggccttagagctgagtgaaggtccaaccgtcctgtctggcatacaagcttatggagaagccccctttgaagatctcaatatagacttcaccaagatgcccaaatgtggcagtaacaagtatttgctagttccagtgtgtacatactctgggtgggtggaggcctatccaacacgaaccaagaaagctcgtgttcttctccgagatctcatcgctaggtttggactgcccttatggatcggctcagaaaatgggccggcgtttgtggctgacttggtacagaagacagcaaaggtgatgagtgtggatcaaagactggaacgtagcccccttgcagccacggtggaaaggaccccagactgtcatcttgaccactcccacagctgtgaaggtagagggaatcccagcctgggtccaccacagctgcgtaaaacctgcagcaccggagacctggtaggtgagaccaagcctagacaacccctgcaaagtgactctgaagaagtcgacaagccctgctccagtcacacccggaagccgactggtccactcatggccgaagcatga

SEQ ID NO: 129540 - DNA, 1015 bp, Homo sapiens
  misc_feature (1)...(1015): n = a,t,c or g
ccatctatttagatgcaactgaagccccgcaaggagtcccagatcaatttaaagcttgaaatcaaatagttacaggatttaagtcaatattttggtagatgacagtcaataaaaatgtagattagataaactacatctattacaaccaacagcaacgagcttttcatgagttaaaaagaaaaactcatgtcggccccagccctgaggctacctgacctgacaaaactctttacgctctatgtgtcagaaagagaaaaaaatggcagctggagttttaacccatacttgtgaggccctggccaaggccagtggcctatctctcaaaacaactagacaggatttccaaaggctggcccccaggtctaagggccctagcagcaacagccctgttagcacaagaagcagataaactaacccttaggcaaaacctgaatataaagacccccccatgctgtggtaactttgatgaataccaaaggacatcattggctaacaaatgctagattaaccaagtaccaaagcttgctatgtgaaaatccccacataaccactgaagtttgcaacaccctaaaccccaccaccttgctcctggtatcagagagcctagttgaacataactgtgtagaggtgttggactcagtttattctagcaggctcaacctccgagaccatccttgaacatcagtagactggtagctgcacgtggacgggagcagcttcaccaacccctgcaaagtgactctgaagaagatgacaagcgctgctccagtcacacccagaagctgactgggtccacggcacagccgaagcatggagggaaacttcattcatggggacttcatttttccttaaaatttgggatttgttacagtaagggatttcaacttgaccttttcccaggattgagggattgtttcccagttattattacgttcaagttcaattgcgggtagggacaaaaggttggttacagtttntattatttttatgggttattattaagtgttaccngggg

SEQ ID NO: 129541 - DNA, 729 bp, Homo sapiens
  misc_feature (1)...(729): n = a,t,c or g
tttcgtggggtgggggaggaggcctttactttgaaaccacatctgctaaagtgctctgggcaactggccagtcagccagggggcagggcactaaagtctgggctttcccaaagccagcggaggcaggagtgagaggaagggctggccagggctctatgcattgggctctgtgcatagtgtgggcttcctgggccccagaaaagcccgccgaggccaaggcagaaaggactacagcaggaggaacacatctcaaagtgcctgttagagttggctcgaagcacagtgaatcactttgcagacatagggagggctccgtgggtcccggggcccccctcgggtggtgtgccacccagcccagcctctcctgcccctgcagcttcggctggagagttgcgggctggtggcggcggtgcgtcctcactcggggggcttggcaatgcctttaccaaatgccactcgacctgcctccgggaggagcgaggatccgagctgaagctcgctttggaacatggtcatcgatctgagagccagagaggctgaagctggattcgtgaaggtccctcatgcccccatgccgggtgacgggccgggtaggagtgtctgcgagtggggttcccatctcttttttcccagggtgctcgtcaacagcgacatcccccaggtagggagtgcggtccactcctctaccctttaaagtctgcncgntgtcctctacccgggacgccctcg

SEQ ID NO: 129542 - DNA, 2249 bp, Homo sapiens
atggtgaagtttggtttcctcctgtcctttgtttctaacagctggaagctgaagccactcatcgtgttatcaccattgcaaacagggctgggcttcccggtgggctctggtgctggaggctgttctctgcctccccgtatcatgcagttcctgcaaccttgccctgactgccagccctgcattctccgcttaaggactgtcaccttgaggactcactgtccaatctacctggtcaacgtgtccagtatctcggctggtgacgttatcgcagctgctaagatgcaagccctgctacggccctccctgtcctaccacaaccgttctcttgaagctgctcacagcaactgcctgtccagaaaacagtctagactgctctttagcgtggcattcgtggccctgcatgcctgttcacccaccgtcaagctccatctgccaacagcaccctgcacacaccagtgctctgggaaggttgtgctggcggaacccaccgctgcactatgccacgctgacaggcttacactactaccaccaggactggtcccacgcggctgcgtacgtcacggtgcctcccctgagggtggacgcctaacacctcaacctacctcatgagcctgctggccaatgacactctgaacatcgtggcatcagatcaccggcctttcaccacaaagcagaaagctatgggcaaggaagacttcaccaagatcccacatggagtgagtggcgtgcaggaccgcatgagcgtcatctgggagagaggagtggttggaggaaagatggatgagaaccgttttgtggccgttaccagttccaacgcagctaagcttctgaacctgtatccccgcaagggccgcattattcccggagccgatgctgatgtggtggtgtgggacccagaagccacaaagaccatctcagccagcacgcaggtccagggaggagacttcaacctgtatgagaacatgcgctgccacggcgtgcctctggtcaccatcagccgggggcgaagtcgtgaatgagaacggcgtcttcatgtgcgccgagggcaccggcaagttctgtcccctgaggtccttcccagacactgtctacaagaagctggtccagagagagaaggatgcacgaacaagtcaaaccagactactggcgcaaccagacgtgcaaaacaaaacgatttacacgcgcctggcaccagcttcgagcccgcccagctacccttctggggcatgtgaccccccggggtggttggcgggcgcaaggagacgctggccaagggggcaccaggagttccaggcagaccgtattgcttggccttacaacgaggccagagggttgggtttggcggatattaggaagttctgcggcatgactggggaagcttcggctggagagttgcgggctggtggcggcggtgcgtcctcactcggggggcttggcaatgcctttaccaaatgccactcgacctgcctccgggaggagcgaggatccgagctgaagctcgctttggaacatggtcatcgatctgagagcctgcagggaaggaagcacagaggggtgcacgacaacagcgacatcccccaggcagcactcgtcggaggcaccaccatgatcatcggccacgtcctgcccgacaaggagacctcccttgtggacgcttatgagaagtgccgaggtctggccgaccccaaggtctgctgtgattacgccctccacgtggggatcacctggtgggcacccaaggtgaaagcagaaatggagacactggtgagggagaagggtgtcaactcgttccagatgttcatgacctacaaggacctgtacatgcttcgagacagtgagctgtaccaagtgttgcacgcttgcaaggacattggggcaatcgcccgcgtccatgctgaaaatggggagcttgtggccgagggtgctaaggaggcactggatttggggatcacaggcccagaaggaatcgagatcagccgtccagaggagctggaagctgaagccactcatcgtgttatcaccattgcaaacaggactcactgtccaatctacctggtcaacgtgtccagtatctcggctggtgacgttatcgcagctgctaagatgcaagggaaggttgtgctggcggagaccaccactgcacatgccacgctgacaggcttacactactaccaccaggactggtcccacgcggctgcctatgtcacggtgcctcccctgagactgggaattccgccacactgaatagt

SEQ ID NO: 129543 - DNA, 600 bp, Homo sapiens
tcagcctccaagccccgtgacagcaccagccaagtggtctggatgcaggggtgacacggaggcggggctgccctttggctcgtcccccagtgggagcaacgcgaggatcagtgtgagaatctgggcctgtgtgctggtccctcggtcacgcgccacttcaaggacgagaggggagacttcagggcagccaatgtacatgtgctcagatcctccgggaatgccatctccaagcacaaagggctctggagctggaaggagaggccttctggaaacatcagtcatgacaggcagcggagtcactactgagtcagcagaagggcaagctctgggtcccctgtgccgctgggctctcttcatcttcagcactctgcacccgcgcgtcggcggcgccgaagccccgctccccgcctgcgcgtctgtctcgtccgcatctccgcggtgagtcggcggcgccctcgcccctgagcccagggccagcttctctcgccgccgcggctgctgcgcgcgtccccgcccagcccagcccagccccgagcacgaccccagccccacgcacgaccctagccccgcgagtcccgcaccgactcgctcccgccccat

SEQ ID NO: 129544 - DNA, 222 bp, Homo sapiens
ccaggttgtgggagcacaggagtgtttctgctggtgcatcaggctggggtctgtcctcaccgggatgtctcctcctccacccctctcttccagaggaggagcgagtggacattctaatcaacaacgcgggtgtgatgcggtgcccccactggaccaccgaggacggcttcgagatgcagtttggcgttaaccacctgggtgaggcctgggcaggggctgcac

SEQ ID NO: 129545 - DNA, 1131 bp, Homo sapiens
atgactgggagccgcacctggggcgctgatcgaggacatctgcggggactggggaagaagaagccggtgcccgtcctcctggggagtttgctgaacaggccggttcccgcagggcgcacactgcggggcgcgctgcggacgctgagcctcctggccgcgcagggcctgtggcgcagacgtccgtgcttcaccgagaggatctggaaaggctcgggcttccagcagttctcactgccctgttctacaccctggagaaggaggaggaagaggataggacggccacacctgggacattggggacgtacagaagctgctttccggagtgaaagactcaggaaccccgacctgatccaagcaggctactactcctttgcctcgctaacgagaagagagccaaggagttggaggccacttttggctgcggatgtcaccggacatcaaacaggaattgctgcgatgcgacataagttgaagggtggacattcaacggtgacagacctgcaggagctcctcggctgtccactgtcgaaacctgcagaaaatgtcactgcaggtaataaggagaatctcccggagaatgtcactgcgtctgaatcagacgccgaggacaccagtcattggattagggctcaccctaatgaccgcatcctgactggccacttcggcacagaccctgtttccggcacaggccacattcacaggtgtgggagcacaggagtgtttctgctggtgcatcaggctgggaggaggagcgagggacattctaatcaacaacgcgggtgtgatgcggtgcccccactggaccccgaggacggcttcgagatgcagtttggcgttaaccacctggactttgacgacttgaactggcagacgaggaagtataacccaaagccgcctactgccagagcaagctcgccatcgtcctcttcaccaagagctgagccggcggctgcaaggctctggtgtgactgtcaacgccctgcaccccggcgtgccaggacagagctgggcagacacacgggcatccatggctccaccttctcagcaccacactcgtgcctctcacctacccgacaacagtgccgctctttcttgatccccaagggcacagcaggggctcagtatgaatga

SEQ ID NO: 129546 - DNA, 801 bp, Homo sapiens
ttattctgattttgtttttccaaactgcttctcctcttgggaagtgtaaggaagctgcagcaccaggatcagtgaaacgcaccagacagccgcgtcagagcagctcaggttcaggctctgcgccggcttctctgactctggggccttccctgcagccttctctgcctccttcaggtctgtaagagtcacaccttgtgcagctagcgccgcctggcacttgcggcatagggtgactccaggtgaactgcgcatctgcgatggttgaagcgtgacatatacggccaggtcagcattctcagggtagggatcaaaaatgtttgttggagctgtgcgatgtacacataagaaaatagcgtggtgaacaaagggtatcacaggacctcggtcagatccaagttgcgtaggatcatcagatttctggattgtcatctgctgcaccagtaaggaaacatggtacgctttatggagattcgacgggatattacggggtttattaacgccgatgaccgtcttcccagggatggtggccttgctggggcaagccccaccggtgacatagtcccgtctttcattgctcatacggaactccggatgagcattcatcaggcgggcaagaatgttaataaagcccggatacaacttgtgcttatttttctttacggtctttaaaaaggccgtaatatccagctgaacggtctggttataggtacattgagcaactgactgacatgcctcaaaatgttctttacgatgccattgggatatatcaacggtggtatatccagtgatttttttctccat

SEQ ID NO: 129547 - DNA, 556 bp, Homo sapiens
cggagctacccaggcggctggtgtgcagcaagctccgcgccgaccccggacgcctgacgcctgacgcctgtgcccggcccggcatgagccgctacctgctgccgctgtcggcgctgggcacggtagcaggcgccgccgtgctgctcaaggactatgtcaccggtggggcttgccccagcaaggccaccatccctgggaagacggtcatcgtgacgggcgccaacacaggcatcgggaagcagaccgccttggaactggccaggagaggaggcaacatcatcctggcctgccgagacatggagaagtgtgaggcggcagcaaaaggacatccgcggggagaccctcaatcaccatgtcaacgcccggcacctggacttggcttccctcaagtctatccgagagtttgcagcaaagattattgaagaggaggagcgagtggacattctaatcaacaacgcgggtgtgatgcggtgcccccactggaccaccgaagacggctttgagatgcagtttggcgttaaccacctgggtcactttctcttgacaacttggtgct

SEQ ID NO: 129548 - DNA, 639 bp, Homo sapiens
tttcgtgtgagcggagcgcctgggcggcggcggcggcggcgtgatggctccggccgcggaccgagagggttactggggccccacgacctccacgctggactggtgcgaggagaactactccgtgacctggtacatcgccgagttctggaatacagtgagtaacctgatcatgattatacctccaatgttcggtgcaattcagagtgttagagacggtctggaaaaacggtacattgcttcttatttagcactcacagtggtaggaatgggatcctggtgcttccacatgactctgaaatatgaaatgcagctattggatgaactcccaatgatatacagctgttgcatatttgtgtactgcatgtttgaatgtttcaagatcaagaactcagtaaactaccatctgctttttaccttagttctattcagtttaatagtaaccacagtttaccttaaggtaaaagagccgatattccatcaggtcatgtatggaatgttggtctttacattagtacttcgatctatttatattggtacatgggtttatcccatggcttagaggcctggggtatacatcattgggtatatttttaatggggatttttaatttgggatataggtaacatattttggtgaggc

SEQ ID NO: 129549 - DNA, 312 bp, Homo sapiens
atggctccggccgcggaccgagagggctactggggccccacgacctccacgctggactggtgcgaggagaactactccgtgacctggtacatcgccgagttctacgtggctcatgtctggcttcctcccaacgccctcatccttgagggacctgacagcttccagatgggtgcggtcactgcctccttcccggagtccagcaggcaggcagcccggcccagcggaggagctgcccaaggcctctccctgcccctgggggaagtccctctcacgtcctttcgcgtccttctctgcgtcgtccgggccctctga

SEQ ID NO: 129550 - DNA, 1608 bp, Homo sapiens
atggcagctcccgcatccaccagcagcaccgtccgctcgacagatactgcgggcctgtcagttatcgagtgtgaccgctgtggcccagagttgtctctatgggaagcagctctgtggttgactactggcaacattgctggagctggccttttgttttttggtggaggtattggtggcactatcctatatgccaaatgggcttcccatttccgagaaagagtagagaaaaccataccttactcagacaaactcttcgaggtggttcttggttctgcaccttataatgttccattgccaaagaaatcaactcagtctggtccactaaaaatctctagtgtatcagaagtaacaaaagaatttaaacagcctgcctcacaactccaaaaacaaaagggagatactccagcttcagcaaccgcaggtgatacagtgttggtccctggggttcagcatgaggaatctttaaaaactgatcaccctgcaattgatgaaggaaaacccacacctgcactttcagaagaagcatcctcatcttctataagggaacgaccatgtgaagaaattgcagcttgccttgcacaagaggaaaaacaagaacaagttaaaactgagtctctagccaagagctttgaagatgctctgaggcaaactgcaaatgtcactctgcaggcgattgcagctcagaacactgtggtccaggctgtcaatgcacactccaacatattgaaagccgccatggacaattctgagattgagggcaagaagaagtctgctaagtggcacacagtgcaaggtgcgttgaaggaacacagaaaggcagtagatgaagctgccaatgcccttctcaaagccaaagaagaggtccaagcagctcaatttgagtctaagcttgtatctcagtatcatgagctggtgggccaagctcaggatgactttaaacgacagctggacagtattactccagaagtccttcctgggtggaaaggaatgagcgtttcggacccagctgacaagctctctactgatgatctgaactccctgattgcccgtgcacatcgtcacatcgatcagctgaacagagagctagcagaacagaaggccacagaaaagcagcacatcacattagccttggagaaacaaacgctggaagaaaaggttcaagaacaggaattgaagtatgaatttgagcagaacctgtctgagaaactctcggaacaagaattacagtttcatcatctaagtcaagagcaagttcacaactttactctggatataaataccgcctatgccagactcagaggaatcgaacacgctgttcagagtcatgcagttgctgaagaggaagccagaaaagcctaccaactctggctttcagtggaggcattaaagtacagcatgaagacctcatctgcagaaatgcctgctgtcccactgggtagtgcagttgaggccatcaaagccaactgttctgataatgaatttactaaagctttagccacagctatccctccagagtccctgacccatggggtgtacagtgaagagacccttagagtccgcttttatgctgttcaaaaactggcccgaagggtagcaatgattgattaa

SEQ ID NO: 129551 - DNA, 2755 bp, Homo sapiens
acgcgggcacgcacacacggaagcacgcctccacttaactcgcgccgccgcggcagctctgagtccaccagcagcgccgtccgcttgaccgaaatgctgctttttctgtcttttatcgggggagaccgccgccgcccagagttgtctctgtgggaaggttgtcctccgtccattgcgaccatgccgcagatactctacttcaggcagctctgggttgactactggcaaaattgctggagctggccttttgtttgttggtggaggtattggtggcactatcctatatgccaaatgggattcccatttccgggaaagtgtagagaaaaccataccttactcagacaaactcttcgagatggttcttggtcctgcagcttataatgttccattgccaaagaaatcaattcagtcgggtccactataaatctctagtgtatcagaagtaatggaaagaatctaacaggcctgcctcacaaactccaaaaacaaaaaaggagatactccagcttcagcaacagcacctacagaagcggctcaaattatttctgcagcaggtgataccctgtcggtcccagcccctgcagttcagcctgaggaatctttaaaaactgatcaccctgaaattggtgaaggaaaacccacacctgcactttcagaagaagcatcctcatcttctataagggagcgaccacctgaagaagttgcagctcgccttgcacaacaggaaaaacaagaacaagttaaaattgagtctctagccaagagcttagaagatgctctgaggcaaactgcaagtgtcactctgcaggctattgcagctcagaatgctgcggtccaggctgtcaatgcacactccaacatattgaaagccgccatggacaattctgagattgcaggcgagaagaaatctgctcagtggcgcacagtggagggtgcattgaaggaacgcagaaaggcagtagatgaagctgccgatgcccttctcaaagccaagtaattactcatggactttaacaaagaagagttagagaagatgaaaagtgtgattgaaaatgcaaagaaaaaagaggttgctggggccaagcctcatataactgctgcagagggtaaacttcacaacatgatagttgatctggataatgtggtcaaaaaggtccaagcagctcagtctgaggctaaggttgtatctcagtatcatgagctggtggtccaagctcgggatgactttaaacgagagctggacagtattactccagaagtccttcctggatggaaaggaatgagtgtttcagacttagctgacaagctctctactgatgatctgaactccctcattgctcatgcacatcgtcgtattgatcagctgaacagagagctggcagaacagaaggccaccgaaaagcagcacatcacgttagccttgggagaaacaaaagctgggaagaaaagcgggcatttggactctgcagtagcaaaagcatttaggaacattcacaggaagttgaaatacagggcttgaacaggacagaaaagatagaaggaagtcagagatgccatggaataatgaaatgagaacccagcttcgccgacaggcagctgcccacactgatcacttgcgagatgtccttagggtacaagaacaggaattgaagtctgaatttgagcagaacctgtctgagaaactctctgaacaagaattacaatttcgtcgtctcagtcaagagcaagttgacaactttactcctggatataaatactgcctatgccagactcagaggaatcgaacaggctgttcagagccatgcagttgctgaagaggaagccagaaaagcccaccaactctggctttcagtggaggcattaaagtacagcatgaagacctcatctgcagaaaccacttcttatcccgctgggtagtgcggttggaggccattcaaagccaactgttctgataatgaattcacccaagctttaaccgcagctattccctccagagtccctgacccgtggggtggtaacagtgaagagacccttaggagcccgttttctatgctgttcaaaaactgggcccgaagggtagcaatgattgatgaaaccagaaatagcttgtaccagtacttcctctcctacctacagtccctgctcctattcccacctcagcaactgaagccgcccccagagctctgccctgaggatataaacacatttaaattactgtcatatgcttcctattgcattgagcatggtgatctggagctagcagcaaagtttgtcaatcagctgaagggggaatccagacgagtgggcacaggactggctgaaggaagcccgtaattgaccctagaaacgaaacagatagttgggaaatcctgacagcatatgccagcgccgtaggaataggaaccactcaggtgcaggccagagtgaggtttaggaaggttttcaataagtcatttttcatgtcaaaggaaatcagcagtgatagatgaagggttcgcagcgagagtcccggacttgtctagaaatgagcaggtttacaagtactgttctaaatgttaacacctgttgcatttatattctttccatttgctatcatgtcagtgaacgccaggagtgctttctttgcaacttgtgtaacattttctgttttttcaggttttactgatgaggcttgtgaggccaatcaaaataatgtttgtgatctctactactgttgattttgccctcggagcaaactgaataaagcaacaagatg

SEQ ID NO: 129552 - DNA, 1215 bp, Homo sapiens
atgcctaaaaagagacaagcactggtggagtttgaagatgtgttgggggcttgcaacgcagtgaactacgcagccgacaaccaaatatacattgctggtcacccagcttttgtcaactactctaccagccagaagatctcccgccctggggactcggatgactcccggagcgtgaacagtgtgcttctctttaccatcctgaaccccatttattcgatcaccacgcctacacgcttgaatgtgttcaagaatgatcaggatacttgggactacacaaaccccaatctcagtggacaaggtgaccctggcagcaaccccaacaaacgccagaggcagccccctctcctgggagatcaccccgcagaatatggagggccccacggtgggtaccacagccattaccatgatgagggctacgggccccccccacctcactacgaagggagaaggatgggtccaccagtgggggagtatggccctcacgccgacagccctgtgatcatggtctatggcttggatcaatctaagatgaactgtgaccgagtcttcaatgtcttctgcttatatggcaatgtggagaaggtgaaaatttccttgaaaaagcaaagcccggggggccgtccaatgggtgaagaatggcttgaatggctacgctgtagaccgggccattacccacctcaacaacaacttcatgtttgggcagaagctgaatgtctggtaggtgctcaggctcgggagggcagcagaggtacaggggagagaaaaggaggggaatggggcccagcagaggagcacagtgaggccgaggtgttgactcacacagaaatgggatgtggcagtgtctccaagcagccagccatcatgcctggtcagtcatacgggttggaagacgggtcttgcagttacaaagacttcagtgaatcccggaacaatcggttctccaccccagagcaggcagccaagaaccgcatccagcaccccagcaacgtgctgcacttcttcaacgccccgctggaggtgaccgaggagaacttctttgagatctgcgatgagctgggagtgaagcggccatcttctgtgaaagtattctcaggcaaaagtgagcgcagctcctctggactgctggagtgggaatccaagagcgatgccctggagactctgggcttcctgaaccattaccagatgaaaaacccaagcatcaacctggtgacctaa

SEQ ID NO: 129553 - DNA, 648 bp, Homo sapiens; identical to SEQ ID NO: 128409

SEQ ID NO: 129554 - DNA, 677 bp, Homo sapiens; identical to SEQ ID NO: 128408

SEQ ID NO: 129555 - DNA, 2040 bp, Homo sapiens
ggacgagcagcggaggcggtcgggagcgatggtgaagatggcggcggcgggcggcggaggcggcggtggccgctactacggcggcggcagtgagggcggccgggcccctaagcggctcaagactgacaacgccggcgaccagcacggaggcggcggcggtggcggtggaggagccggggcggcgggcggcggcggcggtggggagaactacgatgacccgcacaaaacccctgcctccccagttgtccacatcaggggcctgattgacggtgtggtggaagcagaccttgtggaggccttgcaggagtttggacccatcagctatgtggtggtaatgcctaaaaagagacaattctctggtttagtttgaagatgtgttgggggctggcaacgcagtgagactacgcagccgacaaccaaatatacattgctggtcacccagcttcttgtcaactactctaccagccagaagatctcccgccctggggactcggatgactcccggaagcgtgaacaagtgtgcttctctttaccatcctgaaccccatttattcgatcaccacggatgttctttacactatcctgtaatccttgtggccctgtccagagaattgtcattttcaggaagaatggagttcaggcgatggtggaatttgactcagttcaaagtgcccagcgggccaaggcctctctcaatggggctgatatctattctggctgttgcactctgaagatcgaatacgcaaagcctacacgcttgaatgtgttcaagaatgatcaggatacttgggactacacaaaccccagatctcagtggacaaggtgaccctggcagcaaccccaacaaacgccagaggcagccccctctcctgggagatcaccccgcagaatatggagggccccacggtgggtaccacagccattaccatgatgagggctacgggccccccccacctcactacgaagggagaaggatgggtccaccagtggggggtcaccgtcggggcccaagtcgctacggcccccagtatgggcaccccccaccccctcccccaccacccgagtatggccctcacgccgacagccctgtgctcatggtctatggcttggatcaatctaagatgaacggtgaccgagtcttcaatgtcttctgcttatatggcaatgtggagaaggtgaaattcatgaaaagcaagccgggggccgccatggtggagatggctgatggctacgctgtagaccgggccattacccacctcaacaacaacttcatgtttgggcagaagctgaatgtctgtgtctccaagcagccagccatcatgcctggtcagtcatacgggttggaagacgggtcttgcagttacaaagacttcagtgaatcccggaacaatcggttctccaccccagagcaggcagccaagaaccgcatccagcaccccagcaacgtgctgcacttcttcaacgccccgctggaggtgaccgaggagaacttctttgagatctgcgatgagctgggagtgaagcggccatcttctgtgaaagtattctcaggcaaaagtgagcgcagctcctctggactgctggagtgggaatccaagagcgatgccctggagactctgggcttcctgaaccattaccagatgaaaaacccaaatggtccatacccttacactctgaagttgtgtttctccactgctcagcacgcctcctaattaggtgcctaggaagagtcccatctgagcaggaagacatttctctttcctttatgccattttttgtttttgttatttgcaaaagatcttgtattcctttttttttttttttttttttaaatgctaggtttgtagaggcttacttaaccttaatggaaacgctggaaatctgcagggggagggagaggggaactgttatctcccaagattaaccttcacttttaaaaaattattgtacatgtgatttttttttttcctgttcatacatttgtgctgcccatgtactcttggcacatttcaataaaattgtttggaaaataaacacagc

SEQ ID NO: 129556 - DNA, 528 bp, Homo sapiens
aatcaccaaattagaaatgacttcacaatcagccccggagtcaaagccgattctcggaccagtcccatcccacagcagcctgcctcctctttcgacatcacagaggctgctgtgtccttcgccaaggactccctggcaggtggagtggccgcagccatctccaagatggcggtagcacccatcgagcgggtcaagctgttcccaaggagcacggagtcctgtcctggtgcggtaacctggccagtgtcatcagatacttcccccacccaggctcttaacttcaccttcaaagataaatacaagcagatcttcctggatggtgtggacaagagatcccagttttggcgctactttgcagggaatctggcatcaggcggtgccactggggccacatccttgtgttttgtgtaccctcttgattttgcccatactcgtgtagcagctgatgtgggcaaagctggagctgaaagggaattgcgaggtttcggtgactgcctagttaagatctacaaatctgacgggattaag

SEQ ID NO: 129557 - DNA, 1455 bp, Homo sapiens
atgggacatctaatgtccctgatcattagggatccctccctctctctatgcgatcatgtaaatccagaaaacctgccccagagtcaaagccggttgccgaccctgtcccgtcccgcagtagcctgcctcctctttcctttcaacatgatagatgtcactgtgtcctttgccaaggacttcctgggagatggagtggccacagccatcttcaagatagcggtagcacccaccgtccaggtcaagctgctgatgcaggctctcaacttcgccttcaaagataaatacaagcagatcttcctgggtggggtggacaagaggacccagttttggctctactttgcagggaatctgacatcaggctgtgccgctggggccacatccttgtgttttgtgtaccctcttgattttgcccatactcgtctagcagccgatgttattatcatctaccgagctgcctacttcggtatctatgacactagaaatggaatgcttccggatcccaagaacactcacattgtcatcagctggatgatcgcacagactgtcagggctgttgctggattggcttcctatccacttgacacagttcgcccccgcatgatgatgcagtcagggtgcaaaggaactgacctcatgtacacaggcatgcttgactgctggaggaagattgctagtgatgaagggggcaaagcttttctcaagggtgcatggtccagtgttctcagaggcacagtccagattatcaagatgggagaatgtatgggaactatgagcagacactcagaaatagagacatcttttcctgaagcgaggagagcagaatgggaccaccaggatactcagctgatgaagaagctcatggctgtgcaagctcagcacaggccatttactgaggatccttccacacttaactccacagcagcccctctcccggacccctacttctgcagggggcagtatctagttctggcagagagctttttcagtcccattcagaagatctggaattcttgtccttcctccaggaaaaatgccattcctggacaactggaggcatgcagggtgtccatgccaagaggtgccctcaaccgccctccctgctccttactcccatcccacactcctcggcacccaaagtccagagggggccaagatggcagggggctgctccgcaaaacatgcagccattgctatgccctccctgctgcagcaggtgtctccacagcagctgctccagatgggccaccaccaccatcagtacctactgtagacaatgtctgtgttcttgctgtgtcttcacatgatcgtccctctgtctatgtctgtgtcctaaccccctcttcttataaggacacaggtcatactgaattagggtccacctcaatgacctcgtttagacctaattacatctttaaagaccctatctacaaatacagtcacattccgaggtactaa

SEQ ID NO: 129558 - DNA, 1251 bp, Homo sapiens
ccgcagcgccggagtcaaagccggttcccggcccagtcccgtcctgcagcagtctgcctcctctttcaacatgacagatgccgctgtgtccttcgccaaggacttcctggcaggtggagtggccgcagccatctccaagacggcggtagcgcccatcgagcgggtcaagcttcttgctgcaggtgcagcaatgccagcaagcagatcgctgcagataagcaatacaaaggcattataggctgcgtggtccgtattcccaaggagcagggagttctgtctttctggcgcggtaacctggccaatgtcatcagatacttccccacccaggctcttaacttcgccttcaaagataaatacaagcagatcttcctgggtggtgtggacaagagaaccccagttttggcgctactttgcaaggaatctggcatcgggtggggccgcaggggccacatccctgtgttttgtgtaccctcttgattttgcccgtacccgtctagcagctgatgtgggtaaagctggagctgaaagggaattccgaggcctcggtgactgcctggttaagatctacaaatctgatgggattaagggcctgtaccaaggctttaacgtgtctgtgcagggtattatcatctaccgagccgcctacttcggtatctatggacactgcaaaggggaatgcttccggatcccaaggaacactcacatcgtcattcagctgggatgatcgcacagactgttcactgctgttgcccgggttgacttccctatccatttgacacccgttcggccgccggaatgaatgaatgcagtcagggcgcaaaaggaacttgacatcatgtacacaggcacgctttgactgctggcggaagattgctcgtgatgaaggaggcaaagcttttttcaagggtgcatggtccaatgtttctcagaggcatgggtggtgcttttggtgcttgtcttgtatgaatgaaaatccaagaagtacacataagttatttcctaggatttttccccctgtgaacaggcatgttgtattctataacacaatcttgagcattcttgacagactcctggctgtcagtttctcagtggcaactactttactggttgaaaatgggaagcaataatattcatctgaccagttttcctctaaagccatttccatgatgatgatgatgggactcaattgtattttttatttcagtcactcctgataaataacaaatttggagaaataaaaatatctaaaat

SEQ ID NO: 129559 - DNA, 613 bp, Homo sapiens
atggggaaaaaacagagcagaaaaaccggaaactctaaaaatcagagcacctctcctcctccaaagcaacgcagctcctcaccagcaacggaacaaagctggatggagaatgactttgacgagttgagagaagaaggcttcagaacatcaaactactccgagctaaaggaggaagttcgaacccatggtaaaaaagttaaaaactttgaaaaaaaattagatgaatggctaaccagaataagcaatgcagagaagtccttaaatgacctgatggagctgaaaaccacggcacgagaactatgtgacgaatgcacaagcctcagtagccgatgcaatcaactggaagaaagggtatcagcaatggaagacgaagtgaatgaaatgaatgtatctgaaagtgatggggagaatggaaccaagttggaaaacactctgcaggatattatccaggagaacttccccaatctagcaaggcaggccaacattcaaattcaggaaatacagacaacgacagaaagatactcctcaagaagagcaactccaagacacataattgtcagattcaccaaaattgaaatgaaggaaaatatgttaagggcagccagagagaaag

SEQ ID NO: 129560 - DNA, 1698 bp, Homo sapiens; identical to SEQ ID NO: 117839

SEQ ID NO: 129561 - DNA, 723 bp, Homo sapiens; identical to SEQ ID NO: 125744

SEQ ID NO: 129562 - DNA, 3159 bp, Homo sapiens
atgcaggaacaacagcaagcctccagcctgatcaggagcggcaatgggcgcctccctggatcaggagcacagcggacaccctgccatatccggagggatggaagtcagcggcgggtctgcgatgactgcaaacagcagtggtggaaggcaaaatacaacataccatctggcttgcatgcttgcactgcgactctagaagaaacccatattttagactcgggggcacatgtgcaagttttttacaagggtcaactgcatgtcatgagagttccatgtacagattattttgacacccagaagaaccccaacttgtcacacttacatggatctgtcatggcggaaacagcggttatcaatcacaagaaacgtaaaaatagcccgcgaatcgtccagtcaaacgacctcactgaggcggcatatagtctctcccgggatcaaaaacgtatgctgtatctgttcgttgaccagatcagaaaatctgatggcaccctacaggaacatgacggtatctgcgagatccatgttgctaaatatgctgaaatattcggattgacctctgcggaagccagtaaggatatacggcaggcattgaagagtttcgcggggaaggaagtggttttttatcgccctgaagaggatgccggcgatgaaaaaggctatgaatcttttccttggtttatcaaacgtgcgcacagtccatccagagggctttacagtgtacatatcaacccatatctcattcccttctttatcgggttacagaaccggtttacgcagtttcggcttagtgaaacaaaagaaatcaccaatccgtatgccatgcgtttatacgaatccctgtgtcagtatcgtaagcccgatggctcaagcatcgtctctctgaaaatcgactgggacatagaaccgtaccccgctggcctaaaagagcagattaagtctgatgttttcttgttaagttcctgtgtggaagttctccccaatgctgaaattgggttcttaaaatgtctagctattattggattatgggctgtttctctcttcagctacaataattgctttatatgtacaccggcgttcggtcgaagagtatctggtgtcatagaaattgccgatgggagtcgccgtcgtaaagctgctgcacttaccgaaagtgattatcgtgttctggttggcgagctggatgatgagcagatggctgcattatccagattgggtaacgattatcgcccaacaagtgcttatgaacgtggtcagcgttatgcaagccgattgcagaatgaatttgctggaaatatttctgcgctggctgatgcggaaaatatttcacgtaagattattacccgctgtatcaacaccgccaaattgcctaaatcagttgttgctcttttttctcaccccggtgaactatctgcccggtcaggtgatgcacttcaaaaagcctttacagataaagaggaattacttaagcagcaggcatctaaccttcatgagcagaaaaaagctggggccataaacacacaactggttgaaaccctgctctctgactctagaagaatccccgacttcatgtctaaaacaccaaaagcaatggtaacaaaagctaaaattgacaaatgggatctaattaaactaaagagcttctgcacagcaaaagaaactaccatcagagtgaacaggcaacctacagaatgggagaaaattttcgcaacctactcgtctgacaaagggctaatatccagaatctacaaagaactcaaacaaagttacaggaaaaaaacaaccctgtcaacaagtggtggccatgagaagtggagacgaaatctgaaactcaatgttgctctgctgatatggttttgctgtgaccccacccaaatttcatttttaattgtagctgccaaaattcccatgtcatgtgagggatctggtgggagaagaaaccccatgataaccaggcaaacaggatctggagtggacctccagcaaactccagcagacctgcagaagagggactttactggtagaaggaaaactaacaaacagaaaggaatagcaccaacatcaacaaaaattacgtccacatggaaacctcatccaaaggattgcaactcctcaccagcaagggaacaaaactggatggagaatgagtttgacaaattgacagaagtaggcttcagaaggtggacaataacaaactcctccaagctaaaggagcgtgttctaacccaatgcaaggaagcaacgaaccttgcaaaaaggttagagaaattgctaactagaataaccagtttagaaaagaacaaaaatgacctgatggagctgaaaaacacagcacaagaacttcgtgaagcatacaccagtatcagcggccgaatcaatcaagcagaacaaaggacatcagagattgaagatcaacttaatgaaataaagcgcagaggcgtctccgtgtgtccacaaccatcagaagacaccccgaggagtactgccagggtcccaaaggggatggtccccttccggccccgggtccccttggtcactccacccagagagaaaaaagaagctccttggcttgcatgccttcgcactagggctctaaggatcctcatagaccctccgagccaggtgtgggatatagtctcgtgtgatgcggagaatgaaaccaagttggaaaacactctgcaggatattatccaggagaacttccccaatctagcaaggcaggccaacgttcagattcaggaaatacagagaacgccacaaagatactcctcaagaagagcaactccaagacacataattgtcagattcaccaaagttgaaatgaaggaaaaaatgttaagggcagccagagagaaaggtcgggttaccctcaaagggaagcccatcagactaacagcggatctctcggcagaaaccctacaagccagaagagagtgggggccaatattcaacacccttaaagaaaagaattttcaacccagaatttcatatccagccaaaataagcttcataagtgaaggagaaataaaatactttacagacaagcaaatgctgagagattttgtcaccagcaggcctgccctagaagacctcctgaaggaagcgctaaacatggaaaggaacaaccggtaccagctgctgcaaaatcatgccaaaacgtaa

SEQ ID NO: 129563 - DNA, 882 bp, Homo sapiens
atggggaaaaaacagaacagaaaaactggaaactctaaaacgcagagcgtctctcctcctccaaaggaacgcagttcttcaccagcaacggaacaaagctggatggagaatgactttgacgagctgagagaagaaggcttcagacgatcaaattactctgagctatgggaggacattcaaaccaaaggcaaagaagttgaaaacttcgaaaaaaatttagaagaatgtataactagaataaccaatacagagaagtgcttaaaggagctgatggagctgaaaaccaaggctcgagaactacatgaagaatgcagaagcctcaggaaccgaccaaatctacgtctgattggtgtacctgaaagtgatggggagaatggaaccaagttggaaaacactctgcaggatattatccaggagaacttccccaatctagcaaggcaggccaacgttcagattcaggaaatacagagaacgccacaaagatactcctcgagaagagcaactccaagacacataattgtcagattcaccaaagttgaaatgaaggaaaaaatgttaagggcagccagagagaaaggtcgggttaccgtcaaagggaagcccatcagactaacagcggatctctcggcagaaaccctacaagccagaagagagtgggggccaatattcaacattcttaaagaaaacaattttcaacccagaatttcatacccagccaaactaagcttcataagtgaaggagaaataaaatactttacagacaagcaaatgctgagagattttgtcaccaccaggcctgccctaaaagagctcctgaaggaagcgctaaacatggaaaggaacaaccggtaccagccgctgcaaaatcatgccaaaatgtaa

SEQ ID NO: 129564 - DNA, 807 bp, Homo sapiens
atggaacaaagctggatggagaatgactctgatgagttgacagacgaggatgttcgaacccattgcaaggaagctaaaaaacttgaagaaagattaaatgaatggctaactagaataaacagtgtagaaaagaacttaaacgacctgatggagctgaaaacgatggcacgagaacttcatgatgcttgcacaaccttcaatagccaattcaatcaaatggaagaaagggtatcagtgattgaagatcaaattaatgaaataaagcaagaagagaagtttagagaaaaaagagtaaaaagaaatgaacaaagcctccaagaaatatgggactatgtgaaaataccaaatctatgtctcattggtgtacctgcaagtgatggggagaatggaaccaagttggaaaacactctgcaggatattatccaggagaatttccccaacctagcaaggcaggctaacattcaaattcaggaaatacagagaacaccacaaagatactccttgagaagagcaaccccaagacacataattgtcagattcaccaaggttgaaatgaaggaaaaagtgttaagggcagccagagagaaaggtctagttactcacaaagggaagcccatcagactaacagcagatctctcagcagaaaccctacaagcaacaagagagtgggggccaatattcaacattcttaaagaaaagaattttcaacccagaatttcatatccagccaaactaagcttgataagtgaaggagaaataacatcctttacagacaagcaaatgctgagagatttttgtcaacactag

SEQ ID NO: 129565 - DNA, 1230 bp, Homo sapiens; identical to SEQ ID NO: 124327

SEQ ID NO: 129566 - DNA, 829 bp, Homo sapiens
cccatatcatactgaatgggcaaaaactggaagcattccctttgaaaaccggcacaagacaaggacgctctttctcaccactcctattcaacatagtattgaaagttctggccagggaaatcagcaatcaggcccctcttccaaagggctgctgcgatttgctgggggtccactccactccttacttacctgggtccctcctgcacctggaggtatctccagtggaggctgcagaacagcgacaataaaacaagaaatatgggactatgtgaaaagaccaaatctacgtctgattggtgtacctgaaagtgatgtggagaatggaaccaagttggaaaacactctgcaggatattatccaggagaacttccccaatctagcaaggcaggccaacgttcagattcaggaaatacagagaacgccacaaagatactcctcgagaagagcaactccaagacacataattgtcagattcaccaaagttgaaatgaaggaaaaaatgttaagggcagccagagagaaaggtcgggttaccctcaaaggaaagcccatcagactaacagcggatctctcggcagaaaccctacaagccagaagagagtgggggccaatattcaacattcttaaagaaaagaattttcaacccagaatttcatatccagccaaactaagcttcataagcgaaggagaaataaaatactttatagacaagcaaatgttgagagattttgtcaccaccaggcctgccctaaaagagctcctgaaggaagcgctaaacatggaaaggaacaaccggtaccagccgctgcaaaatcatgccaaaatgtaa

SEQ ID NO: 129567 - DNA, 1014 bp, Homo sapiens; identical to SEQ ID NO: 125810

SEQ ID NO: 129568 - DNA, 1725 bp, Homo sapiens
atgtggttgcaggcactctgcgcttgcagaaatgagctcctgaattcaacctcgcataaagctcttctgagaatgaatgtcacaacaacgacacatctagtagcaccaaatatgtgtcaggtcctgaatccagggctgctttcattcagttcaaatctggtagctgtctttagggtcacgcacactcctattagcacatttgaagaaggaaaactaacaaacagaaaggacatccacaccaaaaacccttctgtacgtcaccatcatcagagaccaaaagtagataaaaccacaaagatggggaaaaaacagagcagaaaaactggaaactgtaaaaagcagagtgcctctcctcctccaaaggaatgcagctcctcaccagcaatggaacaaagctggatggggaatgactttgacgagctgagagaagaaggcttcagacaatcaaactactccgagctacaggaggaaattcaaacaaatggcaaagaagttaaaaactttgaaaaaaaattagatgattggataactagaataaccaacacagagaagtccttaaaggagctaatggagctgaaagccaaggctcgagaattacttgaagaatgcagaagccccaggagccaatgtgatcaactggaagaaagggtatcagtaatggaagacgaaatgaatgaaatgaagcgagaagggaagtttagagaaaaaagaataaaaagaaatgaacaaatcctccaagaaatatgggactatgtgaaaaggccaaatctacatctgattggtgtacctgaaagtgacggggagaatggaaccaagttggaaaacactctgcaggatattatgcaggagaacttccccaatctagcaaggcaggccaacattcagattcaggaaatacagagaacgccacaaagatactccttgagaagagcaactccaagacacataattgtcagattcaccaaagttgaaatgaaggaaaaaatgttaagggcagccagagagaaaggtcaggttacccacaaagggaagcccatcagactaacagcagatctcttcgcagaaactctacaagccagaagagagtgggggccaatattcaacattcttaaagaaaagatggggaaaaaacagagcagaaaaactggaaactgtaaaaagcagagcgcctctcctcctccaaaggaatgcagctcctcaccagcaatggaacaaagctggatgtggaatgactttgacgagctgagagaagaaggcttcagacgatcaaactactctgagctacaggaggaaattcaaacaaatggcaaagaagttaaaaactttgaaaaaaaattagatgattggataactagaataaccaacgcagagaagtccttaaaggagctaatggagctgaaagccaaggctcgagaattacgtgaagaatgcagaagccccaggagccaatgtgatcaactggaagaaagggtatcagtaatggaagacgaaatgaatgaaatgaagcgcgaagggaagtttagagaaaaaagaataaaacccagaatttcatatccagccgaactaagcttcataagtgaaggagaaataaaatactttacagacaaccaaatgctgagagattttgtcaccaccaggtctgccctaaaagagctcctgaaggaagcactaaacatggaaaggaacaaccggtaccagccactgcaaaaacatgccaaaatgtaa

SEQ ID NO: 129569 - DNA, 780 bp, Homo sapiens; identical to SEQ ID NO: 125811

SEQ ID NO: 129570 - DNA, 2715 bp, Homo sapiens
gtgggaccctcaaaggaacagggatgccctgagttctctgagtacttcccgttgcacatggataagaaatacagagcagtcagtggaatccctatatgtggaaactacagatacagaaagctgtctctatgtcagatggcgatgaaagctaaagagaaaaataaaaccagaaaggggaaaggggagctgcaagttgaatacgtggtcaaggaaggccttgctaagaaggtgccacttgagcaaagaccagaaggagttgagggccaacacatgcatgcaccaccagggagcctgaggatagagccacctggcctggctctgcactgccagtgcctgagcacattgtctggggacctggggaccacccagctcaatccaccaccattgacacttgagcactcctcccaggggcctgaagttgggcccaccaaacctgctgctaccaccacagcaggcacccccccttgggcctgggggttgaactacccgatgaaagacctctataagaaaaactgcaaaacactgataaaagaaattgaagaggacacaaatggaaagatatcccatgctcatggattagaagaattaatattgttaaatacccatactgcccaaagcaatctacagattcaaagtaatctgtatgaaagtaccaacataatttttcacagaaatagaaaaaacaatcttacaattcatatggaaccaaagagagccagaatagacacagcaatcctgagcaaaaagaacaaagttggagacatcccactacctggaatcaaaacatattacaaggctatagtaagcaaaacagcatggtatgcatttcagattttgaatggatctccttgtctggcgttaattgacagtgaaagcccggttttcaaagccaaggtacaagcactgaagcccagcaaacatatcacatttccttggctctattatcaacaacacaaccacacctacgggacctgcgagctaaagcagctctactcagggagaagctcacaggctttggaatcacagatgctgcccaaagatcggcagatggaaaggaacaccctgcccccagtggacacaggcccaccctcgaggactgtgggggcatcctgttcctcctctacttcaggtgaagatgccggcaagaaactgtttcctggacacacattttgcgagcaccccgaggattccagcgacgtggttaagccgccgggaagaccacgaagagcttttccaatatcatccgaggctttgtgggagagcgaatgtcgagcccgaacttcatattcttcccaacattttgagaaaagttgtgatgttgtcaataaagcaagaaacgcacagagtgagaattatcttgagtgcccagcgcagaacaggaagtcaagaagtgggagctattcacactatgactacactgcatgccactcccatctttctgaggccagtcccctcacactagccacagttcctttggagaatccttctgggattgaaggtggacagttgagaaatgactctcaaaagactctggatggatccaaagagcatattaatttaactaacggtattccaacagacctgcagccgagggtcctgtctgttagaaggaaaactaacaaacagaaggacttcacactgaaaacccatctgtacatcaccatctcaaagaccaaaagtagaataaacccccagagatggggaaaaaaccgaacaaaaaaaatgggaaactctaaaacgcagagcacctttcctcctccaaaggaacgcagttcctcaccagcaacggaacaaagctggatggagaatgattttgacgagctgagagaggaaggcttcagacaatcaaattactctgagctacgggaggacattcaaaccaaaggcaaagaagttgaaaactttgaaaaaaatttagaagaatgtataactagaataaccaatacagagaagtgcttaaaggagctgatggagctgaaaaccaaggctcgagaactacgtgaagaatgcagaagcctcaggaaccgatgcgatcaactggaagaaagggtatcagcaatggaagatgaaatgaatgaaatgaagcaagaagggaagtttagagaaaaaagaataaaaagaaatgagcaaagcctccaagaaatatgggactatgtgaaaagaccaaatctacgtctgattggtgtacctgaaagtgatgcggagaatggaaccacgttggaaaacactctgcaggatattatccaggagaacttccccaatctagcaaggcaggccaacattcagattcaggaaatacagagaacgccacaaagatactcctcgagaagagcaactccaagacacataattgtcagattcaccaaagttgaaatgaaggaaaaaatgttaaggacagccagagagaaaggtcgggttaccctcaaagggaagcccatcagactaacagcggatctcttggcagaaaccctacaagccagaagagactgggggccaatattcaacattcttaaagaaaagaattgtcaacccagaatttcatatccagccaaactaagcttcataagtgaaggagaaataaaatactttacagacaagcaaatgctgagagattttgtcaccaccaggcctgccctaaaagagctcctgaaggaagcgctaaacatggaaaggaacaacaggtaccagccgctgcaaaatcatgccaaaatgtaa

SEQ ID NO: 129571 - DNA, 855 bp, Homo sapiens
atgctcaatgtccttcaatgcgttggatgcccaccaccccccaacaaggccccgggcatagctgaacaaaaggcagcagataacttctgcagacttaaacgtctccgtctgaaagctctgaagagagcagtggttctcccagcatggcgtttaagctctgagaacggacagactgcctccacaaaaagggtatcagtgattgaagatcaaattaatgaaataaagccagaagacaaggttagagaaaaaagagtaaaaagaaatgaacaaagcctccaagaaatatgggactatgtgagaacaccaaatctatgtttgattggtgtacctgaaagtgatggggagaatggaaccacgttggaaaacactcttcagtatattatccaggagaacttccccaacctagcaaggcaggccaacattcaaattcaggaaatacagagaacaccacaaacatactcctcaagaagagcaaccccaagacacataattgtccgattcaccaaggttgaaatgaaggaaaaagtgttaagggcagccagagagaagggtcgagttacccacaaagggaagccaatcagagtaacagcagatctcttggcagaaaccctgcaagccagaagagagtgggggccaatattcaacattcttaaagaaaagaatattcaacccagaatttcatatccagccaaactaagcttcacaagtgaaggagaaataaaatcctttacagacaagcaaatgctgggagattttgtcaccaccaagcctgcctcacaagagctcctgaaggaagcactaaacacggaaagaaacaaccagtaccagccgctgcaaaaacatgccaaattgtaa

SEQ ID NO: 129572 - DNA, 1266 bp, Homo sapiens; identical to SEQ ID NO: 127022

SEQ ID NO: 129573 - DNA, 1140 bp, Homo sapiens
ggaaacagctatgaccatgattacgaattcgagctcggtacccttctccttggcggtcttgccgatgtcggccttgctgtcggccagggccagcaggaagagttcgccggcaatgaactgggattttgccgatttcggaaccaccatcaaacaggattttcgcctgctggggcaaaccagcgtggaccgcttgctgcaactctctcagggccaggcggtgaagggcaatcagctgttgcccgtctcactggtgaaaagaaaaaccaccctggcgcccaatacgcaaaccgcctctccccgcgcgttggccgattcattaatgcagctggcacgacaggtttcccgactggaaagcgggcagtgagcgcaacgcaattaatggattttgccgatttcggaaccaccatcaaacaggattttcgcctgctggggcaaaccagcgtggaccgcttgctgcaactctctcagggccaggcggtgaagggcaatcagctgttgcccgtctcactggtgaaaagaaaaaccaccctggcgcccaatacgcaaaccgcctctccccgcgcgttggccgattcattaatgcagctggcacgacaggtttcccgactggaaagcgggcatgatgtggagaatggaaccaagttggaaaacactctgcaggatattatccaggagaacttccccaatctagcaaggcaggccaacgttcagattcaggaaatacagagaacgccacaaagatactcctcgagaagagcaactccaagacacataattgtcagattcaccaaagttgaaatgaaggaaaaaatgttaagggcagccagagagaaaggtcgggttaccctcaaaggaaagcccatcagactaacagcggatctctcggcagaaaccctacaagccagaagagagtgggggccaatattcaacattcttaaagaaaagaattttcaacccagaatttcatatccagccaaactaagcttcataagtgaaggagaaataaaatactttatagacaagcaaatgctgagagattttgtcaccaccaggcctgccctaaaagagctcctgaaggaagcgctaaacatggaaaggaacaaccggtaccagccgctgcaaaatcatgccaaaatgtaa

SEQ ID NO: 129574 - DNA, 1581 bp, Homo sapiens
atgcccatggagccttactcgctgctaacgcagcagtctaagattgacctgggatgccggagcttggaacacaactcctcgccagcaagggaacaaaactggatggataacgagtttgacaagttgaccgaagtaggcttcaaaggccgccaattcgatcggctggaagaaaggatatcagtgattgaagatcgaattagtgaaacaaagcaagaagacaagattagagaaaaaagagtgaaaagaaacaaacaacacctccaagaaatatgggactatgtgaaaagaccaaatctacgtctgattggtgtacctgaaagtggcggggataatggaaccaagttggaaaacactcttcagggtattatccaggagaacttccccaacctagcaagacaggccaacattcacattcaggaaatacagagaacaccacaaagatactcctcgagaagagcaaccccaagacacataattgtcagattcaccaaggttgaaatgaaggaaaaaatgttaagggcagccagagagaaaggtcaggtcacccacaaagggaggcctatcagactgacagcaggtctctctgcagaaaccctacaagccagaagagagtgggggccaatattcaacattcttaaagaaaagaattttcaacccagaatttcatatccagtcaaactaagcttcataagtaaaggagaaataaaattctttacagacaagcaaatgctgagagatttcatcaccatcaggcctgcattacaagagctcctgaaggaagcactagacgtggataggaacaactggacagttacagaaagggaactgcaggaaggtagcaccttccaacaaatgcagcaattccaacaattccttgggctcctagaagacttctctcatacaggctttcaaccagcccccatccctaatcctcccatcagcatagaaccctatgacaatggcctgggagaaggcttggcccagctggcctcagaggaatctgcagcaccttgtccaaagacagacattttacaatttccattcactggagtagctggtgaccagcagagggcattgcaaatggcagcatgtggtgattgcctcagtaccttttttgactccctgtgcctcattgactctgacccagtaggaagtcatggactcagtactctgtctgtagcttgctcaacccatgattcctcaatggcccagaagccaagtttgttccgcattcagtatactctcttgattacaataaagtattatgagcctctttccttttggagagactggaaaagtgaagagacacaggtatggaaaggtgaattagaggaagaaacctactatgaactagcaggaataaagatcatccaaatgagaaatgccattgaggagttattcagagcttactctagaaagggagtcagccaccagcacttgcgctgtggcagagactcaaacacaggcacaagagtgggaagtgcctgtcattctgtgcagataagtgaaaagaaggatggggaaaggctttttgataagattgggcatggagtaacaaaaccgtgggctttcatcagctga

SEQ ID NO: 129575 - DNA, 1659 bp, Homo sapiens
atgaggcatgcagacatatcaaaaggccatctgcaaactgagaaagaaaccagtagtgtctcagtccaagtccaaaagcctcaaaagcgggaagccaacagtgcagctgtcagtctgcagccaaaggcccaagagaccctgaaaaaccacagccctagaggcaggaggagcccaaagtgtccaggtggcaatcataacttccagttgaatggaatcattgttgtgtattctggtggcagtgttccttcctttggaactaagacctctgggccagcagaacataatgccatgggaacaggaagcaaaagtcttgctagtgggtcactaggggtgatgttgcttcaggatgatggggagcatggtaataccacagtgaataccataagcatgggcccactgctgaacttctttagccataaaggcacagacaaacaaaaagacagcaataacctctgcagacttaagtgtccctgtctgacagctttgaagagagcagtggttctcccagcacgcagctggagatctgagaacgggcagactgcctcctcaaaaggaaaactaacaaccagaaaggacatctacaccgaaaacccatctgtacatcaccatcatcaaagaccaaaagtagataaaaccacaaagatggggaaaaaacagaacagaaaaactggaaactctaaaacgcagagcgcctctcctcctccaaaggaacgcagttcctcactagcaacagaacaaagctggatggagaatgattttgacgagctgagagaagaaggcttcagacgatcaaattactctgagctacgggaggacattcaaaccaaaggcaaagaagttgaaaactttgaaaaaaatttagaagaatgtataactagaataaccaatacagagaagtgcttaaaggagctgatggagctgaaaaccaaggctcgagaactacgtgaagaatgcagaagcctcaggagccgatgcgatcaactggaagaaagggtatcagcaatggaagatgaaatgaatgaaatgaagcgagaagggaagtttagagaaaaaagaataaaaagaaatgagcaaagcctccaagaaatatgggactatgtgaaaagaccaaatctacgtctgattggtgtacctgaaagtgatgtggagaatggaaccaagttggaaaacactctgcaggatattatccaggagaacttccccaatctagcaaggcaggccaacgttcagattcaggaaatacagagaacgccacaaagatactcctcgagaagagcaactccaagacacatacttgtcagattcaccaaagttgaaatgaaggaaaaaatgttaagggcagccagagagaaaggtcaggttaccctcaaaggaaagcccatcagactaacagcggatctctcggcagaaaccctacaagccagaagagagtgggggccaatattcaacattcttaaagaaaagaattttcaacccagaatttcatatccagccaaactaagcttcataagtgaaggagaaataaaatactttatagacaagcaaatgctgagagattttgtcaccaccaggcctgccctaaaagagctcctgaaggaatcactaaacatggaaaggaacaaccggtaccagccgctgcaaaatcatgccaaaatgtaa

SEQ ID NO: 129576 - DNA, 1120 bp, Homo sapiens
atgccgttaaacaagaaacagtctgtgaccacacggtccaatcttggagacagaaaacatgataactgtgttcgaaatcgctttgtcacatctgcagaatgctgggagagagtttcttcagcatattcaacatgtcatggctattcaatagagtgcagtgaggtgaatgaacctctaggcttctccggcaacacaattctgtctgcccagcagcctcccacccacgctgcctctggcaccgatacctgtgcccgggaccagctgaaaaccaaggctcgagaactacgtgaagaatgcagaagcctcaggagccgatgcgatcaactggaagaaagggtatcagcaatggaagatgaaatgaatgaaatgaagcgagaagggaagtatagagaaaaaagaataaaaagaaatgagcaaagcctccaagaaatatgggactatgtgaaaagaccaaatctacgtctgattggtgtacctgaaagtgatgcggagaatggaaccaagttggaaaacactctgcaggatattatccaggagaacttccccaatctagcaaggcaggccaacattcagattcaggaaatacagagaacgccacaaagatgctcctcgagaagagcaactccaagacacataattgtcagattcaccaaagttgaaatgaaggaaaaaatgttaagggcagccagagagaaaggtcgggttaccctcaaagggaagcccatcagactaacagcggatctctcggcagaaaccctacaagccagaagagagtgggggccaatattcaacattcttaaagaaaagaattttcaacccagaatttcatatccagccaaactaagcttcataagtgaaggagaaataaaatactttacagacaagcaaatgctgaccgattttgtcaccatcaggcctggcctaaaagaactcctgaaggaagcactaaacatggaaaggaacagctgggcaaagtgttcccatgcagggttatgccacacgtttccattcgagcagatggcagaaaggtttgtctgcaatgtggaacttgttaagggggaaggccttcctgatagagatcaagaaggccgctttaatttacttagtggtgggatggttt

SEQ ID NO: 129577 - DNA, 1686 bp, Homo sapiens
atgaggaatggcgcactacagtccaggtactacgctgttcccatggtctccacaacccacagaccaggaaattccctccagtgcctatgtttctggaattggtgggttcttggtctcactgacttcaagaatgaagccgtggaccctcacgcccttgggtggtcgataggactgggcaccatggagcagggggcagcactcattggggaggcttgggctgcacaggagcccatggagagcgggggagactcaggcatggtgggctgcaggtcccgagccctgccccatgggaaggcagctaaggcccggcgagaaatccagcgcagtgccactgagggagccagctctggccttggccagcccagaaaggggctcccacagtgcagcagtgggctgaagggctcctcaagtgccaccaaagtgggagcccagggagaggaggcgccgagagggagtgagagctgtgaaggctgccagcatgctgtcacctctcacctacgccacaagggccctgggtttcaagcacaaaactgggaggccttttgggcagacaccgagctagctgcaggagtttctgtcataccccagtggcgcctggaaagccaggcatctctgaaagaaaagcagcagctccagtctggagcttatagatcaaactcctatctcccagggacagcacctaggggaaggagtggctgtgggtgcagcttcagcagacttaaacactcctgcctgccagcactgaagagagcagcagatcctgcagcacagcactcgagctctgctaagggacagactgcctcctcaagtggatcactgacccctgtgcctcctgactgggagacactttccagcaggggtcaacagacacctcatagagaagagctacaactggcatgtggcaggtgcccccctgggattaagcttccagaaacaggaacaggcagcaatctctgcttttctgcagcctccactgaaaggaatagcatcaacatcaaccaaaaggatttccacacagaaactccatccgaacttcaccaacatcaaagaccaaagaccacagagataaggaaaaaccagtgcaaaaaggccgaaaattccaaaatccagaagacctcttctcctccaaaggatcacaactcctcgccagcaagggaacaaaactggatggagaatgagtttgacgaattgatagcagtaggcttcagaagatgggtaacaaactcctctgagctaaaagagcatgttctaacccaaggcaaggaagctgagaaccttgaaaaaaggttagaggaaatgttaactagaatagccagtttagaaaagaacataaacgacctgaccaagttggaaaacactcttcaggatattatccaggagaacttccccaatctagcaagacaggccaacattcaaattcaggaaatacagagaacaccacaaagatactcctcaagaagagcaaccccaagacatataatcgtcagattcaccaaggttgaaatggagaaaaaaaatgttaaggacagccagagagaaaggtcaagttacccacaaagggaagcccatcagactaacagcagatctctctgcagaaaccctacaaaccaaagagagtggaggccaatactcaacattcttaaagagaagaattttcaacccagaatttcaacccagccaaactaa

SEQ ID NO: 129578 - DNA, 1640 bp, Homo sapiens
atgagggctgagtacacaaagcgatctattcacatctttggacttcaagagaatcatattgtgtccggaattggtgggttcttggtctcaccaacttcaagaatgaagccgcggacccttgcactagacctaaaggttctccaagtccccaccagagtcaggagcccagctggcttcactcagtggatccggcacctggccgcaggtggagctgcctgccagtcccgcgcccccttgggtggtcgatgggactgggcgctgtcgagcaggggacgccgctcgtcggggaggctcggccgcacaggagcccacggaggcggaggggatgctcatgcttggtgggctgttggttccgagccctgtcccgcgggaaggcttctcaggctcggcgagaaattgagcacagcagctgctggcccaggtggtgatgatagtaataataatagttgctgtcggggacgtgacagctggctggtggtgttcataatgaaagttcaccttcccgccacctcccctagagccaagaagatcatggttatcacagtctcaggccatttttctttgggctcctttaccaagacagtcataggtaaagaaagtgacagggtgaacagtcttcagtcactaaagctaaagaaatccaatcttcctaacttaaccaaccccagatttacgagaagggaagagaaaggggagaagggtgctcaggaacggatagatagcttgcgtcgaactggggtgatccatgaaaaacagacagctgtgtcagtagaaaacttcattgcagaattgctgcctgacaaaataaccaatacagagaagtgcttaaaggagctgatgaagctgaaagccaaggctcgagaactacatgaagaatgcagaagcctcaggagccgacgcgatcaactggaagaaagggtatcagtgatggaagatgaaatgaatgaaatgaagcgagaagggaagtttagagaaaaaagaataaaaagaaacgaacaaagcctccaagaaatatgggactatgtgaaaagaccaaatctacgtctgactggtgtacctgaaagcgacggggagaatggaaccaagttggaaaacactctgcaggatattatccaggagaacttccccaatctagcaaggcaggccaacattcagattcaggaaatacagagaatgccacaaagatactcctcgagaagagcaactccaagacacataattatcagattcaccaaagttgaaatgaaggaaaaaatgttaagggcagccagagagaaaggtcgggttacccacaaagggaagcccatgagactaacagcagatctctcggcagaaactctacaagccagaagagagtgggggccaatattcaacattcttaaagaaaagaattttcaacccagaatttcatatccagccaaactaagttttgtaagtgaaggagaaataaaatactttacagacaagcaaatgctgagagattttgtcaccaccaggcctgccctaaaagagctcctgaaggaagcactgaacatggaaaggaacaactggtaccagctgctgcaaaatcatgccaaaatgtaaagaccatcgaaactaggaagaaactgcatcaactaatgagaaaaataaccagctaa

SEQ ID NO: 129579 - DNA, 374 bp, Homo sapiens
  misc_feature (1)...(374): n = a,t,c or g
ggggttggggaactccctcttcaatccaagggaagccattagggactgtgccatgcactttggcacagagattgcgcttttcccatggtcttcacaacccacagacccagaggattccctcaggtgcctacaccaccagggccctgggtttcaagcacaaaactgggcggccatttgggcagacactgagctagccgcaggagnnnnnnnnnnnnnnnnnnnnnnnnnnnnnnnnnnnnnnncatacgccagtggcgcctggaacaccagcaagacaaaaatgttcgctcccctggaaagggggctgaagccaagtagtctggctcggtgggtcccacccccacagagctgagcaagttaagatccactggctt

SEQ ID NO: 129580 - DNA, 1035 bp, Homo sapiens
atggggaaaaaacagaacagaaaaactggaaactctaaaatgcagagcgcctctcctcctccaaaggaacgcagttcctcaccagcaacagaacaaagctggatggagaatgattttgacgagctgagagaagaaggcttcagacgatcaaattactctgagctacgggaggacattcaaaccaaaggcaaagaagttgaaaactttgaaaaaaatttagaagaatgtataactagaataaccaatacagagaagtgcttaaaggagctgatggagctgaaaaccaaggctcgagaactacaaagggtatcagcgatggaagatgaaatgaatgaaatgaagcgagaagggaagtttagagaaaaaagaataaaaagaaatgagcaaagcctccaagaaatatgggactatgtgaaaagaccaaatctacgtctgattggtgtacctgaaagtgatggggagaatggaaccaagttggaaaacactctgcaggatattatccaggagaacttccccaatctagcaaggcaggccaacattcagattcaggaaatactgagaataccacaaagatactcctcgagaagagcaactccaagacacataattgtcagattcaccaaagttgaaatgaaggaaaaaatgttaagggcagccagagagaaaggtcgggttaccctcaaagggaagcccatcagactaacagtggatctctcggcagaaaccctacaagccagaagagagtgggggccaatattcaacattcttaaagaaaagaattttcaacccagaatttcatatccagccaaactaagcttcataagtgaaggagaaataaaatactttacagacaagcaaatgctgagagatttttgtcaccaccaggcctgccctacaagagctcctgaaggaagcgctaaacatggaaaggaacaaccggtaccagccgctgcaaaatcatgccaaaatgtaaagaccatcgagactaggaagaaactgcatcaactaacgagcaaaatcaccagctaacatcat

SEQ ID NO: 129581 - DNA, 7468 bp, Homo sapiens
atggggaaaaaacagagcagaaaaactggaaactctaaaaatcagagcgcctctcctcctccaaaggaacgcagctcctcaccagcaatggaacaaagctggatggagaatgactttgacgacttgagagaagaaggcttcagacaatcaaactactctgagctaaaggaggaagttcgaacccatggcaaagaagttaaaaaccttgaaaaaaaattagacgaatggctaactagaataaccaatgcagagaagtccttaaaggacctgatggagctgaaaaccacagcccgagaactacatgatgaatgcacaagcctcaaaagggtatcagtgacggaagatcaaatgaatgaaatgaagcgagaagagaagtttagagaaaaaagaataaaaagaaatgaacaaagcctccaagaaatatgggactatgtgaaaagaccaaatctacacctgattggtgtacctgaaagtgacggggagaatggaaccaagttggaaaacactctgcaggatattatccaagagaacttccccaatctagtaaggcaggccaacattcaaattcaggaaatacagagaacgccacaaagatactcctcgagaagagcaactccaagacacataattgtcagattcaccaaagttgaaatgaaggaaaaaatgttaagggcagccagagagaaaggtcgggttacccacaaagggaagcccatcagactaacagctgatctcttggcagaaactctacaagccagaagagagtgggggccaatattcaacattcttaaagaaaagaattttcaacccagaatttcatatccagccaaactaagcttcatagacagatcaacgagacagaaagttaacaaggatacccaggaattgaactcagctctgcaccaagcggacctaatagacatctacagaactctccaccccaaatcaacagaatatacattcttttcagcaccacaccacacctattccaaaattgaccacatagttggaagtaaagcactcctcagcaaatgtaaaagaacagaaattataacaaactgtctctcggaccacagcgcaatcaaactagaactcaggattaagaaactcactcgagaccactcaactacatggaaactgaacaacctgcttctgaatgactactgggtacataatgaaatgaaggcagaaataaagatgttctttgaaaccaacgagaacaaagacaaaacataccagaatctctgggacacattcaaaacagtgtgtagagggaaatttatagcactaaatgcccacaagagaaagcaggaaagatctaaaattgacaccctaacatcacaattaaaaggacttgagaagcaagagcaaacacattcaaaagctagcagaaggcaagaaataactaagatcagagcagaactgaaggaaatagagacacaaaaaacccttcaaaaaatcaacgaatccaggagctggttttttgaaaagatcaacaaaattgatagaccgctagcaagactaataaagaataaaagagaggagaatcaaatagacgcaataaaaaatgataaaggggatatcaccactgatcccacagaaatacaaactgccatcagcgaatactataaacacctctacgcaaataaactggaaaatctagaagaaatggataaattcctcgacacctacaccctcccaagactaaaccaggaagaagttgaatctctgaatagaccaataacaggctctgaaattgaggcaataattaatagcttaccaaccaaaaaaagtccaggaccagatggattcatggccgaattctaccagagggacaaggaggagctggtaccattccttctgaaactgttccaatcaatagaaaaagagggaatcctccctaactcattttatgaggccagcatcatgctgataccaaagcctggcagagacacaacaaaaaaagagaattttagaccaatatccctgatgaacatcgatgcaaaaatcctcaataaaatactggcaaaccgaatccagcagcacatcaaaaagcttatccaccatgatcaagtgggcttcatccctgggatgcaaggctggttcaacttacgcaaatcactaaacgtaatccagcatataaacagaaccaatgacaaaaaccacatgattatctcaatagatgcagaaaaggcctttgacaaaattcaacagcccttcatgctaaaaactctcaataaattaggtattgatgggatgtatctcaaaataataagagctatctatgacagacccacagccaatatcatactgaatgggcaaaaactggaagcattccctttgaaaactggcacaagacagggatgccctctctcaccactcctattcaatatagtgttggaagttctggccagggcaatcaggcaggagaaggaaataaagggtattcaattaggaaaagaggaagtcaaattgtccctgtttgcagatgacatgactgtatatttagaaaacgccatcgtctcagccccaaatctccttaagctgataggcaacttcagcaaagtctcaggatacaaaatcaatgtgcaaaaatcacaagcattcttatacactaataacagacaaacagagagccaaatcatgagtgaactcccattcagaattgcttcaaagagaataaaatacctaggaatccaacttacaagggatgtgaaggacctcttcaagcagaactacaaaccactgctcaatgaaataaaagaggatacaaacaaatggaagaacattccatgctcatgggtaggaagaatcaatatcgtgaaaatggccatactgcccaagaaatacaaaagatcctcagagactactatgaacacctctatacactcaaactagaaaatctagaggaaatggatgaatttctggaaacacacaacctcccaagcttcctaacattccttgggaatccacgtctgcccagctttcaggctgcaggtccacaagtccaggtgaattttctcccttgccagcgcccaggattccatggggtacagtcctgtccaatcagaacattgcattctcttggccactatgattggctcagagatgaccatgtgactcgatcaaatctgaccctaagaattttgctagaaagaccaagaagaaaagcaccattttaccctctagattttccaagaagttatgatgcaggcctagagctgttggtgccatcatgtcaccacaagggacagcctgcttggaaatggagccaacgcagaggagaatctaatactgttgctgatctgacaggaggcagtgctcaggcagtcacgttcgctcacccaccactcacttcctgccatgtggcccagttcctaacaggctacgaaccagtactagtccacggcctgggggtctgggattcctgctatatacaatatattactacaactgaagttagatgtggccacgtggcagagttccacccaatggcatgtggaggaagtgacctaactctaaaggagcagctgttctttttccatattctttcccattcagcggacaggaaaaaaatgatgatgagaccccgggcttacagacatgcctgctggaaacgctttggtacattttggatgttccagggatcatatccaaatgctgaaaatggtctccaaagctctacgggtaagtcaagctatggcgaaaatggagaaatctacaaagaaggaaaactaacaaccagaaaggacatctacaccgaaaacccatctgtacatcaccatcatcaaagaccaaaagtagataaaaccacaaagatggggaaaaaacagaacagaaaaactggaaactctaaaacgcagagcgcctcttctcctcctccaaaggaacgcagttcctcaccagcaacggaacaaagctggatggagaatgactttgacgagctgagagaagaaggcttcagaaggtcggtaataacaaacttctcagagctaaaggagcatgttgtaacccatcgcaaggaagctaaaaatcttgaaaaaaaaattagacgaatggctaactagaataaccaatgcagagaagtccttaaaggacctgatggagctgcaaaaccatggcatgagaactttgtgatgcatgcacaagcttcaatagctgattcgatcaagtggaacaaagagtatcagtgattgaagatcaaattaatgaaataaagtgagaagacaaggttagagaaaaaagaatgaaaaaaaaaaacgagcaaagccttgaaggaattatgggactatgtgaaaagaccaaaatctacgtctgattggtatacctgaaagtgacgaggagaatggaaccaagttggaaaacactctgcaggatattatccaggagaacttccccaacatagcaaggcaggccaacattcaaattcaggaaatacagagaacaccacaaagatactccttgagaagagcaactccaagacacataattgtcagattcaccaaagttgaaatgataggaaaaaatgttaagggcagccagagagaaaggtcaagtagttacccacaaagggaagtccatcagactaacagtggatctctctgcagaaactctacaagccagaagagagtgggggccaatattccacattcttaaagagaagaattttcaacccagaatttcatatccagccaaactaagcttcataagtgaaggagaaataaataagatcctttacagacaagcaaatgccgagagatttttgtcaccactaggccctgccctaaaagagctcctgaaggaagcgctaaacatggaaaggaacaaccggagaaagcaggaaagatccaaaattgacaccctaacatcacaattaaaagaactagaaaagcaagagcaaacacattcaaaagctagcagaaggcaagaaataactaaaatcagagcagaactgaaggaaatagagacacaaaaaacccttcaaaaaatcaatgaatccaggagctggttttttgaaaggatcaacaaaattgatagaccgctagcaagactaataaagaaaaaaagagagaagaatcaaatagacacaataaaaaatgataaaggggatatcaccactgatcccacagaaatacaaactaccatcagagaatactacaaacacctctacgcaaataaactagaaaatctagaagaaatggatacattcctcgacacatacactctcccaagactaaaccaggaagaagttgaatctctgaatagaccaataacaggctctgaaattgtggcaataatcaatagtttaccaaccaaaaagagtccaggaccagatggattcacagccgaattctaccagaggtacaaggaggaactggtaccattccttctgaaactattccaatcaatagaaaaagagggaatcctccctaactcattttatgaggccagcatcattctgataccaaagccgggcagagacacaaccaaaaaagagaattttagaccaatatccttgatgaacattgatgcaaaaatcctcaataaaatactggcaaaccgaatccagcagcacatcaaaaagcttatccaccatgatcaagtgggcttcatccctgggatgcaaggctggttcaatatacgcaaatcaataaatgtaatccagcatataaacagagccaaagacaaaaaccacatgattatctcaatagatgcagaaaaagcctttgacaaaattcaacaacccttcatgctaaaaactctcaataaattaggtattgatgggaagtatttcaaaataataagagctatctatgacaaacccacagccaatatcatactgaatgggcaaaaactggaagcattccctttgaaaactggcacaagacagggatgccctctctcaccgctcctattcaacatagtgttggaagttctggccagggcaatcaagcaggagaaggaaataaagggtattcagttaggaaaagaggaagtcaaattgtccgtgtttgcagacgacatgattgtttatctagaaaaccccatcgtctcagcccaaaatctccttaagctgataagcaacttcagcaaagtctcaggatacaaaatcaatgtacaaaaatcacaagcattcttatacaccaacaaccgacaaacagagagccaaatcatgagtgaactcccattcacaattgcttcaaagagaataaaatacctaggaatccaacttacaagggatgtgaaggacctcttcaaggagaactacaaaccactgctcaaggaaataaaagaggacacaaacaaatggaagaacattccatgctcatgggtaggaagaatcaatatcgtgaaaatggccatactgcccaaggtaatttacagattcaatgccatccccatcaagctaccaatgactttcttcacagaattggaaaaaactactttaaagttcatatggaaccaaaaaagagcccgcatcgccaagtcaatcctaagccaaaagaacaaagctggaggcatcacactacctgacttcaaactatactacaaggctacagtaaccaaaacagcatggtactggtaccaaaacagagatatagatcaatggaacagaacagagccctcagaaataatgccgcatatctacaactatctgatctttgacaaacctgagaaaaacaagcaatggggaaaggattccctatttaataaatggtgctgggaaaactggctagccatatgtagaaagctgaaactggatcccttccttacaccttatacaaaaatcaattcaagatggattaaagatttaaacgttagacttaaaaccataaaaaccctagaagaaaacctaggcattaccattcaggacataggcgtaggcaaggacttcatgtccaaaacaccaaaagcaatggcaacaaaagccaaaattgacaaatgggatctaattaaactaaagagcttctgcacagcaaaagaaactaccatcagagtgaacaggcaacctacaacatgggagaaaattttcgcaacctactcatctgacaaagggctaatatccagaatctacaatgaactcaaacaaatttacaagaaaaaaacaaacaaccccatcaaaaagtgggcaaaggacatgaacagacacttctcaaaagaagacatttatgcagccaaaaaacacatgaagaaatgctcatcatcactggccatcagagaaatgcaaatcaaaaccactatgagatatcatctcacaccagttagaatggcaatcattaaaaagtcaggaaacaacagcagccagatgccactgactagctcagataacactgctgtcaactgtaaaaaattaagatccaaaccagatgaaattgccaaagagtcagaagctcctccaggcttagccagctttcacctttgctcatcatacatctatggggctcctcttaactcacagatgggctag

SEQ ID NO: 129582 - DNA, 658 bp, Homo sapiens
ctttactgcgtcttttgtactgccccagatcctccttcctctatctcagagcccatatgaaaacttccaagtggccctccaggcaaagccatattgtgattttgctatcttaggaaaaatgaacagagatgttgctggatttgaagataaaggagaagacctcaaactaaggaatacagtggcttccaagaaccacactgggaaaacgggcggcgggacccgggacccagcttggcgacggcgatctcgacgcgggcccccaggatctcccggcgccccacctctggagcagcccctgccgccagcgtcaggtccaccccggaatcccagggactctcggcgccgaacggacccgggccgggtgcaacggggtccccggactggagaagacgcgggtggcaccgtgcgagctccaggagccccgggtccactgcgaggcctcggggggcgcagacctgcagagactgcggccaacgggaaggtgtttctgcagaagtacctcctggggccaagagcaactcacagccagactgggggtagagcaggggccgaagcctcatccctttgcttgacatcgtcgaagagaagcatgcatgatgtcagcagcgggacagttggaacttcttgggagacaagcttaaagactagccagagataa

SEQ ID NO: 129583 - DNA, 1260 bp, Homo sapiens
  misc_feature (1)...(1260): n = a,t,c or g
ttaataaatttcctccaccactttgatggggtgcaggtcggagggaaggcgtgggttgatgtggaagattttctgagcattccagatcatccgcagcaggttacaggggaggacgaccttgctgtctccagttgggaagatgaccctgagcacctcccgatcctcccgcatccgctcaaattcccgctccaactcgttctggatgtgtgcgttgctcagcacgtccttcaccaggtcctcctggttgatggagttccgcacagtcgcgtcgtacttcaccatcactgactccatggacttgatcagccgccgctggatgtatccagtctcagcagtcttgacagccgtgtcaatgagcccctcacgaccccccatggcgtggaaaaagaactcagtgggtgtgaggccggctaggtaggagttctccacaaagccacggctctcaggcccgtagtcatcctgggagatgttaatcttggaacctttagctccggacacgaccatagacttgaagttgttgtattcagacagggatttctgagcagaggagccagtcttgtctcgggcatcgttaagaatgcggttcacctgattctcaaacgtctgccgcagagtgttcccctcgatgaggagccagttgttaatgacagtctgaatgttggagtagaagaggcgagtgatgtcatgacccatctctaggtaggagatgtggaccagggagccagctgacgtgcccagagacttcttacacaggatgcccatgatcagctccccattctccaccaccaccttggtgtccccaggagagatgtgcttgtaagggccactgtcttcatcatcgggatgggtgctgtgggtacggatacaattgatgtgaccaggtatgatgagggagaagatttgcttgcncatggtggccacatggaactggaggagcttcacatcctctgcaatgacatgggccgctgcgccgttctgctcattgcgccgcagctgattgttgatcttcacgatgtcagccagtttgtgagtcaggtcatcntcctcatctgagatgcgtttgaagatctcatgcactcgctctggactcagcaggatcttcttctcctgagagtcctcattaacgtgcttccattccgcatacagctctaggccagaacgccggatcctgggctggtaccgcccacagccaccatggcccttttctttggtcagatcctcgtcaccctcaggttgttccacaccgaacttgttgtccat

SEQ ID NO: 129584 - DNA, 466 bp, Homo sapiens
cagtctcagcagtcttgacagccgtgtcaatgagcccctcacgaccccccatggcgtggaaaaagaactcagtgggtgtgaggccggctaggtaggagttctccacaaagccacggctctcaggcccgtagtcatcctgggagatgttaatcttggaacctttagctccggacacgaccatagacttgaagttgttgtattcagacagggatttctgagcagaggagccagtcttgtctcgggcatcgttaagaatgcggttcacctgattctcaaacgtctgccgcagagtgttcccctcgatgaggagccagttgttaatgacagtctgaatgttggagtagaagaggcgagtgatgtcatgacccatctctaggtaggagatgtggaccagggagccagctgacgtgcccagagacttcttacacaggatgcccatgatcagctccccattctccaccaccac

SEQ ID NO: 129585 - DNA, 6732 bp, Homo sapiens
gagagcgcggccgggacggttggagaagaaggcggctccccggaagggggagagacaaactgccgtaacctctgccgttcaggaacccggttacttatttattcgttaccctttttcttcttcctcccccaaaaaccttttccttttcccttctttttttttcctttttgggagctgaaaaatttccggtaagggaaagaagggctcctttcgctccttatttcgccgcctccttccctccgccaccttcccctcctccggctttttcctcccaactcggggaggtccttcccggtggccgccctgacgaggtctgagcacctaggcggaggcggcgcaggctttttgtagtgaggtttgcgcctgcgcaggcgcctgcctccgccatgcacgggggtggccccccctcgggggacagcgcatgcccgctgcgcaccatcaagagagtccagttcggagtcctgagtccggatgaactgaagcgaatgtctgtgacggagggtggcatcaaatacccagagacgactgagggaggccgccccaagcttggggggctgatggacccgaggcagggggtgattgagcggactggccgctgccaaacatgtgcaggaaacatgacagagtgtcctggccactttggccacattgaactggccaagcctgtgtttcacgtgggcttcctggtgaagacaatgaaagttttgcgctgtgtctgcttcttctgctccaaactgcttgtggactctaacaacccaaagatcaaggatatcctggctaagtccaagggacagcccaagaagcggctcacacatgtctacgacctttgcaagggcaaaaacatatgcgagggtggggaggagatggacaacaagttcggtgtggaacaacctgagggtgacgaggatctgaccaaagaaaagggccatggtggctgtgggcggtaccagcccaggatccggcgttctggcctagagctgtatgcggaatggaagcacgttaatgaggactctcaggagaagaagatcctgctgagtccagagcgagtgcatgagatcttcaaacgcatctcagatgaggagtgttttgtgctgggcatggagccccgctatgcacggccagagtggatgattgtcacagtgctgcctgtgcccccgctctccgtgcggcctgctgttgtgatgcagggctctgcccgtaaccaggatgacctgactcacaaactggctgacatcgtgaagatcaacaatcagctgcggcgcaatgagcagaacggcgcagcggcccatgtcattgcagaggatgtgaagctcctccagttccatgtggccaccatggtggacaatgagctgcctggcttgccccgtgccatgcagaagtctgggcgtcccctcaagtccctgaagcagcggttgaagggcaaggaaggccgggtgcgagggaacctgatgggcaaaagagtggacttctcggcccgtactgtcatcacccccgaccccaacctctccattgaccaggttggcgtgccccgctccattgctgccaacatgacctttgcggagattgtcacccccttcaacattgacagacttcaagaactagtgcgcagggggaacagtcagtacccaggcgccaagtacatcatccgagacaatggtgatcgcattgacttgcgtttccaccccaagcccagtgaccttcacctgcagaccggctataaggtggaacggcacatgtgtgatggggacattgttatcttcaaccggcagccaactctgcacaaaatgtccatgatggggcatcgggtccgcattctcccatggtctacctttcgcttgaatcttagcgtgacaactccgtacaatgcagactttgacggggatgagatgaacttgcacctgccacagtctctggagacgcgagcagagatccaggagctggccatggttcctcgcatgattgtcaccccccagagcaatcggcctgtcatgggtattgtgcaggacacactcacagcagtgcgcaaattcaccaagagagacgtcttcctggagcggggtgaagtgatgaacctcctgatgttcctgtcgacgtgggatgggaaggtcccacagccggccatcctaaagccccggcccctgtggacaggcaagcaaatcttctccctcatcatacctggtcacatcaattgtatccgtacccacagcacccatcccgatgatgaagacagtggcccttacaagcacatctctcctggggacaccaaggtggtggtggagaatggggagctgatcatgggcatcctgtgtaagaagtctctgggcacgtcagctggctccctggtccacatctcctacctagagatgggtcatgacatcactcgcctcttctactccaacattcagactgtcattaacaactggctcctcatcgagggtcatactattggcattggggactccattgctgattctaagacttaccaggacattcagaacactattaagaaggccaagcaggacgtaatagaggtcatcgagaaggcacacaacaatgagctggagcccaccccagggaacactctgcggcagacgtttgagaatcaggtgaaccgcattcttaacgatgcccgagacaagactggctcctctgctcagaaatccctgtctgaatacaacaacttcaagtctatggtcgtgtccggagctaaaggttccaagattaacatctcccaggtcattgctgtcgttggacagcagaacgtcgagggcaagcggattccatttggcttcaagcaccggactctgcctcacttcatcaaggatgactacgggcctgagagccgtggctttgtggagaactcctacctagccggcctcacacccactgagttctttttccacgccatggggggtcgtgaggggctcattgacacggctgtcaagactgctgagactggatacatccagcggcggctgatcaagtccatggagtcagtgatggtgaagtacgacgcgactgtgcggaactccatcaaccaggtggtgcagctgcgctacggcgaagacggcctggcaggcgagagcgttgagttccagaacctggctacgcttaagccttccaacaaggcttttgagaagaagttccgctttgattataccaatgagagggccctgcggcgcactctgcaggaggacctggtgaaggacgtgctgagcaacgcacacatccagaacgagttggagcgggaatttgagcggatgcgggaggatcgggaggtgctcagggtcatcttcccaactggagacagcaaggtcgtcctcccctgtaacctgctgcggatgatctggaatgctcagaaaatcttccacatcaacccacgccttccctccgacctgcaccccatcaaagtggtggagggagtcaaggaattgagcaagaagctggtgattgtgaatggggatgacccactaagtcgacaggcccaggaaaatgccacgctgctcttcaacatccacctgcggtccacgttgtgttcccgccgcatggcagaggagtttcggctcagtggggaggccttcgactggctgcttggggagattgagtccaagttcaaccaagccattgcgcatcccggggaaatggtgggggctctggctgcgcagtcccttggagaacctgccacccagatgaccttgaataccttccactatgctggtgtgtctgccaagaatgtgacgctgggtgtgccccgacttaaggagctcatcaacatttccaagaagccaaagactccttcgcttactgtcttcctgttgggccagtccgctcgagatgctgagagagccaaggatattctgtgccgtctggagcatacaacgttgaggaaggtgactgccaacacagccatctactatgaccccaacccccagagcacggtggtggcagaggatcaggaatgggtgaatgtctactatgaaatgcctgactttgatgtggcccgaatctccccctggctgttgcgggtggagctggatcggaagcacatgactgaccggaagctcaccatggagcagattgctgaaaagatcaatgctggttttggtgacgacttgaactgcatctttaatgatgacaatgcagagaagctggtgctccgtattcgcatcatgaacagcgatgagaacaagatgcaagaggaggaagaggtggtggacaagatggatgatgatgtcttcctgcgctgcatcgagtccaacatgctgacagatatgaccctgcagggcatcgagcagatcagcaaggtgtacatgcacttgccacagacagacaacaagaagaagatcatcatcacggaggatggggaattcaaggccctgcaggagtggatcctggagacggacggcgtgagcttgatgcgggtgctgagtgagaaggacgtggaccccgtacgcaccacgtccaatgacattgtggagatcttcacggtgctgggcattgaagccgtgcggaaggccctggagcgggagctgtaccacgtcatctcctttgatggctcctatgtcaattaccgacacttggctctcttgtgtgataccatgacctgtcgtggccacttgatggccatcacccgacacggagtcaaccgccaggacacaggaccactcatgaagtgttcctttgaggaaacggtggacgtgcttatggaagcagccgcacacggtgagagtgaccccatgaagggggtctctgagaatatcatgctgggccagctggctccggccggcactggctgctttgacctcctgcttgatgcagagaagtgcaagtatggcatggagatccccaccaatatccccggcctgggggctgctggacccaccggcatgttctttggttcagcacccagtcccatgggtggaatctctcctgccatgacaccttggaaccagggtgcaacccctgcctatggcgcctggtcccccagtgttgggagtggaatgaccccaggggcagccggtttctctcccagtgctgcgtcagatgccagcggcttcagcccaggttactcccctgcctggtctcccacaccgggctccccggggtccccaggtccctcaagcccctacatcccttcaccaggtggcgccatgtctcccagctactcgccaacgtcacctgcctacgagccccgctctcctgggggctacacaccccagagtccctcttattcccccacttcaccctcctactcccctacctctccatcctattctccaaccagtcccaactatagtcccacatcacccagctattcgccaacgtcacccagctactcaccgacctctcccagctactcacccacctctcccagctactcgcccacctctcccagctattcgcccacctctcccagctactcacccacttcccctagctattcgcccacttcccctagctactcgccaacgtctcccagctactcgccgacatctcccagctactcgccaacttcacccagctattctcccacttctcccagctactcacctacctctccaagctattcacccacctcccccagctactcacccacttccccaagttactcacccaccagcccgaactattctccaaccagtcccaattacaccccaacatcacccagctacagcccgacatcacccagctattcccctactagtcccaactacacacctaccagccctaactacagcccaacctctccaagctactctccaacatcacccagctattccccgacctcaccaagttactccccttccagcccacgatacacaccacagtctccaacctataccccaagctcacccagctacagccccagttcgcccagctacagcccaacctcacccaagtacaccccaaccagtccttcttatagtcccagctccccagagtataccccaacctctcccaagtactcacctaccagtcccaaatattcacccacctctcccaagtactcgcctaccagtcccacctattcacccaccaccccaaaatactccccaacatctcctacttattccccaacctctccagtctacaccccaacctctcccaagtactcacctactagccccacttactcgcccacttcccccaagtactcgcccaccagccccacctactcgcccacctcccccaaaggctcaacctactctcccacttcccctggttactcgcccaccagccccacctacagtctcacaagcccggctatcagcccggatgacagtgacgaggagaactgagggcacgtggggtgcggcagcgggctagggcccagggcagcttgcccgtgctgccgtgcagttcttgcctccctcacggggcgtcacccccagcccagctccgttgtacataaataccttgtgacagagctcccggtgaacttctggatcccgtttctgatgcagattcttgtcttgttctccacttgtgctgttagaactcactggcccagtggtgttctacctcctaccccacccaccccctgcctgtccccaaattgaagatccttccttgcctgtggcttgatgcggggcgggtaaagggtattttaacttaggggtagttcctgctgtgagtggttacagctgatcctcgggaagaacaaagctaaagctgccttttgtctgttattttatttttttgaagtttaaataaagtttactaattttgacc

SEQ ID NO: 129586 - DNA, 941 bp, Homo sapiens
  misc_feature (1)...(941): n = a,t,c or g
atgggggatntgtctgtagttctgcggccgctgctggtggttgcagcagcgacggcgacaacgccggtggcggcggcggcggcgacgaacacagcgaagaagactgctactgtgatggttggagaaatggtggcaggagaaagaggagtactgcagatgggtcatgacatcactcgcttcttctactccaacattcagactgtcattaacaactggctcctcatcgagggtcatactattggcattggggactccattgctgattctaagacttaccaggacattcagaacactattaagaaggccaagcaggacgtaatagagacgtttgagaatcaggtgccccgcattcttaacgatgcccgagacaagactggctcctctgctcagaaatccctgtctgaatacaataacttcaagtctatggtcgtgtccggagctaaaggttccaagattaacatctcccaggggggggggtcccagggagggagggggggtcccccgatcagcatgtggctcctggcgctgtgtctggtggggctggcgggggctcaacgcgggggagggggtcccggcggcggcgcccccgggcggccccggcctgggcctcggcagcctcggcgaggagcgcttcccggtggtgaacacggcctacgggcgagtgcgcggtgtgcggcgcgagctcaacaacgagatcctgggccccgtcgtgcagttcttgggcgtgccctacgccacgccgcccctgggcgcccgccgcttccagccgcctgaggcgcccgcctcgtggcccggcgtgcgcaacgccaccaccctgccgcccgcctgcccgcagaacctgcacggggcgctgcccgccatcatgctgcctgtgtggttcaccgacaacttggaggcggccgccacctacggggggtgctttagagtccccaaaaaggcgt

SEQ ID NO: 129587 - DNA, 1171 bp, Homo sapiens; identical to SEQ ID NO: 118725

SEQ ID NO: 129588 - DNA, 307 bp, Homo sapiens
atggaatactatgcagccataaaaaaggatgagttcatgtccttagcagggacatggatgaagctggaaaccatcattgtcagcaaactatcacaaggacagaaaaccaaacaccacatgttctcactcataggagtccacctgtcccgagttggaagtctgaactcatgttcctggattcctcccatgcatcttggtgctggtgtggggcctgaactcagccaatccgcaacacctccaggagtcttcctcttagatgctgaggccacggagaaggaagcagcacaaagaatgaaccctggagagg

SEQ ID NO: 129589 - DNA, 381 bp, Homo sapiens
ctacccccaccccatgacaggctctggtgtgtgatgttccccaccctgtgtccaagtgttctcattgttcaattcccgcctatgagtgagaacatgcggtgtttggttttctgtccttgcaatagtttgctcagaatgatggtttccagcttcatccatgtccctacaaaggacatgaactcggggatcctctagagtcgacctgcagacattgaactcttttccataaatcttgttaataaaaagatctttctgaagggcaagttcggggatcccttgtctctgcaaaggcagctgagaaatatagtcttcagtatgccttgttgtttccccagctttttgctgccctgggtcttcagccagctgtccgtaaaacctcat

SEQ ID NO: 129590 - DNA, 278 bp, Homo sapiens; identical to SEQ ID NO: 118728

SEQ ID NO: 129591 - DNA, 840 bp, Homo sapiens; identical to SEQ ID NO: 126212

SEQ ID NO: 129592 - DNA, 891 bp, Homo sapiens; identical to SEQ ID NO: 126208

SEQ ID NO: 129593 - DNA, 3105 bp, Homo sapiens; identical to SEQ ID NO: 128668

SEQ ID NO: 129594 - DNA, 779 bp, Homo sapiens
attcccatgaaggaccacgatgccatcaagctgttcattgggcagatcccccgcaacctggatgagaaggacctcaagcccctcttcgaggagtttggcaaaatctacgagcttacggttctgaaggacaggttcacaggcatgcacaaaggctgcgccttcctcacctactgcgagcgtgagtcagcgctgaaggcccagagcgcgctgcacgagcagaagactctgcccgggatgaaccggccgatccaggtgaagcctgcggacagcgagagccgaggagaagataaaaaactcttcgtgggcatgctcaacaagcaacagtccgaggacgacgtgcgccgcccttttcgaggcctttgggaacatcgaggagtgcaccatcctgcgcgggcccgaacggcaaacagcaaaggggtgcgcctttgtgaagtactcctccccacgccgaagccgcaggccgcccatcaacgcgcttacacggcagccagaccatgccgggagctttcgttccagtttgggtgggtcaagtttcggccgacaccgacaaggagcgcacgatgcgggcgaatgcagcagatggctggccagatgggcatgttcaaccccatggccatccctttcggggcctacggcgcctacgctcaggcactgatgcagcagcaagcggccctgatggcatcagtcgcgcagggcggctacctgaaccccatggctgccttcgctgccgcccagatgcagcagatggcggccctcaacatgaatggcctggcggccgc

SEQ ID NO: 129595 - DNA, 1416 bp, Homo sapiens
  misc_feature (1)...(1416): n = a,t,c or g
atggaatactatgcagccataaaaaaggatgagttcatctcctttgtagggacatggatgaagctggaaaccatcattctgagcaaactatcacaaatgcagaaaaccaaacaccgcatattctcactcatagtgctatgtgacatcacagacatcctaaaagaattcactgtggcagaagcagggggattcgcattgaacgagatcatgaaagaaatctgcaagagcaggttctcagcaaaggtcagcctgcactggaagatgtggcacagcacggccagcctgggctaccacagggtgaacgtgaccaaccctgatccccttaacctgtgtctaggccactgctggctggggctcagagacactggtcagaaacaggcctgcggtggccctggggtctgccctggcatgttccggagggcctgcggaggaaacgccccgtgcaaggaggccccctcagtgactgaggcttcatctccagatggcagcgtcctctgcctcggaagtcatgttcccatcaccccggcccctttatcttcagcacaaatggtttgtcacatggtggaggacaggagaacagtggagctcatccttggtgccacacacaaccttttcttctccaccagccccttaacttggtctcttagagccatccctggcaattgtgtcctgtttctaaaggattatgtcacagagcctgtccgatcccaatcaatactgcacattgcaggacccaccttcaaacagacccctaacctcccctttctgaaatttcccgaggccaccaaggcccacgggcccaacgtataccagaatgactctacctgccctgaacctactgcccaggtttcccactggtcatctgtgtcctcaactctaattgccagcccggtccctggcccggaagatagaaaactcttcgtgggcatgctcaacaagcaacagtccgaggacgacgtgcgccgccttttcgaggcctttgggaacatcgaggagtgcaccatcctgcgcgggcccgacggcaacagcaaggctcggcctctcgcgtcctcgcagggtgcgccttntgtgaagtactcctcccacgccgaggcgcaggccgccatcaacgcgctacacggcagccagaccatgccgctgatgcagcagcaagcggccctgatggcatcagtcgcgcagggcggctacctgaaccccatggctgccttcgctgccgcccagatgcagcagatggcggccctcaacatgnaatggcctggcggccgcacctatgaccccaacctcaggccaatgggcaacctgctgcggaagaaattgttcgccaatggcatccacccctacccagcacagagccccaccgccgcggaccccctgcagcaggcctacgccggagtgcagcagtatgcaggtcgttag

SEQ ID NO: 129596 - DNA, 3587 bp, Homo sapiens
  misc_feature (1)...(3587): n = a,t,c or g
tcacacaagccggtgttgtgtcctccgcgctgccccgacgtctgccccgaaaggcttcccgggcgggacgctgggagagggatccccttgggaaaccaggtggggccgctgggcctgggctgcacgccgcggaggtgcgagagcccagagcagcagcatcgcttcctgcccctcgcgagctccaggagaagtttcctcctccctctctccaccagcgcccccaaccatagagccagggtcgcccctgctctgagatctgcgaaaggactccccatgggaacacagacaatgtgacaagagagaacctggaaactccgcacctccggctccccacagctggggttttgctgtcttcaaccctcgggcgggggacgtccggcagctctgcaaacgcgcagacacgcgaaccccatcgcctcgcgcgccctttggctccgctggtgcgtgtcggggatgcggccgcgcaggcgctcgctccctggcttcccccaaagcccgaacctgcatctcctctgcgaggcgcagggcgggaggaccgctgcagttgggagccggctccggacaggcaaagcgacccgacaggtgaacgcggcgggagggagcaaacgcgtaaaaaaccctgcacttacttcttcgctggcgccttccccgggaggcgttttggcggggttccaggagccgccggggcggccgcaggtagcatgttgtgcggcaactgccgcaggcgggatccgggcgggcgagcggcggcggcggcggctgcagcggcggccccttgggctcagaagctgcggcggctgcggctgcagcggcgggggccccctggctgtcgttagtaaatggtgagctttccacgtcttttctccggtagcaccagccgatgaacttttcagtaattactttttttttttcttcaaacaagaaaacaacactcacagtagcctgtggctgccagtggatttcagagctcaagctagtgataaagggctggtttagctctgcccttctctccttctcttcaccccatataatcttttcttcccagaaacatattttgatttcactttggcctgtggggtatgtcacaggtgtaggcggtttcaagccattatgaaaaagctccaggtgcctggtggtcatgatatttttccaatttggcaggtggtattctatatttgtagataagattgcctcactgagaagtattcttgcatcccaggagtaaagccaacttgatcgtggtgaattaaactttttgatgtgttgctggttttggtttgccagtatgttgttgagaatttttgtgtgtatgttcttcagcgacattggttggtagtttcttcttcttcttgtgtttttggcaggttttggtatcacagtgatgctggcttcaccgaatgagttggggaaaagttcctcctcctcattgactagtttagcagaattggtactacctcttcttttcacaactcccccagtcccccacccagtgacaggccccagtgtgtgatattcccctccctgtgtccaagtgttcttattgttcaattccaacctatgattgagaacatgcggtgtttggttttcggttcttgtgatagtttgctcagaatgatggtttccagcttcatccatgtccctgttcactctggtgatagtttcttttgctgtgcagaggctctttagtttaattagatcccatttgtctattttggcttttgtggccattgcttttggtgttttagtcatgaagtccttgcctatgcctatgtcctgaatggtattgcctaggttttcttctagggtttttacggttttaggtctaacatttaagtctttaatccatcttgaattaatttttgtataaggtgtaaggaagggatccagtttcagctttctccatatggctagccagtttttccagcaccatttattaaatagggaatcctttcctcgttgcttgtttttgtcgggtttgtgaaagatcagatggttgtagatgtgtggtattatttctgaggtctctgttctgttccattggtctatatatctgttttggtacccagtaccatgctgttttggttactgtagccttgcagtatagtttgaagtcaggtagcgtgatgcctccagctttgttctttttgcttaggattgtcttggcaatgcaggctcttttttggttccatatgaactttaaagtagttttttccaattctgtgaagaaagtcattggtaacttgatggggatagcactgaatctataaattactttgggcagcatggccattttcacaatgttgactcttcctatccatgagcatggaatgttcttccaatcgtttgtgtcctcttttatttccttgagcagtggtttgtagttctccttgaagagctctttcacattccttgaaagttggattcctaggtattttattctctttgtagcaattgtgaatgggagttcactcatgatttggctctctatttgtctgatattggtatataggaatgcttgtgatttttgcacgttgattttgtatcctgagactttgctgaagttgcttatcagcttaaggagatttggggctgacatgatggggttttctaaatatacaatcatgtcatctgcaaacagggacaatttgacttcctcttttcctaattgaataccctttatttctttctcttgcctgattgccctggccagaacttccaatactatgagtgagaacatgcggtgtttggttttttgcccttgcgatanttngctgacgatagtttgctgagaatgatggtttccagcttcatccatgtccctacaaaggacatgaactcatcatttttttatggctgcacagtattccatggtggtgtatgtgccacattttcttaatccagtctatcgttgatgggcatttgggttggttccaggtctttgctattgtgaatagtgccgcaataaacataggtgtgcatgcgtctttatagtagcatgatttataatcttttgggtatatacccagtaatgggatctctgggttaaatggtatttctggttctagatccttgaggaattgccacactgtcttccacaatggttgaactagtttacagtcccaccaacagtgtaaaagtgttcctatttctccacatcctctccggcatctgttgtttcctgactttttaatgatcgccattctaactgctgtgagatggtatctcattgtggttttgatttgcatttctctgatggccggtgatgatgagcattttttcatgtgtctgttggctgcataaatatcttcttttgagaagtgtctgtacctatcctttgcccactttttgatggggttgtttgtttttttcttgtaaatttgtttgagttctttgtagattttggatattagccctttgtcagatgagtagattgcaaaaattttctcccattctgtaggttgcctgttcactctgatggtagtttcttttgctgtgcagaagctcttcagtttaattagatcccatttgtcaattttggcttttgtagccattgcttttggtgttttagacacgaagtccttgcccat

SEQ ID NO: 129597 - DNA, 768 bp, Homo sapiens
atgtgtgactttgggaaatccacatcactcccagcatcgccaacttcctcatctgcaaatggacgtgataacagcacctaccgcttaaaggagcagggaggattcatgcattctgtggcctccagggacagctgtgcagaatcggcccgctacacagatgcccactatgccaagtcgggctatggtgcctacaccccatcctcctatggggccaatctggctgcctccttactggagaaggagaaacttggtttcaagccggtccccaccagcagcttcctcacccgtccccgtacctatggcccctcctccctcctggactatgaccggggccgccccctgctgagacccgacatcactgggggtggtaagcgggcagagagccagacccggggtactgagcggcctttaggcagtggcctcagcgggggcagcggattcccttatggagtgaccaacaactgcctcagctacctgcccatcaatgcctatgaccagggggtgaccctaacccagaagctggacagccaatcagacctggcccgggatttctccagcctccggacctcagatagctaccggatagaccccaggaacctgggccgcagccccatgctggcccggacgcgcaaggagctctgcaccctgcaggggctctaccagacagccagctgccctgaatacctggtcgactacctggagaactatggtcgcaagggcagtgcatctcaggtgccctcccaggccccctccctcacgagtccctga

SEQ ID NO: 129598 - DNA, 2251 bp, Homo sapiens
tttcgtctttactgatttgggggtggtttttagtttaatttttcttttctagcttcccatcgacggtcagtgcgcacgttgtaatcagctgaggccatgtcaggagacggagccacggagcaggcagctgagtatgtcccagagaaggtgaagaaagcggaaaagaaattagaagagaatccatatgaccttgatgcttggagcattctcattcgagaggcacagaatcaacctatagacaaagcacggaagacttatgaacgccttgttgcccagttccccagttctggcagattctggaaactgtacattgaagcagagattaaagctaaaaattatgacaagggtgaaaagctatttcagagatgccttatgaaggttttgcacattgatttatggaagtgttatctttcatatgtccgagaaaccaaggggtaaactaccaagttacaaaggaaaaatggctcaagcatatgactttgcactggataaaattggaatggaaattatgtcctatcagatttgggtggattacatcaatttcctaaaaggcgtggaagctgtaggatcttatgcagaaaatcaaagaataacagctgtccgaagagtttatcaacgaggttgtgttaatccgatgatcaacattgaacagctctggagagactataacaagtatgaagagggtatcaatattcatttagctaaaaaaatgattgaagatcggagtagagattatatgaatgctagacgtgtagcaaaggaatatgagacagtaatgaaaggcttggaccgtaatgctccctcggtgcctcctcagaatactcctcaagaagctcaacaagtagatatgtggaagaaatatatacagtgggaaaagagcaaccctcttcgtacagaggatcagacccttataacaaaaagagttatgtttgcttatgaacagtgcctgcttgtgctgggccatcaccctgatatttggtatgaagctgcccagtatcttgagcagtcaagtaaactgctcgcagaaaagggagatatgaataatgccaaattatttagtgatgaagctgctaatatatatgaaagagccataagcactttattgaagaagaatatgcttctttattttgcatatgcagattatgaagagagtcgcatgaagtatgaaaaggttcacagtatatataacagacttctggcaattgaggatattgaccctaccttggtatatatccaatatatgaaatttgcacggagagcagaaggcatcaaatctggaagaatgatatttaaaaaagcaagagaagataccagaacccgccaccatgtctatgttactgcagcactcatggaatattactgtagtaaggacaaatctgttgcctttaagatttttgagctggggctaaaaaaatatggagacattccagagtatgtcctggcctatattgactatctttctcacctcaatgaggacaataatacccgagttttgtttgaacgagttttaacatctggaagccttcctcctgagaagtctggagaaatctgggcccgatttctagcatttgaaagtaatattggtgatctagctagtatactcaaagtggagaaaagacggtttacagcattcaaagaagagtatgaagggaaagaaacggctttactagtagatagatacaagttcatggatttatatccttgctctgcaagtgaattaaaagcacttggttataaggatgtctcccgtgctaagctagcagctataattccggacccagttgtagctccttctatagtgcctgttctgaaagatgaagtggatagaaaaccagaataccctaaaccagacactcagcagatgattccatttcagccacgacatttagcacctccaggtttacaccctgtacctggtggagtgttcccagtccctcctgcagctgttgttttaatgaaacttctccctcctcctatctgtttccagggtccttttgtacaagtggatgaactgatggaaattttccgaagatgcaagataccaaatactgttgaggaagctgtgaggatcattactggtggggccccagagctagctgtagaaggcaacggccccgtggaaagtaatgcagtactcaccaaggccgtcaaaaggcccaacgaggattcagatgaagatgaagaaaagggagccgttgtcccccctgttcatgacatttacagagcacggcagcagaagcggattcggtag

SEQ ID NO: 129599 - DNA, 618 bp, Homo sapiens
gcacgttgtaatcagctgaggccatgtcaggagacggagccacggagcaggcagctgagtatgtcccagagaaggtgaagaaagcggaaaagaaattagaagagaatccatatgaccttgatgcttggagcatttctcattcgagaggcacaggtttagtgatataggattacatttccttctctatgggtccaatcacactacttggttctgccagtgaataatattttcataatcctaacattgtaaatgctgtttattggttttcaattttagaatcaaccctatagacaaagcacggaagacttatgaacgccttgttgcccagttccccagttctggcagattctggaaactgtacattgaagcagaggttactattttattttattttttcttatatcagtattgcagcattcacctgtagtgataagaaaacaagttaggaacatagccaatttaggacaaggaggatttaaatgtgtcttacctttattttgtaaaatagagtataaaggaggtaattaaaatgaatttttgaaatttgggtcttttacaagctgatgattgttgcattttggagttgcaacaacattaaaacagtttcaaaggtaaaaa

SEQ ID NO: 129600 - DNA, 631 bp, Homo sapiens
  misc_feature (1)...(631): n = a,t,c or g
catttnaattcatatttgattgggcggtggcgattggtgttggcggtctggctcagctgggcagggggtaactttactgatttgggggtggtttttagtttaatttttcttttctagcttcccatcgacggtcagtgcgcacgttgtaatcagctgaggccatgtcaggagacggagccacggagcaggcagctgagtatgtcccagagaaggttaagaaagcggaaaaggaatttggaggagaatccatatgaccttgatgcttggagcattctcattcgagaggcacagaatcaacctatagacaaagcacggaagacttatgaacgccttgttgcccagttccccagttctggcagattctggaaactgtacattgaagcagaggttactattttattttattttattttttcttatatcagtattgcagcattcactgtagtgatagaaaacaagttaggaacatagccaattaggacaaggaggatttaaatgtgtcttacctttattttgtaaaataggtataaaggagtaattaaaatgaatttttgaaatttgggtcttttacaagatgatgattagttgcattttggagttgcaacaacattaaaacagtttcaatggtaaa

SEQ ID NO: 129601 - DNA, 837 bp, Homo sapiens
atggatgatgatattgctgcgctcgttgttgacaacagctctggcatgtgcaaggccggcttcgcgggtgacgatgtcccctgggccatcttcccttccatcgtggggtgcaccaggcaccaggtcatgatgctgcatgtggctcccgaggagcaccctgtgctgctgaccgaggcccccctgaaccccaaagccaactgtgagaagatgacccagatcatgtttgagaccttcaacaccccagccatgtatgtggccatccaggccatgctgtccctgtacgcctccgtccgtaccgcccatgtacaagggcttcacaccacggccgagcgggaaatcgtgcgtgacatcaagaagctgtgctacgtcgccctggacttcgagcgggagatggccatggtggcctccagctcctccctggagaagagctacaagctgctcgatggccaggtcatcaccatcggcaacgagcggttccactgccccgaggcgctcttccagccttccttcctgggcatggaatcctgtggcatccacaaaactaccttcaactacatcatgaagtgtgacgtggacatctgcaaagacctgtacaccaacacagtgctgtctggcggcaccaccatgtaccctggcatcaccaacaggatgcagaagaagatcaccgccctagcacccagcatgatgaagatcaagatcattgctcctcccgagcgcaagtactccgtgtggatcagcggctccatcctggcctcgctgtctaccttccagcagatgtggatcagcaagcagaagtatgaccagtccggcccctccatcgtccacgaatgcttctag

SEQ ID NO: 129602 - DNA, 732 bp, Homo sapiens
atgccactgagaacaaaagaatttgggctcatgatggaaagacttagtgaggacacagaagagaccaccgaagatcaaagacaagaagttgagaaggcagcctccaagacacgggccctccgccggcgtcagcgtaaagcccagagacctcctgctcttgaggcacccaaggagatcccaccagaagctgtgaaggagtatgttgacatcatggaatggctggtggggactcacttggccactggggagtcagatggaaaacaagaggaagaagggcagcagcaggaggaggaagggatgtatccagatccaggtctcttgagctacatcaatgagctgtgttctcagaaggtctttgtctccaagcccactatgaccctggaggagggactgccattggctgtgcaggagtgggagcacaccagcaactttgaccggatgatcttttatgagatggcagaaagggcagctgccgcaactgtgcctccacagggaatcacactgctctccgtatccccagccttccttcctgggcatggaacccgtgacatccatgaaactaccttcaactccatcatgaagtgtgacgtggacatccataaaggcctgtacgccaatgcagtgctgtccagcggcaccaccatgtaccctggcatcgcccaacaggatgcaaaaggagatcactgccctggctcccagcatgatgaagatcaagattattgctcctgctga

SEQ ID NO: 129603 - DNA, 1446 bp, Homo sapiens
  misc_feature (1)...(1446): n = a,t,c or g
atggaagaagagatcgccgcgctggtcattgacaatggctccggcatgtgcaaagctggttttgctggggacgacgctccccgagccgtgtttccttccatcgtcgggcgccccagacaccagggcgtcatggtgggcatgggccagaaggactcctacgtgggcgacgaggcccagagcaagcgtggcatcctgaccctgaagtaccccattgagcatggcatcgtcaccaactgggacgacatggagaagatctggcaccacaccttctacaacgagctgcgcgtggccccggaggagcacccagtgctgctgaccgaggcccccctgaaccccaaggccaacagagagaagatgactcagattatgtttgagaccttcaacaccccggccatgtacgtggccatccaggccgtgctgtccctctacgcctctgggcgcaccactggcattgtcatggactctggagacggggtcacccacacggtgcccatctacgaggggctacgccctcccccacgccatcctgcgtctggacctggctggccgggacctgaccgactacctcatgaagatcctcactgagcgaggctacagcttcaccaccacggccgagcgggaaatcgtgcgcgacatcaaggagaagctgtgctacgtcgccctggacttcgagcaagaagatggccacggctgctttccagctcctccctggagaagagctacgagctgcctgacggnccaaggtcatcaaccaattggcaattgagcgggttccgcttgcccctgaggcactctttccagccttccttcctggggcatggagtcctgtggacatccacgaaactaccttcagactccatcatgaaagtgtgacgtggacatccgcaaagacctgtacgaccaacacagtgctgtctggacggacaccaccatgtaccctgggcattgccgacaggatgcagaaggagatcactgccctggcacccagcacaatgaagatcaagatcattgctcctcctgagcgcaagtactccgtgtggatcggcgggttccatccttgggcctggttgtcccacctttccagcaagatgtgggttcagcaagcaaggagtatgacggagtccgggcccctccattcgtccaccgcaaatgggttcttaggcggactattgactttagttgcgtttacaccctttctttggacaaaaccttaactttgcgcaggaaaacaaggatgaggattgggcatggctttatttgttttttttgttttgttttgggttttttttttttttttgggcttgacttcagggatttaaaaactgggaacgggtggaagggtgacaggcagtcggttggggagcgagcatccccccaaagtttcacaatgtgggccgaggatttgattgcacatgttgtttttttnaatagtcattcaaatatgga

SEQ ID NO: 129604 - DNA, 2383 bp, Homo sapiens
atgaaacagataacctttgctccccgtaatcacctgctcaccaataccaatacctggacgcccgacagccagtggctggtatttgacatgcgtacttctggcgcgtcgtttaccggcgagaccattgagcgtgtgaatataccaaccggttatgtcgagaagccaaataaacagtgtagacactccgtcactcgctacggccacggcggccactcggatcacactccgtcactcactgtggccacagtggccactcagatcacaccccgtcactcgggccacggcagccactgtgatcgcaacctgtcacttgctacagccacagcagccactctgatcacaccccatcacttgctatggccacgatggccccttggatcacactctgtcacttggtgtggccacggtggccactcggatcacactccatcacccactacggccacagcagtcactcggatcacatcccgtcacccactacggccacagcagtcactcggatcacatcccgtcactcactacagccatggcagccactctgattgcattcccgtcactcgctatgcccacggcggccactcagatcacactccatcacttgctatggccacggcagccactcagatggcactctgtcactcactatggccacggcagccacttggatacttggtcaataaaataagaagaaagcgttgtacggatggggtatcgccaagcggtaaggcaccggtttttgataccggcattccctggttcgaatccaggtaccccagccatcttcttcgagtaagcggttcaccgcccggttattggggtatcgccaagcgccaccaaattctgaatgtatcgaatatgttcggcaaattcaaaaccaatttgttggggtatcgccaagcggtaaggcaccggattctgattccggcattccgaggttcgaatcctcgtaccccagccaatttattcaagacgcttaccttgatttcaaatatgcgtgcattagagaatgattttttcaattctcccccaagaaaaactgttcagtttggtggaactgtgacagaagtcttgctgaagtacaaaacggcgattgaaaaacggctggaaaaactggcggttgatccacatcgcgaccgtgcgcagatgctgaaagtcgaaaacgtccagcaggcgtggcagcaatggatcaacaaactgccgcccgcacgtcgtgaggatgaagacgtgaaagagatccgttggatgatagaagagttgcgcgttagttacttcgctcaacaacttggcaagaactctcgggcagaatccatgctgtggtccttccataaagcggctatagaagcggcacgcaccaatatcattcaggcgcaaacccgcgtcgaagcggcacaagccactgaacggcgcattgccgcagatatcgatgacagcgaactgaaagccccgcgtgacggacgcgtgcagtatcgggttgccaagccaggcgaagtgctggcggcaggcggtcgggtgctgaatatggtcgatctcagcgacgtctatatgactttcttcctgccaaccgaacaggcgggcacgctgaaactgggcggtgaagcccggctgatcctcgatgccgcgccagatctgcgtattcctgcaaccatcagttttgtcgccagtgtcgcccagttcacgccaaaaaccgtcgaaaccagcgatgaacggctgaaactgatgttccgcgtcaaagcgcgtatcccaccggaattactccagcagcatctggaatatgtcaaaaccggtttgccgggcgtagcgtggtcattcctgtattccatcaaccagacaatctgcttgcggttggatagcattgaagccaaattgcaagccctggaggctacttgtaaatccttagaagaaaagctggatctggtcacgaacaagcagcacagccccatccaggttcccatggttgccggctcccctctcaggacaacccagatgtgcaacaaagtgcgatggtgaacccgtgagcaactgtggtacctccacctgtcccacaacctacaactcagcagtaccaagggctggacgctggtgccaccacacgggtcccgcgaagcctgctgcgaagtgaaggaagccagacacaaaagtctccatcctgcgggagtcactcacaggacaattctggaggacgcaaagctgtaggagcgaggagagacaggtggtggttgggggccgggaaggggcctgactgcagaggggcaaaatgtgggctgcctctgtcggggcagaagtgccccactctagacccttaccaagtcgtcggctgtacatcgaaaacgggtgagccttatgtgtgtacgtgataccgcaataaacctgacttgtaaaagca

SEQ ID NO: 129605 - DNA, 1503 bp, Homo sapiens
atgtcatcgggccggcgggacgcattagccagagggctgggaaacagcggagatggcgcgccccacctgggagaacacaggcagctggaggacgtcggcggtgttactgtcacggtcacctggactgggcggttgcaggcggccggatgctggacccgcagcgtgagctccacggccgcagcagggaggcgagagccctcaaccagggacggagccgccctgtccacggagcctccagacccaccagaacgcctgggtcaccgcggctcccgggcgggcctcactgcgctgggacacgtcaggacacgtggcagctcccagcgcggtggaaggcctgagccctgggaacactggctggaaaatggaactcggaggacagagcttgtcgacggcgtctcgtatgaatcctggaggagacgcccgtgtcgagggcaattagaatccaggcttgttctggagaatcatgtagcgacagatgaagacgaacctgctttgaaatgccagcgactagaaatcaattgccaggatccatctataaagtcattcctgtattccatcaaccagacaatctgcttgcggttggatagcattgaagccaaattgcaagccctggaggctacttgtaaatccttagaagaaaagctggatctggtcacgaacaagcagcacagccccatccaggttcccatggttgccggctcccctctcaggacaacccagatgtgcaacaaagtgcgatggccatgcactggctctgtgtctcctgcatcttcacttgtctgcctggctggcggccagcggcaccagaccaaggacccgccgctatttccctgtgttcactgccttcctcttcgcaaggacaccgagagcccctggctctgggcctcccatctgcccttcctcccgcccatcgtcagcgtttacgagggtctgccacggttcccattccaccgtgacctggcaggagatgtcagaccgcagctgagggccctgctggtttcctacgaggaggctgcagatgggaatgaggacctcacggtcaagggcgtggacacctcccgcctgacagatgacacatttctgagctgtcttccccggaggccgggctgcaacccgagaaggcgccgcgccatcggccctcaccctgctccgcctaagctgctgcttttcctctgcaaatgccctgggctggacgtcaaaccacagtcaggtgcccccgtggataagctgcacccacctatccccaggagcacagccagcacctctcagggacgccgatatcacgttttggcagaaccgactatacctgctgtgtgcggcatgcagtttgtccagagcatacagcgagacctctctgaagacccccaaatggcctcgaccccggcttttgagggagggctggacagctcagcctcccgtttcctgcgcacgcaccccgatgctgcaagctgccatctgggaggcttggtattcgggttagagacaaacagcgcccgacggtaa

SEQ ID NO: 129606 - DNA, 925 bp, Homo sapiens
agctcctccttccctggggagccagcccctctaccgctccagcctctcccacctgggaccgcagcacctgcccccaggatcctccacctccggtgcagtcagtgcctccctccccagcggtccctcaagcagcccagggagcgtccctgccactgtgcccatgcagatgccaaagcccagcagagtccagcaggcgctcgcagaagcgaccccgaagccagagccagagccagagcaggtcataaaaaactacacggaagagctgaaagtgcccccagatgaggactgcatcatctgcatggagaagctgtccacagcgtctggatacagcgatgtgactgacagcaaggcaatcgggtccctagctgtgggccacctcaccaagtgcagccatgccttccacctgctgtgcctcctggccatgtactgcaacggcaataaggatggaagtctgcagtgtccctcctgcaaaaccatctatggagagaagacggggacccagccccagggaaagatggaggtattacggttccagatgtcgctccccggccacgaggactgcgggaccatcctcatagtttacagcattccccatggtatccagggccctgagcaccccaatcccggaaagccgttcactgccagagggtttccccgccagtgctaccttccagacaaacgcccagggccgcaaagtccttaagagctcctgaaggtggcctggaagaggcggctcatcttcacagtgggcacgtccagcaccacgggtgagacggacaccgtggtatggaacgagatccaccacaagacagagatggaccgcaacattacgggccacggctatcccgaccccaactacctgcagaacgtgctggctgagctggctgcccagggggtgaccgaggactgcctggagcagcagtga

SEQ ID NO: 129607 - DNA, 857 bp, Homo sapiens
  misc_feature (1)...(857): n = a,t,c or g
atgggtttagactggattattcgctttngtggcggcttcttacatcatgccagcttcttcgtggggagaggcaggacgctgcttatgtacttctctcttctaggagcgaccccgaagccagagccagagccagagcaggtcataaaaaactacacggaagagctgaaagtgcccccagatgaggactgcatcatctgcatggagaagctgtctgcagcgtctggatacagcgatgtgactgacagcaaggcagtcgggcccctggctgtgggctgcctcaccaagtgcagccacgccttccacctgctgtgcctcctggccatgtactgcaacggcaataagggccctgagcaccccaatcccggaaagccgttcactgccagagggtttccccgccagtgctaccttccagacaacgcccagggccgcaagagctggtgccctacacaccacagataacagcttgggacctggaagggaaggtcacagccaccaccttctccctggagcagccgcgctgtgtcttcgatgggcttgccagcaccaacgataccgtctggctcgtggtggccttcagcaatgcctccaggggcttccagaacccggagacactggctgacattccggcctccccacagctgctgaccgatggccactacatgacgctgcccgtgtctccggaccagctgccctgtgacgaccccatggcgggcagcggtggtgcccccgtgctgcgggtgggccatgaccacggctgccaccagcagcccttctgcaacgcgcccctccctggccctggaccctatcggtgggtggtccccaccggagccctgggactggggctgtgcttggggtag

SEQ ID NO: 129608 - DNA, 1374 bp, Homo sapiens
atgtcctttgcagggacatggttggagctggaaaccattattgtcagcaaacttatgcaggaacagaaagccaaacactgcatgttttctcttttatacttttgcaaaggcggtttcatcgtcacggcatctccagcccttcatagtgcctggcacatagatagagatttattatgggaattcactcacgtgattatggaggtcgagaagtccagtgatctgccatctgcaacgtggagaaccaggaaagctggtggcataactcagtctgagtctgaaggcctgagagccaagattatggggtggaagggaaagggctgcagtataagtctgtatgagctgttggctgctctgccagcccagctgcagccacatgtggatagccaggaagacctgaccttcctctgggatatgtttggtgaaaaaagcctgcattcattggtaaagaaggggaaaggggatcaggcatatcatgtgatgacagctggagccagggtgcagggaggggatgtgccacacactttactcaaccagatctccaaagaacgcactgactgtcagaaggatggcaccaagccacgagggatccgcccccacgacccaaacacctcccaccaggccccacctccaacactggggaccacaattcaatggaggttgctcgtccatgaaacacactccagtctgcagccacctgggagtgggaaccaagggcgagcgaaccgggcgggcaggggtggaacttgcggggactgcgggtatgaggaggagctacagagctgtcaccaatcagagcccagctttgttttctcttgccgaccaatgagggagttctgctggagaggcgtcttcaagtctgagacgcctatcgccttcgcagcctatcagcaggcccctcttacccgcgggcgagaaggttttagtggtctggatagaagatcagaccagccacaacattcccttaagccagcagagcaaaaccctctcttcaattcgatgaaggctgagagaggtaaggaagttacagaagaaaagttggaagctagaagaggttggttcatgaggtttaaggaaagaagctgcttccctaatgtaaaagtgcaaggtgaagcagcaaatgctgatatagaagctgtagcatgttatccagaatatctagctaagatcactgatgaaggtggctacactgaacaacagattttcagtgtagatgaaacagccttatattggaagaagatgccgtctcggactttcttagctagaaggaaaaattgccacagccatccatctttcagcagccagcaccttgttcagtcagcagccatcaacatcaaggcaaaatcctccaccagcaaaaagattatgactccctga

SEQ ID NO: 129609 - DNA, 906 bp, Homo sapiens
ctagtccaagtgtgaggaatgtggagatgaatgtggagaagtcttcgttccagaggaaagggcacaacagcgggccagctccaagcctaaaagtctgaaggctgaaaaaccagactgatggtcccggatgaagcgtaccgtttcccgattgattctctctgaataatgcccacctgcgcacttgtagaacctctcctcttgtggctttagcactccaaaaccaagtgccttggaagaagggaataatacgatgacttggtcttgaaatatctgttcagtgctaagctgcacaacttcaggggacatcatccatattgtaatagattgtgatggacatattctgagaggcacaatgtggatggtacccctggagttctgcaaggaagctgcccctagtgccaggctgggtcctgcagcctcaggtacaaggctgataaccacaaacccatactccaagccatcttccatagcccagactctaacagactcaggattcaggtctgcccctgcagacccagataccaggcccagccatgaagacctgagcaagtacagaggagcatagatcttcagggactcctccagggcgcccccggtgatctgcaggaaggagacccggcaggaagggtgccaagtgtggccgatctcatagcagttatgagggatggacttgctgagggccgccatgacgaggaacagcgcggagaagacaggagggggagagcctgagccctcaaagctgctgttgttggtcatgtattgccgtaactgagggccttctagatctctgtcacctagtttcttaataaacttgcttttgctttgcgctgcggacttgccctgaattctttcttgcgcaaaatccaagaaccctctcttggagtctaaatcaggatccctttccat

SEQ ID NO: 129610 - DNA, 560 bp, Homo sapiens
cacatcctcctggcatatgaggagtataacccgaggaagcccctccttcagaggaagcctctccagtcacctctgccctctccaatgacatgagtcctcccaggtgacctcagccctcccaggtgatgtccttccatggtgactctggctcttgcaggaggtgggctactgcagggacctgagccacatcgccgccttgttcctcctctatcttcctgaggaggatgcattctgggcactggtgcagctgctggccagtgagaggcactccctgcagggatttcacagcccaaatggcgggaccgtccaggggctccaagaccaacaggagcatgtggtagccacgtcacaacccaagaccatggggcatcaggacaagaaagatctatgtgggcagtgttccccgttaggctgcctcatccggatattgattgacgggatctctctcgggctcaccctgcgcctgtgggacgtgtatctggtagaaggcgaacaggcgttgatgccgataacaagaatcgcctttaaggttcagcagaagcgcctcacgaagacgtcca

SEQ ID NO: 129611 - DNA, 1942 bp, Homo sapiens
gctggtgctggcctctgggatggaggagcttcagaacagatccctgtttcaggctgacttcatcccgctggatggaattccagccaatgtgatccaaagagggaagcagtaccaggctgcagccctcgtcatgctgaagatggagcctcctgggaagctgctacccatggtcatccagtgttggacgcagggcctggtggaaggtgtttgggtcatggcttcatgctgtcctcctgataatgagtgtgtggagatcgtccacctcctccaccaaagggatgacacggtgagggtggaccctgagctgcaggcctgggatcaggagatcatggaggtggggctgtgccaggcccaggaccgagcacacacgaagggcacagacctgctgcacccccgcagcagtgcaaggccagctctagaggccatctcaatactgtatatgctttggctccaacctgaactcaatgccctgacgcttgggtacccccttgagcatcagaaagtatatgtctcaggccctgagcccaaagctgtgctgagacaatttcaaacagatctggacaacctggaaagggaaattgtggcccgaaatgagaaactagaccttccctatgactatctgaagcccagctacatagagaacatatcactatctgagatcaaatattctgtgagtgaattctcaggaaagctgatggttttaaagtgtggcacttccttgttctccacttactccctcctgccaccttgtgaagaagatgcctgcttccccttcaccttccgccatgattcccatcatgggcccttcacccttggcaggtggacaccattgaaactgccggggcaggtgtatgcccatttcatggcatttggggacaatgggactctctgtccaggtcccactgtcctcaagtccttgggaagatgcacacccctgctggagactccagagacccatgcagctgggtcccaccagggctccagagcccaagacccagcatccagggacggctccgggaagcctggtagctccgctaactccaacattcctcatttgacagcaaatgcagcaggagatgagacgcaagagcaagtggatggcaatgctgggaaaatgggagacatatcagaacagcaaaaaggtcatctgatgaagcgagtgtataagggcattcccatgaacgtccgggccgaggtgtggtcagtcctcctgaacattcaggaaatcaaggcgaaaaaccccagacaataccgggtcatgaaggagaagggcaagaggtcatctgagcacatccaccagatcgacctggctgtgagccagacactaaggaaccacatgttcttcagggatcgatatggaaccaagcagcaggaactattctacatcctcctggcatattcgaagtataacccagtggtgggctactgcagggacctgagccacatcgctgccttgttcctcctttatctgcctgaggaggacacattctgggcactggtgcagctgctggccagtgagaggcactcctgcagggtaggtgaacagctgcccctggggcttcacgcagccagacccggggatggccaccctggccagccaaggcaccttccttgtgtcgccagcttgttgggagcctttaggacgtctctgctgacggtcccaaaggaacccggaactgaccccccagagcccaagtcagacgcctttcatccccatcagcagaaggcatctcatcctccccgtggctgccctctgtgtcctggagccacgccctccggctctgattctgtgcagctggctctccgcaacctgagagtcctcctgcccttcagttgctcaggctccagctgcccttggtacccacgaaaggaggccctgcatcctggggggctggaggaacagcgggggctgcagcccctcatggggctggtgacaggctga

SEQ ID NO: 129612 - DNA, 465 bp, Homo sapiens
atgaaaaaagcatcccgaacaaccacagtcagccacccatccatggccccagctcttctgggcctgagcggctttactaaaggagttagacgagcccatactccagtcacttattttcataagcgctcgctgcagccgtgtatccgagccatagcgagcgaactggtgaggaagcaaagaagatctgttctgtcagatagctcttacgctcagcgcaagaagaaatatcctccgtgggaaaaactccaggacgggtgtcctatagaaattgcttcaacgcaaatagcgctaccagcgcgcattaggactggcgatgctgtcggaatggacgatatccccaaaggggccggtcagtaccggcataaccaagcctatgcttacagcatccagggtgacggtgccgaggatgacgatgagcgcattgttagatttcatacacggtgcctgactgcgctagcaatttaa

SEQ ID NO: 129613 - DNA, 6390 bp, Homo sapiens
atggcaaatgacttgccacacagcaattcaggggatggccagaaacccagttcccctgatttattcacggctccactcctggcagatcccaccgtgggcttcctccctaatgatgccgaggaactattcatctttctcacggaaataactgagatcaccattccatgccgagtaacagacccacagctggtggtgacactgcacgagaagaaaggggacgttgcactgcctgtcccctatgatcaccaacgtggcttttctggtatctttgaggacagaagctacatctgcaaaaccaccattggggacagggaggtggattctgatgcctactatgtctacagactccaggtgtcatccatcaacgtctctgtgaacgcagtgcagactgtggtccgccagggtgagaacatcaccctcatgtgcattgtgatcgggaatgaggtggtcaacttcgagtggacatacccccgcaaagaagtaatgtggggccaggcaggggtcggaggaggggccaggaacgggtggatatctggcttgcaggctgatttctccccggcccctcctgatttggggggcctgcccaacctgttgctgcagagtgggcggctggtggagccggtgactgacttcctcttggatatgccttaccacatccgctccatcctgcacatccccagtgccgagttagaagactcggggacctacacctgcaatgtgacggagagtgtgaatgaccatcaggatgaaaaggccatcaacatcaccgtggttgagagcggctacgtgcggctcctgggagaggtgggcacactacaatttgctgagctgcatcggagccggacactgcaggtagtgttcgaggcctacccaccgcccactgtcctgtggttcaaagacaaccgcaccctgggcgactccagcgctggcgaaatcgccctgtccacgcgcaacgtgtcggagacccggtatgtgtcagagctgacactggttcgcgtgaaggtggcagaggctggccactacaccatgcgggccttccatgaggatgctgaggtccagctctccttccagctacagatcaatgtccctgtccgagtgctggagctaagtgagagccaccctgacagtggggaacagacagtccgctgtcgtggccggggcatgccccagccgaacatcatctggtctgcctgcagagacctcaaaaggtgtccacgtgagctgccgcccacgctgctggggaacagttccgaagaggagagccagctggagactaacgtgacgtactgggaggaggagcaggagtttgaggtggtgagcacactgcgtctgcagcacgtggatcggccactgtcggtgcgctgcacgctgcgcaacgctgtgggccaggacacgcaggaggtcatcgtggtgccacactccttgccctttaaggtggtggtgatctcagccatcctggccctggtggtgctcaccatcatctcccttatcatcctcatcatgctttggcagaagaagccacgttacgagatccgatggaaggtgattgagtctgtgagctctgacggccatgagtacatctacgtggaccccatgcagctgccctatgactccacgtgggagctgccgcgggaccagcttgtgctggccacagcccgcagcagtgagaagcaagcccttatgtcggagctgaagatcatgagtcaccttgggccccacctgaacgtggtcaacctgttgggggcctgcaccaaaggaggacccatctatatcatcactgagtactgccgctacggagacctggtggactacctgcaccgcaacaaacacaccttcctgcagcaccactccgacaagcgccgcccgcccagcgcggagctctacagcaatgctctgcccgttgggctccccctgcccagccatgtgtccttgaccggggagagcgacggtggctacatggacatgagcaaggacgagtcggtggactatgtgcccatgctggacatgaaaggagacgtcaaatatgcagacatcgagtcctccaactacatggccccttacgataactacgttccctctgcccctgagaggacctgccgagcaactttgatcaacgagtctccagtgctaagctacatggacctcgtgggcttcagctaccaggtggccaatggcatggagtttctggcctccaagaacgtacgtgtggtgttggtggggcagagtgggggctgtggggagtgcgtccacagagacctggcggctaggaacgtgctcatctgtgaaggcaagctggtcaagatctgtgactttggcctggctcgagacatcatgcgggactcgaattacatctccaaaggcagcacctttttgcctttaaagtggatggctccggagagcatcttcaacagcctctacaccaccctgagcgacgtgtggtccttcgggatcctgctctgggagatcttcaccttgggtggcaccccttacccagagctgcccatgaacgagcagttctacaatgccatcaaacggggttaccgcatggcccagcctgcccatgcctccgacgagatctatgagatcatgcagaagtgctgggaagagaagtttgagattcggccccccttctcccagctggtgctgcttctcgagagactgttgggcgaaggttacaaaaaggcccgcttgcctgggttccatggcctccgatctcccctggacaccagctccgtcctctatactgccgtgcagcccaatgagggtgacaacgactatatcatccccctgcctgaccccaaacccgaggttgctgacgagggcccactggagggttcccccagcctagccagctccaccctgaatgaagtcaacacctcctcaaccatctcctgtgacagccccctggagccccaggacgaaccagagccagagccccagcttgagctccaggcccggattgaggccggcgtgctctgtgacaggcagctgctagagcccagattccaggtccaggtgagtcatgatcaggccccaggtaggagaagggcagacagagtgtccaaaagcgtgagagcacgaagtgaggagaaggtggagaagagagaagaggaagaggaagaggaagagaggaagcggagggaactgcggccaggcgagaagtgccaggaaactcagggagccacgagagactataagacagggactcagtcaggcaaagggaggcttatgggccaggtggaagcagaagtatgtggaacaggaagaaggagtgtgggggtgtatgcaggagctgcaagtgttcagtacagcagggagggtggatggagagagaagaggcagagatcagattgcaaaggcccctgtcagggaatcccagtgatagagcccagtgtccctgagctggtcgtgaagccaggagcaacggtgaccttgcgatgtgtgggcaatggcagcgtggaatgggatggccccccatcacctcactggaccctgtactctgatggctccagcagcatcctcagcaccaacaacgctaccttccaaaacacggggacctatcgctgcactgagcctggagaccccctgggaggcagcgccgccatccacctctatgtcaaagaccctgcccggccctggaacgtgctagcacaggaggtggtcgtgttcgaggaccaggacgcactactgccctgtctgctcacagacccggtgctggaagcaggcgtctcgctggtgcgtgtgcgtggccggcccctcatgcgccacaccaactactccttctcgccctggcatggcttcaccatccacagggccaagttcattcagagccaggactatcaatgcagtgccctgatgggtggcagaaaggtgatgtccatcaccatccggctgaaagtgcagaaaagggaggagagcaatatctctatcatgttcagggagcctgggtgttcaggggtctctcccccggtctcagtcatcccagggcccccagccttgacactggtgcctgcagagctggtgcggattcgaggggaggctgcccagatcgtgtgctcagccagcagcgttgatgttaactttgatgtcttcctccaacacaacaacaccaagctcgcaatccctcaacaatctgactttcataataaccgttaccaaaaagtcctgaccctcaacctcgatcaagtagatttccaacatgccggcaactactcctgcgtggccagcaacgtgcagggcaagcactccacctccatgttcttccgggtggtagagagtgcctacttgaacttgagctctgagcagaacctcatccaggaggtgaccgtgggggaggggctcaacctcaaagtcatggtggaggcctacccaggcctgcaaggttttaactggacctacctgggacccttttctgaccaccagcctgagcccaagcttgctaatgctaccaccaaggacacatacaggcacaccttcaccctctctctgccccgcctgaagccctctgaggctggccgctactccttcctggccagaaacccaggaggctggagagctctgacgtttgagctcacccttcgataccccccagaggtaagcgtcatatggacattcatcaacggctctggcacccttttgtgtgctgcctctgggtacccccagcccaacgtgacatggctgcagtgcagtggccacactgataggtgtgatgaggcccaagtgctgcaggtctgggatgacccataccctgaggtcctgagccaggagcccttccacaaggtgacggtgcagagcctgctgactgttgagaccttagagcacaaccaaacctacgagtgcagggcccacaacagcgtggggagtggctcctgggccttcatacccatctctgcaggagcccacacgcatcccccggatgagttcctcttcacaccagtggtggtcgcctgcatgtccatcatggccttgctgctgctgctgctcctgctgctattgtacaagtataagcagaagcccaagtaccaggtccgctggaagatcatcgagagctatgagggcaacagttatactttcatcgaccccacgcagctgccttacaacgagaagtgggagttcccccggaacaacctgcagtttgggcctgtgggggttgcagggagcccatgggcccttggacagaggccctttggtgcccagggacttaagggacctgtgtgcgtggcaggtaagaccctcggagctggagcctttgggaaggtggtggaggccacggcctttggtctgggcaaggaggatgctgtcctgaaggtggctgtgaagatgctgaagtccacggcccatgctgatgagaaggaggccctcatgtccgagctgaagatcatgagccacctgggccagcacgagaacatcgtcaaccttctgggagcctgtacccatggaggccctgtactggtcatcacggagtactgttgctatggcgacctgctcaactttctgcgaaggaaggctgaggccatgctgggacccagcctgagccccggccaggaccccgagggaggcgtcgactataagaacatccacctcgagaagaaatatgtccgcagggacagtggcttctccagccagggtgtggacacctatgtggagatgaggcctgtctccacttcttcaaatgactccttctctgagcaagacctggacaaggaggatggacggcccctggagctccgggacctgcttcacttctccagccaagtagcccagggcatggccttcctcgcttccaagaattgcatccaccgggacgtggcagcgcgtaacgtgctgttgaccaatggtcatgtggccaagattggggacttcgggctggctagggacatcatgaatgactccaactacattgtcaagggcaatgcccgcctgcctgtgaagtggatggccccagagagcatctttgactgtgtctacacggttcagagcgacgtctggtcctatggcatcctcctctgggagatcttctcacttgggctgaatccctaccctggcatcctggtgaacagcaagttctataaactggtgaaggatggataccaaatggcccagcctgcatttgccccaaagaatatatacagcatcatgcaggcctgctgggccttggagcccacccacagacccaccttccagcagatctgctccttccttcaggagcaggcccaagaggacaggagagagcgggactataccaatctgccgagcagcagcagaagcggtggcagcggcagcagcagcagtgagctggaggaggagagctctagtgagcacctgacctgctgcgagcaaggggatatcgcccagcccttgctgcagcccaacaactatcagttctgctga

SEQ ID NO: 129614 - DNA, 3992 bp, Homo sapiens
ggcttcaggaagggcagacagagtgtccaaaagcgtgagagcacgaagtgaggagaaggtggagaagagagaagaggaagaggaagaggaagagaggaagcggagggaactgcggccaggctaaaaggggaagaagaggatcagcccaaggaggaggaagaggaaaacaagacaaacagccagtgcagaggagaggaacgtgtgtccagtgtcccgatccctgcggagctagtagctgagagctctgtgccctgggcaccttgcagccctgcacctgcctgccacttccccaccgaggccatgggcccaggagttctgctgctcctgctggtggccacagcttggcatggtcagggaatcccagtgatagagcccagtgtccccgagctggtcgtgaagccaggagcaacggtgaccttgcgatgtgtgggcaatggcagcgtggaatgggatggccccgcatcacctcactggaccctgtactctgatggctccagcagcatcctcagcaccaacaacgctaccttccaaaacacggggacctatcgctgcactgagcctggagaccccctgggaggcagcgccgccatccacctctatgtcaaagaccctgcccggccctggaacgtgctagcacaggaggtggtcgtgttcgaggaccaggacgcactactgccctgtctgctcacagacccggtgctggaagcaggcgtctcgctggtgcgtgtgcgtggccggcccctcatgcgccacaccaactactccttctcgccctggcatggcttcaccatccacagggccaagttcattcagagccaggactatcaatgcagtgccctgatgggtggcaggaaggtgatgtccatcagcatccggctgaaagtgcagaaagtcatcccagggcccccagccttgacactggtgcctgcagagctggtgcggattcgaggggaggctgcccagatcgtgtgctcagccagcagcgttgatgttaactttgatgtcttcctccaacacaacaacactaagctcgcaatccctcaacaatctgactttcataataaccgttaccaaaaagtcctgaccctcaacctcgatcaagtagatttccaacatgccggcaactactcctgcgtggccagcaacgtgcagggcaagcactccacctccatgttcttccgggtggtagagagtgcctacttgaacttgagctctgagcagaacctcatccaggaggtgaccgtgggggaggggctcaacctcaaagtcatggtggaggcctacccaggcctgcaaggttttaactggacctacctgggacccttttctgaccaccagcctgagcccaagcttgctaatgctaccaccaaggacacatacaggcacaccttcaccctctctctgccccgcctgaagccctctgaggctggccgctactccttcctggccagaaacccaggaggctggagagctctgacgtttgagctcacccttcgataccccccagaggtaagcgtcatatggacattcatcaacggctctggcacccttttgtgtgctgcctctgggtacccccagcccaacgtgacatggctgcagtgcagtggccacactgataggtgtgatgaggcccaagtgctgcaggtctgggatgacccataccctgaggtcctgagccaggagcccttccacaaggtgacggtgcagagcctgctgactgttgagaccttagagcacaaccaaacctacgagtgcagggcccacaacagcgtggggagtggctcctgggccttcatacccatctctgcaggagcccacacgcatcccccggatgagttcctcttcacaccagtggtggtcgcctgcatgtccatcatggccttgctgctgctgctgctcctgctgctattgtacaagtataagcagaagcccaagtaccaggtccgctggaagatcatcgagagctatgagggcaacagttatactttcatcgaccccacgcagctgccttacaacgagaagtgggagttcccccggaacaacctgcagtttggtaagaccctcggagctggagcctttgggaaggtggtggaggccacggcctttggtctgggcaaggaggatgctgtcctgaaggtggctgtgaagatgctgaagtccacggcccatgctgatgagaaggaggccctcatgtccgagctgaagatcatgagccacctgggccagcacgagaacatcgtcaaccttctgggagcctgtacccatggaggccctgtactggtcatcacggagtactgttgctatggcgacctgctcaactttctgcgaaggaaggctgaggccatgctgggacccagcctgagccccggccaggaccccgagggaggcgtcgactataagaacatccacctcgagaagaaatatgtccgcagggacagtggcttctccagccagggtgtggacacctatgtggagatgaggcctgtctccacttcttcaaatgactccttctctgagcaagacctggacaaggaggatggacggcccctggagctccgggacctgcttcacttctccagccaagtagcccagggcatggccttcctcgcttccaagaattgcatccaccgggacgtggcagcgcgtaacgtgctgttgaccaatggtcatgtggccaagattggggacttcgggctggctagggacatcatgaatgactccaactacattgtcaagggcaatgcccgcctgcctgtgaagtggatggccccagagagcatctttgactgtgtctacacggttcagagcgacgtctggtcctatggcatcctcctctgggagatcttctcacttgggctgaatccctaccctggcatcctggtgaacagcaagttctataaactggtgaaggatggataccaaatggcccagcctgcatttgccccaaagaatatatacagcatcatgcaggcctgctgggccttggagcccacccacagacccaccttccagcagatctgctccttccttcaggagcaggcccaagaggacaggagagagcgggactataccaatctgccgagcagcagcagaagcggtggcagcggcagcagcagcagtgagctggaggaggagagctctagtgagcacctgacctgctgcgagcaaggggatatcgcccagcccttgctgcagcccaacaactatcagttctgctgaggagttgacgacagggagtaccactctcccctcctccaaacttcaactcctccatggatggggcgacacggggagaacatacaaactctgccttcggtcatttcactcaacagctcggcccagctctgaaacttgggaaggtgagggattcaggggaggtcagaggatcccacttcctgagcatgggccatcactgccagtcaggggctgggggctgagccctcaccccccgcctcccctactgttctcatggtgttggcctcgtgtttgctatgccaactagtagaaccttctttcctaatccccttatcttcatggaaatggactgactttatgcctatgaagtccccaggagctacactgatactgagaaaaccaggctctttggggctagacagactggcagagagtgagatctccctctctgagaggagcagcagatgctcacagaccacactcagctcaggccccttggagcaggatggctcctctaagaatctcacaggacctcttagtctctgccctatacgccgccttcactccacagcctcacccctcccacccccatactggtactgctgtaatgagccaagtggcagctaaaagttgggggtgttctgcccagtcccgtcattctgggctagaaggcaggggaccttggcattggctggccacaccaagcaggaagcacaaactcccccaagctgactcatcctaactaacagtcacgccgtgggatgtctctgtccacattaaactaacagcattaatgc

SEQ ID NO: 129615 - DNA, 4434 bp, Homo sapiens
atgctagggctggggctgttgcgcttgcgccaggggtcgcatgcagtcacgcgctgccgaccgcttccggtgcgccgcgagggccgccgggacgggtctccctggcgatccgtggtgtgccgctactgccggtgcagccgccaaaccggtgcctcggtgacgaccgtgtccctgccgtcttcctcgagctccccggggcttgacccccggggccctcggcaggcatcggtgaagaagcctgcggaagcgaaccctgtgctcaggcccctcgtcaggcatgggaccccatatcgcgactccgaggaggggaagcgagaggggctgtcgcgactccgcgccgtgtgtcgccgggcggggccgcggggccggggctccttcagcccccgggatgcgcgcgcgagccctcgcctccacttccttgttgctgctgtcacgactggagccgcctctcgccgacagcggggagcgcgagtgcgccagccatccccctcgtccagccgccgggccaagcgcctccgggaatgtgagcggcgcagcttgcacgctcctccggccatggacgcatcatatgatggtactgaggtaactgtcgtgatggaggaaattgaggaagcctattgttacacctctcctgggccacccaagaagaagaaaaagtataaaatacatggagaaaagacaaagaaacccaggtctgcttaccttctgtactattacgacatctacctgaaagtgcagcaggagctcccccacctccctcagtctgagatcaataagaagattagtgagagttggaggcttctcagcgtggccgagaggagttactacttggagaaagccaaactagagaaggaaggtttggatcctaactctaagctctctgcactgactgctgtggttccggacatcccaggtttccgcaagatcctcccacgctcagattatatcatcatccccaagagcagcctgcaggaggaccggagctgccctcagctagagctatgtgtggctcagaaccagatgtccccgaaaggacctcctcttgtgtccaacactgccccggagacagtgcccagccatgcaggcatggcagagcagtgcctggctgtggaggccctggctgaggaggtgggagcccttacccagtcaggtgctgtacaggagattgccacctcagagatcctcagccaggatgtgctcctagaggacgcttccctagaagtaggggagagccaccaaccttaccagacaagcctggtaattgaagagaccttggtgaatggctcaccagacctccccactggaagcctggctgtgccccacccccaggttggggagagtgtatcagtggtaacagtcatgagggattccagtgagagtagctcctctgcaccagccacacagttcatcatgttgcctctgcctgcctactcggttgtggagaaccccacctccatcaaactgaccactacatatacccgccggggccatgggacatgcaccagcccagggtgctcctttacatatgtcaccaggcacaagccacctaagtgccctacctgtggtaacttcctaggagggaagtggatcccaaaggaaaagccagccaaagtaaaagtggaattggcttctggcgtctcttccaaaggctctgtggtgaaaagaaatcagcaacctgtcaccactgagcaaaattcctctaaggaaaatgcctccaaactgactctggagaattcggaagctgtaagccagctcctgaacgtagctcctcccagagaagtaggtgaggagagtgagtgggaggaagtgatcatctccgatgcccatgttttggttaaggaagctcccgggaattgtggtacagcagtcactaagacgccagtcgtcaaaagtggtgtgcagcctgaggtcactctggggacaactgacaatgacagtcctggagcagacgtaccaacaccatccgaggggacaagtacctccagtccactccctgctcctaaaaaacctacaggagctgacctgcttacccctgggtccagagctccagagcttaaaggcagagcacggggcaagccctcattactggctgcagcaagacccatgagagcaattttgccagccccagttaacgtggggcgaggcagcagcatgggactgcccagggccaggcaggccttttccctgagtgataagactccctctgtgaggacttgtggtctgaagccaagcacactgaagcagctgggccagcccattcaacagccatctggccctggtgaggtgaagctaccaagtggcccatccaacaggacttctcaggtgaaagttgtggaggtcaagcccgatatgtttcctccatataagtacagctgcactgtcacattggatttgggcctggctacatcaagaggccggggaaagtgcaagaatccctcttgtagctatgtctacaccaacaggcacaaacctcgaatttgtcccagctgtggtgttaaccttgccaaagaccggactgagaaaaccaccaaggctatcgaggtgagctcaccactcccagatgtactgaatgccacagagcccctgagcacagcccagagggagatccagcgccagtccacactgcagctgctgcgcaaagtcctgcagattcctgagaatgagtcagagctggctgaggtcttcgccttgattcatgaactcaacagctctcgacttatcttgtccaacgtgagtgaggagacagtcaccatcgagcaaacctcttggtcgaattattatgagtctccgtccacgcagtgccttctctgtagcagcccattattcaaagggggacaaaactccctggctgggccccaggagtgctggctgctgacagccagccgtctgcagacagtgactgcccaggtgaagatgtgtctgaacccccattgtctggccctgcacagcttcatagacatctacacaggtctctttaatgtggggaacaagctgctggtaagcctggacttgctttttgcaatcagaaatcagatcaagctcggagaggaccccagagtgtccatcaatgttgttctgaagtcggtgcaggagcagacagagaagactctgacctcggaggagctgagccagctgcaggagctgctgtgcaatggctattgggcctttgagtgcctcactgtccgagactacaatgacatgatctgtggcatctgtggtgtggcccccaaagtggaaatggctcagaggagtgaagagaatgtgctagcactgaagagcgtggagttcacctggcctgaattcctgggctctaatgaggtaaatgtggaggacttttgggccacgatggagacagaggtgattgagcaggtggcatttcctgccagcatccctatcaccaaatttgatgcgtctgttattgcccccttcttcccaccactcatgagaggagctgtggtcgtcaacactgagaaagacaaaaacctggatgtgcagccagtacctggcagtggcagtgccttggtgaggctgctccaggagggcacctgcaagcttgatgagattggctcctacagtgaagagaagctgcagcacctgctaaggcagtgtggaatcccctttggggcagaagactccaaggaccagctctgcttctccttgttggccctctacgaatctgtacagaatggagctagagctatacggcccccacgtcacttcacaggtggtaaaatctacaaggtgtgcccccatcaggtggtctgcggctccaagtatcttgtgcgaggtgagagtgcccgtgaccatgtggacctgcttgcctcttcccgccactggccgcctgtctatgtggtagatatggccacgtcagtggccctgtgtgctgacctctgctacccagagctgactaaccagatgtgggggaggaaccagggctgtttctctagccccacagagccacctgtgagtgtgtcctgcccagagctcttggaccagcattatactgtggacatgacagaaactgagcactctatccagcacccagtcaccaagactgccacgcggcgcatcgtccatgcaggcctacagcccaatcctggtgaccccagtgctgggcaccactccttggccctgtgccctgaattggcaccttacgcaaccatcctggcctccatcgtggacagcaaaccaaacggtgtccgccagcggcccattgccttcgacaatgccactcactattacctctacaaccgcctcatggacttcctcaccagccgcgaaattgtcaatcgtcagatccatgacattgtacagagctgccagcctggtgaggtggtcattcgtgacaccctctaccgccttggggttgctcagatcaagacagagacagaggaggagggtgaggaagaggaggtggccgcagtggcagaataa

SEQ ID NO: 129616 - DNA, 2066 bp, Homo sapiens
atgaggccagggaccaggatccgactcaccattccgggagcgaaggaaggcccaggcccggccgactgggcgggacaagagaaccaggacacggagcaccaggggccggccatccgcttgtgcaggccgcctgtatatgtggaagatatggccacgtccagtggccatattagggaagtgggggagttcctgctgccttttcaggtagatgtcgtaatagtacaaagaaaggagcggggtcgcaaccatgagaaagacaaaaaccggaagcgcagccaggacagggaggttggggcaattcccaacaaggagcaagcccgagcccgcgcaagaaacacagataagcacggcgcggtcacgaaggcccgaaagtcgggccaccgggcaggcgtcacgcggaagaagggcatcaaccgggcagggacagacagcccctccatcccaggtatgtcccagcccttaccactcagggaaaaggcctgcctggccctgggcagtcccatgctgctgcctcgccccacgttaactggggctggcaaaattgctctcatgggtcttgctgcagccagtaatgagggcttgccccgtgctctgcctttaagctctggagctctggacccaggggtcccggcagccgggccccgcctccttcggagtccgagcgatgggcggggaaagggacaggcaggtatagctctgtcggcgccgcggtgtccacctcagtcaggccacggtggaagacgcgtgccgcggcgcctggttgcctgcagcggcccggacccgagaggccggaaaacgaagccggccagagtttgcaccaaggccactccaaactccgagagacaacggccgaaaaccaaacgaattacggcggtgtttccgggccgagcaaatcgccgcgacgaagaaccacgcaaagcacacacagtaaagggttcaggacattccggcaaagagaggaataccccaatttcgacccaaaatcaagggaataggacagagttacaaacagcactacccagcccggccctggaacgtgctagcacagaaggtggtgggttcgaggaccaggacgcactactgccctgtctgctcacagacccggtgctggaagcaggcgtctcgctggtgcgtgtgcgtggccggcccctcatgcgccacaccaactactccttctcgccctggcatggcttcaccatccacagggccaagttcattcagagccaggactatcaatgcagtgccctgatgggtggcaggaaggtgatgtccatcagcatccggctgaaagtgcagaaagccgtgaaccgagcataagcgagcgaactggcgaggaagcaaagaagaactgttctgtcagatagctcttacgctcagcgcaagaagaaatatgccaccgtgggaaaaactccaggcaaccaggcgccgcggcacgcgtcttccaccgtggcctgactgaggtggacaccgcggcgccgacagagctatacctgcctgtccctttccccgcccatcgctcggactccgaaggaggcggggcccggctgccgggacctacgggcgcggcgaggacgcaccggcgaagagatgccggaggcagagccagtgtaaacgcccgcggccgaggccgtcacgtggtactgccgggcgagcgacgctaccaccagccaataactcggcccagaccggggaggaagagcacggggatctttagagtccccgagcagggcttctaccctgagtcgttgtgtccagattccgggcgctatattgcctggttgctcaagaaccgggttgtggaacaggcgtttcgatggaggaggccagttcattcaagccaggactatcaatccagtgcctgtatggggggcaggaaggtgatgtccatcagcatccggctgaaagtccagaaaggacaaaaaactcagaacatcacctcaagcacggaaacagactctggagaccaggataagactccctctgtgaggacttgtggtctgaagccaagcacactgaagcagctgggccagcccattcaacagccatctggccctggtgaggtgaag

SEQ ID NO: 129617 - DNA, 431 bp, Homo sapiens
cccacccctaaggtggagttggagttctggaagagcaggtatgaagatctgaaatacatctataatcaactgagaacaataacggtgaggggcatggccaagctcctggacaagcttcagagtagctactttccagctttcaaagccatgtacagagatgttgttgcagatgggactgcaatttcctggccatttgagcaccagacaagatctacgcttatcaaaattgccaagccagcaaagtctatgattagaagtaggtaaatttttttaggactccctctccatttcttggagcactgtgcgtcttctccctttttcttgtaaaatctcctctttgctcttcagtaccataggtcaaaatgtgcttttaaaggtctttgtcatttcacatggtctaagcttaattaaagcagtgattttcaaacaaa

SEQ ID NO: 129618 - DNA, 285 bp, Homo sapiens
ttttaatgtttgaaaatcactgctttaattaagcttagaccatgtgaaatgacaaagacctttaaaagcacattttgacctatggtactgaagagcaaagaggagattttacaagaaaacgggagaagacgcacagtgctccaagaaatggagagggagtcctaaaaaaatttacctacttctaatcatagactttgctggcttggcaattttgataagcgtagatcttgtctggtgctcaaatggccaggaaattgcagtcccatctgacagtaggaatagaaa

SEQ ID NO: 129619 - DNA, 4219 bp, Homo sapiens
atgcggctcgcggaggagcgggccgcgctcgcggcggagaacgcggatggggaacccggcgccgaccgacgactgcgactcctggggacctacgtggccatgagcctgcggccggctgcgggcgcctgggagcgttgcgcggggagtgctgaggcggagcagctgctccaggccttcctgggccgcgatgctgccgaggggccgcggccgctgctggtggtgcggcccgggcccaggggcctggcaatacgccccgggctggaggtgggacctgagtcgggcctggctggcgctaaggcgctttttttccttcgcaccgggcccgagcctccagggcccgacagcttccgcggcgcagtggtctgcggggacctgcccgcggcacctctggagcacctagccgcgctgttctcggaggttgttctacccgtcctggccaatgagaagaatcgcctaaactggccccacatgatatgtgaggatgtcaggcggcacgcccacagcctccaatgtgacctctcagttatacttgagcaagtgaagggaaaaactttgctgcctcttccagcaggctcagaaaaaatggagtttgcggattccaaaagtgagacagtcttggattctatagataagtcagtcatctatgccattgagtctgcagtgatcaaatggagctaccaagtccaggtggtactcaagagagagtcttcccagccactcttacaaggggagaatcccacccctaagggtggagttggagttctggaagagcaggtatgatgatctgacatacatctataatcaactgagaacaataacggtgaggggcatggccaagctcctggacaagcttcagagtagctactttccagctttcaaagccatgtacagagatgttgttgcaggtccgtgtgagattatacaggtggaagaacttattgacttaacacaacaatgttcctggagctgtccctttgtgtctttcaaacactggggccaggacatacagttctggggtggccattatggagcctgtgtgaccaactccagggtggtcatctccattctgcattttctattcctactgtcagatgggactgcaatttcctggccatttgagcaccagacaagatctacgcttatcaaaattgccaagccagcaaagtctatgattagaactctagcagaggcacaggacatccatgtgcacctgataccgctccagcgccacctggaagctctggagaatgcagaatttccggaggtgaagccccagctgcggcccctgctccacgtggtctgtctgatttgggccacatgcaagtcctaccgctccccgggaaggctgactgtgctgctccaggagatttgcaaccttctcatccagcaggcctctaattatctcagcccagaagacctgctgagaagtgaggtagaagaaagtcagagaaaactgcaagtggtctcagacactttgagcttcttcaagcaagagtttcaggacagaagggagaatctccacacttacttcaaagagaaccaggaagtcaaggaatgggatttccagtcttctttggtctttgtgcgattggatggcttcctgggacaactgcacgtggtggagggtcttctgaagacggccctggatttccacaaactgggaaaggtggagttcagcggcgtcagagggaatgctctgagtcagcaggtccagcaaatgcatgaagaatttcaagagatgtacaggcttctctcaggatcctcctccgactgcctgtacctccaaagcacggactttgaaaatgacgtctctgaatttaaccagaaagtagaagatcttgaccgaagattggggactatctttattcaagcttttgatgatgcacctggcttggagcatgcctttaagctgctagacatagcaggaaacctccttgaaagaccgctggtagcgagggatacatctgataaatacctggtcctcatccaaatgttcaacaaagatctggatgcagtgaggatgatctacagtcagcacgtccaggaggaagcagaacttgggttctccccggtgcacaagaacatgcccaccgtggctggcggcctccgctgggcacaggagctgaggcagcgcatccagggtcctttcagcaactttggacgcatcacacacccgataactctggaaaacctgttaaagatgcacattccagggcctcacctgtcactggctgaatctgaatctggtgtgggctgtgaatctgccccttcagcaagctcctcctgtgattctgacggtgaccaggaatttatagagatcctttcaggaacagcactcatgaggaagggaggggaaacagatcgggcagagaaagaagttgagctgctgagctgcaagaaagttgcaatgggggtctcagctggtcctccagggagtttgggcccttcagagctgttctgcctccgtacccctacatcagctgatcatgaccaggcaccggtgagctgggagggggcttatgaggtggctgttgtctctgacccttgcaggtatgagacaagactttatgaggattggtgccggacagtatcagagaagtcacagtacaatctttcccaaccacttctaaaacgtgacccagagacgaaggagatcactatcaactttaacccacagctgatttcagtgctgaaagaaatgagctatcttgaacccagagagatgaaacacatgcctgagacagcagcagccatgttctcctccagggatttctatcggcagcttgtggctaatttagagttgatggcaaattggtacaacaaggttatgaaaactctgctggaggtggaatttccattagtggaggaagagctgcaaaatattgatctccgcctcagagcagcagaggagactttgaactggaaaacagaaggcatttgcgattatgtcactgaaatcaccagtagtattcatgatcttgaacaaagaattcagaaaactaaagacaatgtggaagagatccaaaacatcatgaaaacatgggtgactccaatatttaagacaaaagatggaaaaagggaatcccttctttctctggatgatcggcatgatcgaatggaaaaatattacaatctcatcaaggaatctggccttaagatccacgcccttgttcaggtcgacctggacggtataccagatttggcaaacatgcggcgcacactcatggagagagtccagagaatgatgggcctctgctgtggctatcagagcaccttcagccagtattcgtacctctatgtggaggaccggaaggaggttctgggtcagtttctgctgtacgggcacatcctcactccggaagaaattgaagaccatgtggaagatggcatcccagagaaccctcccctcctttctcagtttaaagtgcaaatcgactcctatgaaacgctctatgaagaggtgtgcaggctggaacccatcaaggtgtttgacggctggatgaaaattgatattcgaccctttaaggcatctctgctgaatattattaagaggtggagcctcctgttcaaacagcatcttgtggaccacgtcactcacagcttggccaacctggatgcgtttataaagaagagtgagagcggcttactcaagaaagttgaaaaaggagatttccaaggcttggttgagatcatgggacaccttatggctgttaaagaacggcagagtaacactgatgagatgtttgagcccttaaagcagactattgaattgctgaagacctatgaacaagaattgccagaaacagtgtttaagcagctggaggagctgcctgagaaatggaacaacataaaaaaggtggccattactgtgaagcagcaggtggccccactgcaggcaaatgaagtgacactcctccgccagaggtgcacagccttcgatgcagaacagcagcaattctgggagcaattccacaaagaagccccgttcaggtatgggccgaacactgctgcctctctttctgtgaacactgcagtctttgagtcatggataatctttttgtggggcggatttcctcccgtggtgaagcggtctgcttctggtccactgctcagcatcaacggctccaaccaggaggccaagctggagctcaatggtcctacatctgctgatgtgccagctagattgggtgccctttgccctaacgctccagctctgtga

SEQ ID NO: 129620 - DNA, 656 bp, Homo sapiens
cacctgcgcccagcagtgcaggtgaaggcctggctgcggagagtggctgggaaacgctgagctttggggtcaggaatgccagctccactactcaccgcctgtgtcaccctgggaaaacagctctggccccaggttctccataagtaaaacagggtcactcatccctcccctccttaacgacatatgtcagaatcagaagccacaaatcattctctcccacccagcacgctgccttggtctcctagaccactttccccaacaatgggaaaggcgccaggcccagaacagggccgagaccggatgaggccagcgaagcgcccagggacaaactttcaggcagcgcccactctcggtctcgggcaattgcagggtccctccgagagcgaccgtctccagaaaacgcggccggcgcctgcctatgccctgagcctgaagagcccccggcgccgcccgccccgcactgggcccgcccctccgggattggtgccctgctaggggtggttgcctgtgacgtcaccggacgcgcccgcttctcgctggagtgcgcaccgagcggcagtgacttcgccgctgctgtagttccccggctggatgcggtgactggtgccagtgctcaggcgcccgctgcccttgacctcccgccccgcgagccctaa

SEQ ID NO: 129621 - DNA, 1242 bp, Homo sapiens
atgttagaactgtgtaggcctccagagaacctgagctataaaaggcagatccccctgcctggatcaagtttcaacaccctggccttgaaaaggaagcaacgaatacagcagccttcaaataaccccactttcccagacagtgatttcagggaagcctggggtgagtccctgctgctgcaagtgcccaagcctgtgagctcagtgcagggcccatcactggactgctggacagtctcaatggattcagagagattcaatataaagaggtacaaggagccaagctcattcttctctgggacacacagagtggctttggaactggctgtgaagatgtctgaaagctactaccgctatatggaagaaaccaaattcctacctgctgccacatgctgggaactgtcacagcaggaggacttcaaaaccaatattctttctgaagatctagtgtccgttgccagaaagccagtctctgcaaattctgagcctaatgaacaatgcgtgggatccacagggagacaaagagatattggagagagcccacagagtagctttgcaactggctttggggacttccgaaagctaccagcactgcactgtgagactctcatccctgagctgaattcatctgattcgacggcaagctttggtgagaacatagatatatttctgagggaaccatcaccgaaaatggacttcaaaaccaatattcttctgaagaatttagtgaccattgccagaaaagccagtctctggcaattcctgagctctgagaaacaaatatgtgggacccataggcaaacaaagaagatgttctgtgacatggacaagagtctcctctgcttgctgtgctccaactctcaggagcacggggctcacaaacaccatcccatcgaagaggcagctgaggaacaccgggagaaactcttaaagcaaatgaggattttatggaaaaagattcaagaaaatcagagaaatctatatgaggagggaagaacagccttcctctggaggggcaatgtggttttacgggcacagatgatcaggaatgagtataggaagctgcatccggttctccataaggaagaaaaacaacatttagagagactgaacaaggaataccaagagatttttcagcaactccagagaagttgggtcaaaatggatcaaaagagtaaacacttgaaagaaatgtatcaggaactaatggaaatgtgtcataaaccagatgtggagctgctccag

SEQ ID NO: 129622 - DNA, 1219 bp, Homo sapiens
atgacaacgctgaccggaacaggatctcgacaaaagaggatgcgctacagaaactggcacaaaccagctagaaccaagatggtgacaaaaacgacctctagagcacagtgtgagtggatcttcccccgggggctcccgtcagacagagtggcagccatggctcagtactgcgtgatcataaaactgaaggtgaagcccgagttctccctcttcaccagagagttggaaaagcaggaggaagaggagcaacaccaggtccccacgtccacgaggaccctgtcaccatctgctgtgggcacagcttctgcaggccctctctgcctttcctgggaggaagcccaaagtcctgccaactgccgtgcatgcagggaaccatcacagaaaaaggacttcaaaaccaatattcttctgaagaatttagtgaccattgccagaaaagccagtctctggcaattcctgagctctgagaaacaaatatgtgggacccataggcaaacaaagaagatgttctgtgacatggacaagagtctcctctgcttgctgtgctccaactctcaggagcacggggctcacaaacactatcccatcgaagaggcagctgaggaacaccgggagaaactcttaaagcaaatgaggattttatggaagaagattcaagaaaatcagagagatctatatgaggagagaagaacagccttcctctggaggaagaggacactgagactcaaagggatgacgtcaggtgcccaaggtactagtcagaaagtggccctggggcttctgcaacaaccactatgtcacacagtccgagctcaatccaactctgcaagagtccataagcaaaggggcggcgacgcggtgagtagtggagctggcattcctgaccccaaagctcagcgtttcccagccactctccgcagccaggccttcacctgcactgctgggcgcaggtggggaagtggggaaacggtgctccatcccctgcagagggcaggcgtgcggggagcggtggctgaactccacagacagctactgctcagctcttcagctgccggctttgaagagtgtgaggggctctgtacaagtggcccccacattactcaaggaccagatcatcaagagctttacttgtcccacgaaggagtctggaccttgtttacgtgcacaggagaccgctggaaggttctcagtggcgtgccatgtcccgacttctatttga

SEQ ID NO: 129623 - DNA, 2697 bp, Homo sapiens
atgcgaatggctgccactgcctgggcggggctccaagggccacccctccccaccctctgtcccgcagtgaggacgggactctactgccgagaccaggctcacgctgagagggccacagatgtcgtgctcctggccccgttttgccagcccaagactaggagccacggcacctgtcctcccacagagagagacccccggggcgaaggctccactgagtacccaggcagagtggacggcattcagggctgggggacacgggcactcactggatggacagacagacgcctgctgtgccaggcctgccagacgctcccgccccggcactggtttcttcctggagctcgtggctggctagggggttctccatgtgctcatggccaggagagtctgccgagccagcccagccccattctactccgagtcgagtctgtaaagagcaggatgctgcggcgacgggcccaggaagaggacagcaccgtcctgatcgatgtgagcccccctgaggcagagaagaggggctcttacgggagcacagcccacgcctcggagccaggtggacagcaagcggccgcctgcagagctgggagtcctgccaagccccggatcgcagacttcgtcctcgtttgggaggaggacctgaagctagacaggcagcaggacagtgccgcccgggacagaacagacatgcacaggacctggcgggagacttttctggataatcttcgtgcggctgggctgtgtgtagaccagcaggacgtccaggacgggaacaccacagtgcactacgccctcctcagcgcctcctgggctgtgctctgctactacgccgaagacctgcgcctgaagctgcccttgcaggagttacccaaccaggcctccaactggtcggccggcctgctggcatggctgggcatccccaacgtcctgctggaggttgtgccagacgtaccccccgagtactactcctgccggttcagagtgaacaagctgccacgcttcctcgggagtgacaaccaggacaccttcttcacaagcaccaagaggcaccaaattctgtttgagatcctggccaagaccccgtatggccacgagaagaaaaacctgcttgggatccaccagctgctggcagagggtgtcctcagtgccgccttccccctgcatgacggccccttcaagacgcccccagagggcccgcaggctccacgcctcaaccagcgccaagtccttttccagcactgggcgcgctggggcaagtggaacaagtaccagcccctggaccacgtgcgcaggtacttcggggagaaggtggccctctacttcgcctggctcgggttttacacaggctggctcctgccagcggcagtggtgggcacactggtgttcctggtgggctgcttcctggtgttctcagacatacccacgcaggaactgtgtggcagcaaggacagcttcgagatgtgcccactttgcctcgactgccctttctggctgctctccagcgcctgtgccctggcccaggtacgagaagaggccggccggctgttcgaccacggcggcaccgtgttcttcagcttgttcatggcactgtgggccgtgctgctgctggagtactggaagcggaagagcgccacgctggcctaccgctgggactgctctgactacgaggacactgaggagaggcctcggccccagtttgccgcctcagcccccatgacagccccgaaccccatcacgggtgaggacgagccctacttccctgagaggagccgcgcgcgccgcatgctggccggctctgtggtgatcgtggtgatggtggccgtggtggtcatgtgcctcgtgtctatcatcctgtaccgtgccatcatggccatcgtggtgtccaggtcgggcaacacccttctcgcagcctgggcctctcgcatcgccagcctcacggggtctgtagtgaacctcgtcttcatcctcatcctctccaagatctatgtatccctggcccacgtcctgacacgatgggaaatgcaccgcacccagaccaagttcgaggacgccttcaccctcaaggtgttcatcttccagttcgtcaacttctactcctcacccgtctacattgccttcttcaagggcaggtttgtgggatacccaggcaactaccacaccttgtttggagtccgcaatgaggagtgcgcggctggaggctgcctgatcgagctggcacaggagctcctggtcatcatggtgggcaagcaggtcatcaacaacatgcaggaggtcctcatcccgaagctaaagggctggtggcagaagttccggcttcgctccaagaagaggaaggcgggagcttctgcaggggctagccaggggccctgggaggacgactatgagcttgtgccctgtgagggtctgtttgacgagtacctggaaatgggagcaggtttctgccccaacgcctgccctgagttagttcctgagctcaccgagccggagaaggcccgtgaccagccagaagcacggagcgcagggcaggacagccggcctgaggccgtgctgcagttcggcttcgtcaccatcttcgtggccgcctgtccgctcgcgccgctcttcgccctgctcaacaactgggtggagatccgcttggacgcgcgcaagttcggggggtcttctagagcgcaccagggactgggggttgcctggggatag

SEQ ID NO: 129624 - DNA, 924 bp, Homo sapiens
atgatttcacaattcattccagaaaattatttttcaggaaagtccagcgcgacttccgggtgggcgcgggctcagcgcgacttccgggtgggcgcgggctcggcgcgccccgcactcttgagcggtcggctggcgccgccggccctgggcagtgagaggcttagcacccgggccagcagctgcggagggctcccgcgcgccaccccgaggggacgggcgccacctcctgctacgcggcacccggtcccgtcaaccgcccaacggctgaggagtgcggcagcgcgccagagactggcgggcagctccgcccgcggccgggatgcactaggcaaagccagctgggctcctgagtccgtgttggaagttctggccagggcagtcaggcaagagaaagaaataaagggcattctattaggaaaagaggaagtcaaattgtccctgtttgcaggtgatatgattgtatatttagaaaaccccatcatctcagcccaaaatctccttaagctgatgagcaacttcagcaaagtctcaggttacaaaatcagtgtgcaaaaatcacatgcatttgtatacaccaataacagacaatcagagagccaaatcatgagtgaactcccattcacagttgctacaaagagaataaaatacctaggaatccaacttacaagggatgtgaaggacctctttaaggaaaactacaaaccactgctcaacgaaatacaagaggacacaaacaaatggaagaacattccatgctcatgggtaggaagaatcaatatcgtgaaaatggccatactgcccaaggtaatttatagattcaatgccatccccatcaagctaccaatgactttcttcacagaattggaaaaaactaaagttcatatggaatcaaaaaaagagcccatattgccaagacaatcctaa

SEQ ID NO: 129625 - DNA, 828 bp, Homo sapiens
atggtggcgggccacttccaaggtggtgcaagccttgtgttctctgacctggggtacttggcctcacagactacaaggaatggaatcttgggccacgtgctatactcactctttgttgagtctcccacaattaccattgttcctggcccagacttcaatcttgcctcccacattattccggataccacacctgaccctcatgactgcatctctctgacccacctgacattcaccccatctccccacatttccttcttccctgtttctcactctgatcacacttggtttattgatggcagttccacaaggcctaatcgccactcaccagcaaaggcaggctatgcaatagtatcttccacatctgttattgaggctaccattctgccctgctccactacctctcagcaagccaagctagttgccttatctcaggccctcactcttgcaaaaggactacatgtcaatatttatactgactctaaatatgccttccatattctcactaccatgcagtcatattggctgaaagaattttccttactacacaaggaagctggggtcattcactgcaagaggcatcaaaaggcgtcagatcccattgctctaggcaacgcttgtgctgataaggtggctaggcaagcagctagctttccaacttctgtctctcacagcaattctgatgcagataaggtggctagacaagcagctagctctccaacttctgtcctgacggccagtttttctccttcacatcggccactcccacctactcccccgctgaaacctccacctatcaatctcttctcacacaaggcaaatggttcttag

SEQ ID NO: 129626 - DNA, 1491 bp, Homo sapiens
atggttggatactttcgcctttggatacctggttttgccatcctaacaaaaccattatataaactcacaaaaggaaacttagctgaccccatagatcctaaatcctttccccactcctctttctgttccttgaagacagctttagaaactgcccccactctagctctccctgactcatcccaacctgcttcattacacacagccgaagtgcagggctgtgcagtcggaattcttacacaaggaccaggatcgcgtcctgtagcctttttgtccaaacaacttgatcttactgttttaggctggccatcatgtctccgtgcagccgctgctgctgccctaatacttttagaggccctcaaaatcacaaactatgctcaactcactctctacagctctcataatttccaaaatctattttcttcctcacacctgacacatatactttctgctcccggactccttcagctatacttacactttgttgagtctcccacaattaccattgttcctggcccggacttcaatccggcctcccacattattccggataccacacctgaccctcatgactgcatctctctgatccacctgacattcaccccatttccccacatttccttcttccctgtttctcaccctgatcacacttggtttattgatggcagttccaccaggcctaatcgccactcaccagcgaaggcaggctatgctatagtatcttccacatctatcattgaggctactgctctgcctccctccactacctctcagcaagctgaactagttgccttaactcaagccctcactcttgcaaaaggactatgcgtcaatatctatactgattctaaatatgccttccatatcctgcaccaccatgcagtcatatgggctgaaagaggtttcctcactacacaagggtcctccatcattaatgcctctttaataaaaactctgctcaaagccgctttacttccaaaagaagctggggtcattcactgcaaggggcatcaaaaggcatcagatcccattgctctaggcaatgcttatgttgataaagtggctagacaagcagctagctctccaacttctgtctctcacagcaattctgatgcagataaggtggctagacaagcagctagctctccaacttctgtccctgacggccagtttttctccttcacatcggccactcccacctactcccccgctgaaacctccacctatcaatctcttctcacacaaggcaaatggttcttagatctaggaaaatacctccttccagcctcacaggccccttctattctgtcgtcatttcataacctcttccatgtaggttacaagccactagcctgtctcttagaacctctcatttcctttccatcatggaaatctatcctcaaggagatcacttctcagtttcccatctgctattctactacccctcatggattgttcaggcctcctccctttcctacacatcaagctcagtga

SEQ ID NO: 129627 - DNA, 1476 bp, Homo sapiens
atgcctatcaaggtagactggataaagaaatctaggacacatacaccaagagatacaatgagccctaaaaggggaataaacatatccatacaggaatacaggaacacacctgacgccagtatactaagtgaactgagactggaacgggataccaatacgcaagtatacacatatgaacaggagcataccaataagaacaatggacatcaagcaatagacaaacaaaacaaaggacacataagaagggagagtgaccggggagagtattatcccctggactgcagacctacaggcagtctaaccgacaaaggatggggcatgcttctctgtgggatgatgacagctgggaaacccacacctattcttaccttcttgctagacgtgggcttgcctggtggaactgccatcaataaatcaagtgtgatcagggtgagaaacagggaagaaggaaatgtggagaaatggggtgaacgtcaggtggatcagagagatgcagtcatgagggtcaggtgtggtatccggaataatgtggaggccggattgaagtacgggccaggaacaatgaaggtatctctctctgtgttctacactacacaacaatgcagaaggtatctctctgtgctgtgctttgcaggcttagcccgcgcctcggtgcccttcaatgaggatttccaaatgtcccttgatgagaaactgttttcaaacctgcatcctctgggctcaagttcctcgcctccaaaaagtctgctgcactgccctctgctggaacatcagttcaccatgctgggattctcagacttaggagcccagctggcttcacctagtggatcccacaccagggctgcaggtgttgctgcctgccagcctgcgccgacactcacatggctcagcccttgggtggcgaggggactgggcaccttggagcagggggtggtgctcgttggggaggctcgggccgcacaggagcccatggagtgggtgggaggctcatgcatggtgggctgcaggtcccgagccctgccccgcgggaaggcagctaaagcttggcgagaaatccagcgcagcgccggtgcgggcggcgctcctgtgtccccgtggtccggcggcgccccctccagagcctgtcctccttccgcttcctctgtgcgtttcctctgcgccgctcgccgtctcgcgtgcaatacttactctcccgtcctttattgtgtccggaattggtggattcttggtctcactgacttcaacaatgaagccacggaccctcgcgatccctttctggcgaatgtaccaggtcaactggcggccgtggctatcgggacctgcgatggcaacgtctatagtgcgggtgacagagattaccgctttgcactggaatccattttgaaagcctgtacgttagcccttgctttagaagaggtcggcccgccagcggtacaagacaaaattggcgctgacccggaccggattgccctttaa

SEQ ID NO: 129628 - DNA, 654 bp, Homo sapiens
ttttttttttttgggtttccatgtattttattccattccactcataccaagagacaattctttttgaggtgtgtttagctctctagacttaattactgctgtgtttgtcacattggctgaattgagatcggtgacataaggattcctgggagcctgcgctgggcgcgaatttaagatggctcctccatgatcttcactctctgggtgaaaactgtcggtcagcccatgcccaggattgttgatcagtgctgaaggtcctgaggctgtttttagcatagtctaaaacgcgagggtccgtggcttcattcttgaagtcagtgagaccaagaacccaccaattccggacacaatatcgacaaaacatgcatctttgatgtctgatagttacagagagaagaaattagttcctgtggtttacccccattctagcactccctccttccagtaattcctggaaggagggagtgcaccaatcgacactctgtatctagctactctggtggggccttggagaatctttacgtctagctcagggattgtaaatacaccagtcggcactctgtatctagctcaaggtttgtaaacacaccaatcagcaccctgcgtttagctcaaggtttgtgaatgcaccaatcgacactctgtatctagctg

SEQ ID NO: 129629 - DNA, 1003 bp, Homo sapiens
atggaggctccacagggagctctggagcaggatggccctgcagtgttgtcccaacagaggcacaggaaaaagccctttacagccactccaattgatccatcataccatagatcacatgccatttccctgagcgtaattataggatattgtgtgcccccatcccacgctgccgaaatggcagcttatggctggacaatgggtaaaagcaagcttatggctggacaatggattacccagtctcaggtattttgtgatagcagcactgacggaccaagacagcacaaagctcagactgctattcttactaaacttcagagtcaacagagaagcaccaataacagtacagtgtctcaccgtcagcagtgggtcaactgcaggctgctaagggtcaagtgccagcggctaagggcacataaggagctgctaccagttcagcgttggctctggcgtcagggtcgttgtgtcccgacaacctctctggtagccgtttctgagacagcaggtgcaggtgcggccgctttagccctgagcaggctctgccgctgcttgcaggtctctgctagcgcccgacccttctcttcacggaccttgagcccacagcccaagtgctgggcaatggcagcctcgcaccagcccatcaaggggatcctgaagaacaagacctccaggacttcctctatggtggcgttgtcggaacagccctgcagaactgtccacgaggagctgagtaaaaaatgccagaagtgtgatgaaatgaacatcctgtcaacatatcatccagcagacaaagactatggtttaatgaaaatagatgagccaagccctccttaccatgggtataacgggtgatgatgaaaatgcatgtagtgatacagaaaccactgaaaccatggtatcagatatcttagctaagaaattagctgctgctgaaggcttagagccaaaatattgggttcaggaacaagaaagcagtggagaggaggacctcttagctgaagaatga

SEQ ID NO: 129630 - DNA, 1854 bp, Homo sapiens
atgggtcagcagtgtgttgctggtagagatagtgccagcgtcagcccccagtccaagagaactacgcagccacttgggctggcctctggatctattgccgcctggaccaccaagactgtgtccaccctgcaagcacagagcctcaccctcaccactctgccgcccatccacacctgccaccagttcaccatggataatgatattgctgtgcttgtcgtcgacaatggctctggcatgtggaagggtgtgatgatgggcatgggtcggaaggacttctatgtgagcaacaaggcccagagcaagagaggtatcatgaccctgaagtaccccatggagcatggcatcatcaccaactgggatgacatggagaagatctggcaccacaccttctacaatgagctgcatgtggctcccaaggagcaccgtatgctgctgactgaggccaaccacaagaagatgactcagatcatgtttgagaccttcaacaccccagccgtgtatatggccatccaggccatgttgtccctgtacacctatggctgtaccactggcattgtgatggactccagcgatggagtcacccacacagtgcccatctacgagggttacgccctcccccgtgccatcctgtgtctggacgtggctggccgggaccttactaactacctcatgaagatcctcaccgagcacagctacagctttaccaccatggccgagcgggaaatcgtgtgtgacatcaaggagaagctatactatgtcaccctggactttgagcaggagatggccacagcggcctccagctcctccctggagaagagctatgagctgtccgatggccaggtcatcaccattggcaatgagctatcctgctgccctgaggcgctcttccagccttccttcctgagcatggaatcctgtgacatccacaaaactaccttcaactccatcatgaaatgtgacatggacatccgcaaagacctgtacaccaacacagtgttgtttggcggcaacaacatgtaccctggcattgcgaacagggtgcagaagatcgtcactctggtgtggatgggcagctccatcctggccttgctgtccaccttccagcagatgtggcatccagttttggatgaaccaatagcagaagctgtctgtattatagctgacatggataaatggactgttcaagtggccagtagccagagacgagtgacagataataaattgggaaaggaagtattggtttccagtcttgtttccaatctgcttcattccacacttcagctttataagcataacttgtctccaaatttttgtgtaatgcatcttgaagaccggttgcaggagctatacttcaaaagtaaaatgctgtctgaatacctgagggggcagatgcgtgttcatgtcaaggagctgggagtggttctgggggcaggggtccccagtccccagtccccagtccccaggccggtactggttcatggcctgttaggaagcagccgcacagcaggaggacgtccgtttcgaatagatcaagcacttctctgtcggcagctttcacaagagatctcgttttatttaaagagatatgaggtgtgcgtggaattccttctttgccgaatggcggcttctacttccgcatattcaaagtcggcagtagaagttgcagaggagagcgcaaagccggacttggccacaccctgggcttccggatttgggcacaacagttctctccagtcagaacgcctccccacggttctgccccaaaatgctatttttgctcaggtcctcagcgcgtttccggtgtctccaacggatggagaagacggaaccacaacgccaaggcagaccccgtga

SEQ ID NO: 129631 - DNA, 1428 bp, Homo sapiens
tcatatgtttttgcagtggctgttaccgttttcccttgccatatttagtgcttccttcaggagctcttgtaaggcaagcctgatggtgacaaagtctctcagcatttgcttctctggaaaggatttcatttctccttcgcttatgaagcttagtttggctggatatgaaattctgagttgaaaattcttttctttaagaacgttgaatattggtcccccactctcttctggctttagagtttctgcagagagatccactgttagtctgatggactttcctttgtgtataacccaatgtttctctccggctgcccttaacattttttccttcatttcaaccttggtgaatctgacgattatgtgtcttggggttgctcttctcgagcagtatctttgttgtgttctctgtatttcctgaattttaatgttagcctgtcttgctatgttgggaaagttctcgtggataatatccttaagagtgttttccaacttggttccattctccctgtcacagtcaggcccctccgctgcaggtctgctggtgtttgctggtggtccactccagtccctgtttgcctgggtatcaccactggaggctgcagaacagcaaagattcctgtctgtcccttcctctggaagcttcattccagaggagcccctgccagatgccagccggagctctcctgtatgtgatgtctgttgaccaccgctgggaggtatctcccagtgaggagtcataggggtcagggacccacttgaggaggtagtctgtcccttaccagagcttgaaagctgtgctgagagatccactgttctctggtacttaagacactggtcttttatatcagaagatgaagtcacagaactatctaaagaggaagaactgtctcctccaggtttcagttggcagcatttcccaaagactttaacttgagcatcactgccgagtttcttgggcagtatggctattttcacgatattgattctttctatccatgagcatggaatgttcttccatttgtttgtgtcctcttttatttcgttgagcagtggtttgtagttctccttgaagaggtccttcacatcccttgtaagttggattcctaggtattttattctcgatactgatatgtcctcatttcttctcttaacactggagtcaaacaaaacatttctccctcgtctttcacagtcttgatatacaatcagtcgaatctggcttggatcaaactctggtaaaggccaacatttagcgtttccttctattaaaatgcaggcaacaaacttcagaggtataaggttcctataactttgatcaccaataggaatcatagatagtttcatcattgtacagctgatgtagatacccgcattttctcttgcccacgtgatgcctttttccacgggatcaccagctgccagcaccat

SEQ ID NO: 129632 - DNA, 460 bp, Homo sapiens
cggacgcgtggggttcatctacgaggggtatgccctcccccatgccatcctgcgtctggacctggctggccgggacctgactgactacctcatgaagatcctcaccgagcgcggctacagcttcaccaccacggccgagcgggaaatcgtgcgtgacattaaggagaagctgtgctacgtcgccctggacttcgagcaagagatggccacggctgcttccagctcctccctggagaagagctacgagctgcctgacggccaggtcatcaccattggcaatgagcggttccgctgccctgaggcactcttccagccttccttcctgggcatggagtcctgtggcatccacgaaactaccttcaactccatcatgaagtgtgacgtggacatccgcaaagacctgtacgccaacacagtgctgtctggcggcaccaccatgtaccctggcattgccgacagg

SEQ ID NO: 129633 - DNA, 2031 bp, Homo sapiens
atggccacagaggtatttcttatcccatatgctcttttgcaatgcagtcttgccagttacccatcaaaacctggaatctatgtgccctccccacagatgtgggttggctctgtgacttgttctgaccaaaagaatacgatagaagtcctggttccaaaggcctatactcttgccaggcaacagtacaagagtctcagtgaacaagtttacagctgccaccagggcactttaaacaccagggcccaagaatcagcagcttcactcctgaagccagcgagaccacgaacccgccagaagaaagaaactccaaacacgtccgaacatcagaaggaacaaactctggacacaccacctttaagaactgtaacactcactacgagggtccgcggcttcattcttgaagttagtgagaccaagaacccaccaatttcggacacaatggggctggatataagcaagcaagaggaggtgctgggcagagagtcagatgagcagggggagcaaagccaaggattgagtgagatgcagactgccctggcgatgttgctcacacgcgagccaataagcgccaaacaggcaccacacgaacccccaagaaggcaagaagacaacacgcaagcacgagagggagagacgcgcagccgaaaaacacgagcagaagggcagaaaggacacgcacacgcagaaaacgagcggaacgcaaaggaaagagaatcagagagaaagaggcaggaagcggaggatgagaacgggaaagagaagcaggagaggaacgagggaacgcacgcacgacacatgaaaagaagaaagagagacgaaaaaaaaagacagggacaaaacaagccaggcaacaaaagaccagaaggaaacgaagaggcgcaaagaagaagaaagaaaaacagagagcgacagaggttttccttctaccagtcaggcccctccgctgcaggtctgctggtgtttgctggtggtccactccagtccctgtttgcctgggtatcaccactggaggctgcagaacagcaaagattcctgtctgtcccttcctctggtcccttgcgaaaattctgcctatattttggcttcgttgggaatgcgacaccccttcgcggtctcaacacacatgggcgccttctaacgccggcacacgggacgcggagaaggcacacaaggccactaaacagccctgtcccggaaaaagccgggtccacaaccgagtcgaacggaagtccttacggacaaaaccccgggcctttacccccaaagggcaaccgggcacagggtgaaaaatggatgggtcggaggattcaagggaccacaaggcccagagcaagagaggccaaccacaagaagatgactcagatcatgtttgagaccttcaacaccccagccgtgtatatggccatccaggccatgttgtccctgtacacctatggctgtaccactggcattgtgatggactccagcgatggagtcacccacacagtgcccatctacgagggttacgccctcccccgtgccatcctgtgtctggacgtggctggccgggaccttactaactacctcatgaagatcctcaccgagcacagctacagctttaccaccatggccgagcgggaaatcgtgtgtgacatcaaggagaagctatactatgtcaccctggactttgagcaggagatggccacagcggcctccagctcctccctggagaagagctatgagctgtccgatggccaggtcatcaccattggcaatgagctatcctgctgccctgaggcgctcttccagccttccttcctgagcatggaatcctgtgacatccacaaaactaccttcaactccatcatgaaatgtgacatggacatccgcaaagacctgtacaccaacacagtgttgtttggcggcaacaacatgtaccctggcattgcgaacagggtgcagaagatcgtcactctggtgtggatgggcagctccatcctggccttgctgtccaccttccagcagatgtgggtcagcaagccaggagtatga

SEQ ID NO: 129634 - DNA, 1272 bp, Homo sapiens; identical to SEQ ID NO: 116055

SEQ ID NO: 129635 - DNA, 435 bp, Homo sapiens
atgacaacgtcctttcatggagatgacccttctgggacaccgtcagcaaagttcatcattgacatggtggaaattgcaccaggttggttccgggaaattctgccttcaggttccaacgtgacctttccagctccaacaagaaaaggaaaacaaaaaagaggaaggcatcttcaaaatggattgttccaaggagaaaagaaaaagcagcagcagcagcagcagcagcagcagcagcagcagcagcagcagcagcagcagcagcagcagaaaaagaccttccttccaccttatttttcactgactggacaggctgtatataggaagaatatgagagaattctcaaaaaagcagcaaaagcaatctgaccttgtgccccggctgctcaatggtgttgtagataaacatcttgcaactggacatcagcttctcagggag

SEQ ID NO: 129636 - DNA, 346 bp, Homo sapiens
ccaccgatgttccacaggcgccttctccactgcggcctcgaacagcaatgcggatcggccaccacccgcgcgccggagaggtctgcccaggccgggcctcccgccgccggaggtcgccgcgaccaccgaggagggagccgtggccgaggacgaggagaccgaggacgaggacggcgaaggcgcggcggcgggcgacgctagaaggccgctgccgccgggcttgcggacattggcagccgcgggcggcggctgctgctgctgctgctgctgctgctgttgctgctgctgctgctgctgctgctgctgctgctgctgctggggcttcagcgacatggtgagggaattc

SEQ ID NO: 129637 - DNA, 3346 bp, Homo sapiens
agccactttgacttaatgaaaatgactgctggcaagaggagtcccccaatcaaacctctgcttggcatgaatccctttcagaagaaccccaagcacgcgtctgtgttggcagaaagtggaatcaactatgacaagccgctgcctcccatccaggtggcatctctccgtgcagagcgaatcgcaaaagagaaaaaggctctggctgatcagcagaaggcacagcagccggccgtggcccagccacccccgccccagccgcagcccccaccacccccgcagcagccaccgccaccgctgccacaaccacaggcagcgggcagccagccgccagcagggccaccagctgtccagccccaaccccagccacagccccagacccagccacagcctgtgcaggccccagcgaaggcgcagcccgcaatcacgacggggggcagtgcagccgtactggcaggaaccattaaaacatcagttactgggacgagcatgcccactggtgccgtgagtggaaatgtgatcgtgaacaccatcgcaggggtcccagctgccaccttccagtccatcaacaagcgcctggcgtcgccagtggctcctggggccttgactacgccgggaggctctgctcccgcccaggtggtgcacacccagcccccgccacgggcagtcggctccccagccacggcgacccctgacctggtgtccatggcaacgactcagggtgttcgagcggtcacttctgtgacagcctcggccgtggtcactaccaacctgaccccagtgcagaccccggcacggtctttggtgccccaagtgtcccaagccacaggagttcagctccctggaaaaaccatcacacctgcacatttccagcttctcaggcagcagcagcagcagcagcagcaacagcagcaacagcagcagcagcagcagcagcagcagcagcagcagcagcagcagcagcaacagcagcagcagcaacagacgacgacgacctctcaggtgcaagttccacagatccagggccaggcccagtccccagcacagatcaaagctgtgggcaagctgacgccggaacacctcatcaaaatgcagaagcagaaactgcagatgcccccgcagcccccaccgccacaggcccagtctgcgcccccgcagccagcagcccaagtgcaagtgcagacctcgcagccgccgcagcagcagagcccccagctcacgacggtcacggccccaaggcctggtgccctgctgacgggcaccaccgtggccaacctccaggtggcccggctcacccgggttcccacttctcaactgcagtcgcaagggcagatgcagacccaggcaccccagccagcccaggtgcccttgccgaagcctccggtggtgtccgtcccggcagctgtggtctcctcaccgggagtcaccaccctgcccatgaacgtcgcggggatcagcgtggcgatcggtcagccacagaaggcagcaggacagaccgtggtggacccagcccgtgcacatgcagcagctgctgaagctgaagcagcaggccgtccagcagcagaaggccatccagccccaggctgcacagggcccggcagccgtccagcagaagatcaccgcacagcagatcaccacccctggcgcgcagcagaaggttgcctacgccgcgcagckggcccttaagaacccagtttcttaccacacccatctcccaggcccagaaactggccggggcccagcaagtgcagacccagatccaggttgcaaaacttcctcaagttgttcaacagcaaacacccgtggccagcatccagcaagttgcctctgcttcccagcaggcttctccacagactgtggcgctcacgcaggcgacggcggccgggcagcaggtgcagatgatccctgcagtgaccgcgactgcccaggtggttcagcagaaactcattcagcagcaggtggtgaccacggcgtcggccccgctccagactccaggcgctcccaacccagcccaggtgcccgccagctccgacagcccaagccagcagcccaagttacagatgagggtccctgctgtcaggctaaagacacctactaagcctccgtgccagtagtcagggcaagcagggctgcctctcatcttaaaagcaaaactaccttcctcacaagaaaacgctttattagtgaaccttgggaccatgtcacgcaagagattcagcactgggaaagatataattgaaacaaaatagtgtaatcattttattaaaatgcatcccacactgcaggacaaatggtccttatggagtgccgcgttctctgtactacgtggctcatggaaaaagtgacaacatggcttcctctaaatcatttcacctttcagtccccacccgcacccgtcccctagagccatagtactgtgttctgaaagccatttagaatttctttgtgagcatgtagtgctttgcacgccacagaagccgtctgccgtgtgtgaggagcatacaatggactttctaaagataaggcgtgggcttccacagtgtcttgccagagtttagttctttataccttactgaaaaatgcctcgtggtcttcgcagaggggaaggcctgtctaaagtcaatcatccgagatgggttttccattccaaagaaaggcaatatggttccttccttccctcctaaaatatgacttaacttttaagagaaatgttctgacacccacctaaacacacaaggcacgttcctggcctgtgttcaagggaaatgatcagtcattgcattgttattccaaagagcagccaacagtggcctcccccaggccctaccctgcaatgggattcgctttcatttaatggaaacttctgggactgatgcccaactcagtgcactcaagacgcatctccagttttcgggggaagctggtatttgacatagtgtgttaaacagctcctgagaacctttgggacactctgccatggctggcgtgaggcccagaggaccacgcagaggcaatggtagtacagatgtcacagctgagggtacgatgaggcctgggctcagtgagccaggacgaatgtgacagacaccccttgctgccacagtcagccctttgacgaaggtgggctggtgattctggaagtattggctatagcggtgggcccagtcaactcttccttgtggacttacgacagcagattttctctaggataagcttgtgtggttctgccagtgaagcagagaaccacctgtgctgttgtggaaggcgtgccgttgagggggaaaacgaagcccagtatttgctactgtttttcctttttttactatgacaggacaaggaaaaataaatg

SEQ ID NO: 129638 - DNA, 9732 bp, Homo sapiens
ttcggctagagagcactttgtggagaaagtcgtcttccacttgcacgaaagctttcctaggccaaaaagagtgtgcaaagatccaccttacaaagtagaagaatctgggtatgctggtttcattttgccaattgaagtttattttaaaaacaaggaagaacctaggaaagtccgctttgattatgacttattcctgcatcttgaaggccatccaccagtgaatcacctccgctgtgaaaagctaactttcaacaaccccacagaggactttaggagaaagttgctgaaggcaggaggggaccctaataggagtattcataccagcagcagcagcagcagcagcagtagcagcagcagcagcagcagcagcagcagcagcagcagcagcagcagcagcagcagcaacaacagcagcaacagccgccaccgccgccgccgccgccgccgcctcctcagcttcctcagccgccgccgcaggcacagccgctgctgcctcagccgcagccgcccccgccgccgcccccgccgccacccggcccggctgtggctgaggagccgctgcaccgaccaaagaaagaactttcagctaccaagaaagaccgtgtgaatcattgtctgacaatatgtgaaaacatagtggcacagtctgtcagaaattctccagaatttcagaaacttctgggcatcgctatggaactttttctgctgtgcagtgatgacgcagagtcagatgtcaggatggtggctgacgaatgcctcaacaaagttatcaaagctttgatggattctaatcttccaaggttacagctcgagctctataaggaaattaaaaagaatggtgcccctcggagtttgcgtgctgccctgtggaggtttgctgagctggctcacctggttcggcctcagaaatgcaggccttacctggtgaaccttctgccgtgcctgactcgaacaagcaagagacccgaagaatcagtccaggagaccttggctgcagctgttcccaaaattatggcttcttttggcaattttgcaaatgacaatgaaattaaggttttgttaaaggccttcatagcgaacctgaagtcaagctcccccaccattcggcggacagcggctggatcagcagtgagcatctgccagcactcaagaaggacacaatatttctatagttggctactaaatgtgctcttaggcttactcgttcctgtcgaggatgaacactccactctgctgattcttggcgtgctgctcaccctgaggtatttggtgcccttgctgcagcagcaggtcaaggacacaagcctgaaaggcagcttcggagtgacaaggaaagaaatggaagtctctccttctgcagagcagcttgtccaggtttatgaactgacgttacatcatacacagcaccaagaccacaatgttgtgaccggagccctggagctgttgcagcagctcttcagaacgcctccacccgagcttctgcaaaccctgaccgcagtcgggggcattgggcagctcaccgctgctaaggaggagtctggtggccgaagccgtagtgggagtattgtggaacttatagctggagggggttcctcatgcagccctgtcctttcaagaaaacaaaaaggcaaagtgctcttaggagaagaagaagccttggaggatgactctgaatcgagatcggatgtcagcagctctgccttaacagcctcagtgaaggatgagatcagtggagagctggctgcttcttcaggggtttccactccagggtcagcaggtcatgacatcatcacagaacagccacggtcacagcacacactgcaggcggactcagtggatctggccagctgtgacttgacaagctctgccactgatggggatgaggaggatatcttgagccacagctccagccaggtcagcgccgtcccatctgaccctgccatggacctgaatgatgggacccaggcctcgtcgcccatcagcgacagctcccagaccaccaccgaagggcctgattcagctgttaccccttcagacagttctgaaattgtgttagacggtaccgacaaccagtatttgggcctgcagattggacagccccaggatgaagatgaggaagccacaggtattcttcctgatgaagcctcggaggccttcaggaactcttccatggcccttcaacaggcacatttattgaaaaacatgagtcactgcaggcagccttctgacagcagtgttgataaatttgtgttgagagatgaagctactgaaccgggtgatcaagaaaacaagccttgccgcatcaaaggtgacattggacagtccactgatgatgactctgcacctcttgtccattgtgtccgccttttatctgcttcgtttttgctaacagggggaaaaaatgtgctggttccggacagggatgtgagggtcagcgtgaaggccctggccctcagctgtgtgggagcagctgtggccctccacccggaatctttcttcagcaaactctataaagttcctcttgacaccacggaataccctgaggaacagtatgtctcagacatcttgaactacatcgatcatggagacccacaggttcgaggagccactgccattctctgtgggaccctcatctgctccatcctcagcaggtcccgcttccacgtgggagattggatgggcaccattagaaccctcacaggaaatacattttctttggcggattgcattcctttgctgcggaaaacactgaaggatgagtcttctgttacttgcaagttagcttgtacagctgtgaggaactgtgtcatgagtctctgcagcagcagctacagtgagttaggactgcagctgatcatcgatgtgctgactctgaggaacagttcctattggctggtgaggacagagcttctggaaacccttgcagagattgacttcaggctggtgagctttttggaggcaaaagcagaaaacttacacagaggggctcatcattatacagggcttttaaaactgcaagaacgagtgctcaataatgttgtcatccatttgcttggagatgaagaccccagggtgcgacatgttgccgcagcatcactaattaggcttgtcccaaagctgttttataaatgtgaccaaggacaagctgatccagtagtggccgtggcaagagatcaaagcagtgtttacctgaaacttctcatgcatgagacgcagcctccatctcatttctccgtcagcacaataaccagaatatatagaggctataacctactaccaagcataacagacgtcactatggaaaataacctttcaagagttattgcagcagtttctcatgaactaatcacatcaaccaccagagcactcacatttggatgctgtgaagctttgtgtcttctttccactgccttcccagtttgcatttggagtttaggttggcactgtggagtgcctccactgagtgcctcagatgagtctaggaagagctgtaccgttgggatggccacaatgattctgaccctgctctcgtcagcttggttcccattggatctctcagcccatcaagatgctttgattttggccggaaacttgcttgcagccagtgctcccaaatctctgagaagttcatgggcctctgaagaagaagccaacccagcagccaccaagcaagaggaggtctggccagccctgggggaccgggccctggtgcccatggtggagcagctcttctctcacctgctgaaggtgattaacatttgtgcccacgtcctggatgacgtggctcctggacccgcaataaaggcagccttgccttctctaacaaaccccccttctctaagtcccatccgacgaaaggggaaggagaaagaaccaggagaacaagcatctgtaccgttgagtcccaagaaaggcagtgaggccagtgcagcttctagacaatctgatacctcaggtcctgttacaacaagtaaatcctcatcactggggagtttctatcatcttccttcatacctcaaactgcatgatgtcctgaaagctacacacgctaactacaaggtcacgctggatcttcagaacagcacggaaaagtttggagggtttctccgctcagccttggatgttctttctcagatactagagctggccacactgcaggacattgggaagtgtgttgaagagatcctaggatacctgaaatcctgctttagtcgagaaccaatgatggcaactgtttgtgttcaacaattgttgaagactctctttggcacaaacttggcctcccagtttgatggcttatcttccaaccccagcaagtcacaaggccgagcacagcgccttggctcctccagtgtgaggccaggcttgtaccactactgcttcatggccccgtacacccacttcacccaggccctcgctgacgccagcctgaggaacatggtgcaggcggagcaggagaacgacacctcgggatggtttgatgtcctccagaaagtgtctacccagttgaagacaaacctcacgagtgtcacaaagaaccgtgcagataagaatgctattcataatcacattcgtttgtttgaacctcttgttataaaagctttaaaacagtacacgactacaacatgtgtgcagttacagaagcaggttttagatttgctggcgcagctggttcagttacgggttaattactgtcttctggattcagatcaggtgtttattggctttgtattgaaacagtttgaatacattgaagtgggccagttcagggaatcagaggcaatcattccaaacatctttttcttcttggtattactatcttatgaacgctatcattcaaaacagatcattggaattcctaaaatcattcagctctgtgatggcatcatggccagtggaaggaaggctgtgacacatgccataccggctctgcagcccatagtccacgacctctttgtattaagaggaacaaataaagctgatgcaggaaaagagcttgaaacccaaaaagaggtggtggtgtcaatgttactgagactcatccagtaccatcaggtgttggagatgttcattcttgtcctgcagcagtgccacaaggagaatgaagacaagtggaagcgactgtctcgacagatagctgacatcatcctcccaatgttagccaaacagcagatgcacattgactctcatgaagcccttggagtgttaaatacattatttgagattttggccccttcctccctccgtccggtagacatgcttttacggagtatgttcgtcactccaaacacaatggcgtccgtgagcactgttcaactgtggatatcgggaattctggccattttgagggttctgatttcccagtcaactgaagatattgttctttctcgtattcaggagctctccttctctccgtatttaatctcctgtacagtaattaataggttaagagatggggacagtacttcaacgctagaagaacacagtgaagggaaacaaataaagaatttgccagaagaaacattttcaaggtttctattacaactggttggtattcttttagaagacattgttacaaaacagctgaaggtggaaatgagtgagcagcaacatactttctattgccaggaactaggcacactgctaatgtgtctgatccacatcttcaagtctggaatgttccggagaatcacagcagctgccactaggctgttccgcagtgatggctgtggcggcagtttctacaccctggacagcttgaacttgcgggctcgttccatgatcaccacccacccggccctggtgctgctctggtgtcagatactgctgcttgtcaaccacaccgactaccgctggtgggcagaagtgcagcagaccccgaaaagacacagtctgtccagcacaaagttacttagtccccagatgtctggagaagaggaggattctgacttggcagccaaacttggaatgtgcaatagagaaatagtacgaagaggggctctcattctcttctgtgattatgtctgtcagaacctccatgactccgagcacttaacgtggctcattgtaaatcacattcaagatctgatcagcctttcccacgagcctccagtacaggacttcatcagtgccgttcatcggaactctgctgccagcggcctgttcatccaggcaattcagtctcgttgtgaaaacctttcaactccaaccatgctgaagaaaactcttcagtgcttggaggggatccatctcagccagtcgggagctgtgctcacgctgtatgtggacaggcttctgtgcacccctttccgtgtgctggctcgcatggtcgacatccttgcttgtcgccgggtagaaatgcttctggctgcaaatttacagagcagcatggcccagttgccaatggaagaactcaacagaatccaggaataccttcagagcagcgggctcgctcagagacaccaaaggctctattccctgctggacaggtttcgtctctccaccatgcaagactcacttagtccctctcctccagtctcttcccacccgctggacggggatgggcacgtgtcactggaaacagtgagtccggacaaagactggtacgttcatcttgtcaaatcccagtgttggaccaggtcagattctgcactgctggaaggtgcagagctggtgaatcggattcctgctgaagatatgaatgccttcatgatgaactcggagttcaacctaagcctgctagctccatgcttaagcctagggatgagtgaaatttctggtggccagaagagtgccctttttgaagcagcccgtgaggtgactctggcccgtgtgagcggcaccgtgcagcagctccctgctgtccatcatgtcttccagcccgagctgcctgcagagccggcggcctactggagcaagttgaatgatctgtttggggatgctgcactgtatcagtccctgcccactctggcccgggccctggcacagtacctggtggtggtctccaaactgcccagtcatttgcaccttcctcctgagaaagagaaggacattgtgaaattcgtggtggcaacccttgaggccctgtcctggcatttgatccatgagcagatcccgctgagtctggatctccaggcagggctggactgctgctgcctggccctgcagctgcctggcctctggagcgtggtctcctccacagagtttgtgacccacgcctgctccctcatctactgtgtgcacttcatcctggaggccgttgcagtgcagcctggagagcagcttcttagtccagaaagaaggacaaataccccaaaagccatcagcgaggaggaggaggaagtagatccaaacacacagaatcctaagtatatcactgcagcctgtgagatggtggcagaaatggtggagtctctgcagtcggtgttggccttgggtcataaaaggaatagcggcgtgccggcgtttctcacgccattgctcaggaacatcatcatcagcctggcccgcctgccccttgtcaacagctacacacgtgtgcccccactggtgtggaagcttggatggtcacccaaaccgggaggggattttggcacagcattccctgagatccccgtggagttcctccaggaaaaggaagtctttaaggagttcatctaccgcatcaacacactaggctggaccagtcgtactcagtttgaagaaacttgggccaccctccttggtgtcctggtgacgcagcccctcgtgatggagcaggaggagagcccaccagaagaagacacagagaggacccagatcaacgtcctggccgtgcaggccatcacctcactggtgctcagtgcaatgactgtgcctgtggccggcaacccagctgtaagctgcttggagcagcagccccggaacaagcctctgaaagctctcgacaccaggtttgggaggaagctgagcattatcagagggattgtggagcaagagattcaagcaatggtttcaaagagagagaatattgccacccatcatttatatcaggcatgggatcctgtcccttctctgtctccggctactacaggtgccctcatcagccacgagaagctgctgctacagatcaaccccgagcgggagctggggagcatgagctacaaactcggccaggtgtccatacactccgtgtggctggggaacagcatcacacccctgagggaggaggaatgggacgaggaagaggaggaggaggccgacgcccctgcaccttcgtcaccacccacgtctccagtcaactccaggaaacaccgggctggagttgacatccactcctgttcgcagtttttgcttgagttgtacagccgctggatcctgccgtccagctcagccaggaggaccccggccatcctgatcagtgaggtggtcagatcccttctagtggtctcagacttgttcaccgagcgcaaccagtttgagctgatgtatgtgacgctgacagaactgcgaagggtgcacccttcagaagacgagatcctcgctcagtacctggtgcctgccacctgcaaggcagctgccgtccttgggatggacaaggccgtggcggagcctgtcagccgcctgctggagagcacgctcaggagcagccacctgcccagcagggttggagccctgcacggcgtcctctatgtgctggagtgcgacctgctggacgacactgccaagcagctcatcccggtcatcagcgactatctcctctccaacctgaaagggatcgcccactgcgtgaacattcacagccagcagcacgtactggtcatgtgtgccactgcgttttacctcattgagaactatcctctggacgtagggccggaattttcagcatcaataatacagatgtgtggggtgatgctgtctggaagtgaggagtccaccccctccatcatttaccactgtgccctcagaggcctggagcgcctcctgctctctgagcagctctcccgcctggatgcagaatcgctggtcaagctgagtgtggacagagtgaacgtgcacagcccgcaccgggccatggcggctctgggcctgatgctcacctgcatgtacacaggaaaggagaaagtcagtccgggtagaacttcagaccctaatcctgcagcccccgacagcgagtcagtgattgttgctatggagcgggtatctgttctttttgataggatcaggaaaggctttccttgtgaagccagagtggtggccaggatcctgccccagtttctagacgacttcttcccaccccaggacatcatgaacaaagtcatcggagagtttctgtccaaccagcagccatacccccagttcatggccaccgtggtgtataaggtgtttcagactctgcacagcaccgggcagtcgtccatggtccgggactgggtcatgctgtccctctccaacttcacgcagagggccccggtcgccatggccacgtggagcctctcctgcttctttgtcagcgcgtccaccagcccgtgggtcgcggcgatcctcccacatgtcatcagcaggatgggcaagctggagcaggtggacgtgaaccttttctgcctggtcgccacagacttctacagacaccagatagaggaggagctcgaccgcagggccttccagtctgtgcttgaggtggttgcagccccaggaagcccatatcaccggctgctgacttgtttacgaaatgtccacaaggtcaccacctgc

SEQ ID NO: 129639 - DNA, 1013 bp, Homo sapiens
gaagcgccggtgctggtgcggcgggggactgcggggccagcctcaggtagcagtagcagcagcagcagcagcagcagcagcagcagcagcagcagcagcagcagcagcagctgcttcattgtttcacttcttcagaaagcctccggattctaaaaagccctcagtaccagagacagaagcagatggattcgtccttttaggagatacaacagatgagcaaagaatgacagcaagaggcaaaacttcggacatagaggccaaccaacctttggagcggacaaggcaaagggggagcgcgttcggacctctagtacaataaggcgaacctcctatttggatacaataacaggaccttacctcacaggacagtggccacgggatcctcatggtcactacccttcatgcatgaaagacaaagctactcagacacctaggctgttgggcagaagagggtgcagaaaagaggtcacatcagcgttctgcgttcatgggggagtgctgatcaactaaaagaggaaaccccaacagacttacagcagaatgctcagcagaaactctataagccagaagaggttgggtgcctaatttcagacttcttaaaagaaaaagaaaactgtcagccacgaattttgtatgctggtaaactcagctcggaatgtactcctgatgaagaagctgtgaacattgttgaaatgataacaaaagatttagaatattacataaacctagttgataaagagtggcagggtttgagaggattgactccaattttaaaagaagtcctgcgagtaaaatgctatcaaacagcatcacatgctacaaagaaatctggtatgaaaggaaaagtcagtcaatttggcaaacttcactgttattttaagaaattaccacaactgcctctgccttcagcaaccgccatcctgatcagtcagctaacatctacgagacaagagcttcaccataaaaaagattgtaacttgctgaagactcagatgatcattagcattttttag

SEQ ID NO: 129640 - DNA, 387 bp, Homo sapiens
gcagcaccaggccatcatggtgctggaggtgcaggccttggagccttacctctgtgtggccaacggctccagcctcatggtccctcaaggagaccagggtaccatcaacatggccgagctccaccttggcaccaacctcgacatccgcagcggggatgaggtccactaccaccctcagctcccgcaacaccctggccttctcaatggatgtggggccttctcaatggatgtggggccagtgcacacagatgccaccctacaagtgaccattgccctagagggcccactagccccactgaagctggcctggcacaagaagatctacatcttccagggagaggcagctgagatcagaagagaccagctggaggtgaggagctgggggtg

SEQ ID NO: 129641 - DNA, 189 bp, Homo sapiens
cttttcatgtttttctgcctgctttatattcgctagcagctgctgcatccagggtacaatgcgcctttccagaacacagcagcgacccggggtagagggatcgctcaaacagcaccagaggctgcattccaacttttcctccatcaacgagtccgttttcattgttagtttctccttaaacacgattgg

SEQ ID NO: 129642 - DNA, 1139 bp, Homo sapiens
ctatgctgttttggttactgtagccttgtagtatagtttgaagtcaggtagtgtgatgcctccagctttgttcttttggcttaggattgacttggcaatgtgggcccttttttggttccatatgaactttaaagtagttttttccaattctatgaagaaagttcttggtagcctgatggggatggcattgaatctataaattaccttgggcagtatggccattttcatgatattgattcttcctacccatgagcatggaatgttcttccatttgtttgtatcctcttttatttcattgagcagtggtttatagttctccttgaagaggtctttcacatcccttgtaagctggattcctaggtattttattctgtttgaagccattgtgaatgggagttcactcatgatttggctctctgtttgtctgttattggtgtataagaatgcttgtgatttttgcacattgattttgtatcctgagactttgctgaagttggctgtcagcttaaggagattttgggctgagacgatggggttttctagatatacaatcatgtcatctgcaaacagggacaatttgacttcctcttttcctaattgaatgccctttatttccttctcctgcctgattgccctggccagaacttccaacactctggtagaatttggctgtgaatccatctggtcctggacttttttggttggtaagttattaattattgcctcaatttcagagcctgttattggtctattcagagattcaacttcttcctggtttagtcttgggagggtgtatgtgtcaaagaatttatccatttcttctagattttctagtttatttgtgtagaggtgttgatagtattctctgatggtagtttgtatttctttggtctttgatgatggtgacgtacagatggggttttggtgtggatgtcctttctgtttgttagttttccttctaacagtcaggaccctcagctgcaggtctgttggagtttgctggaggtccactccagaccctgtttgcctgggtatcagcagcggaggcttataccttctagccctatgattggattcagccttttctccagccagccctagttcctttttggagaccataagctgtgtgcttgggtgca

SEQ ID NO: 129643 - DNA, 2850 bp, Homo sapiens
atgtcagaaaaaacacaacaggggaaattggccgcagccaagaaaaagttaaaagcatattggcagaggaagagccctggcattccagcaggagctaacaggaaaaagaaagtcaatggcagtagccctgacacagccacttctggtggttaccactcacctggggattcagcaacaggtatctacggggagggccgtgcatcctctactaccctggaggatctggagagccagtaccaagaactatcagtggccctggattcaagctccgcaataatcagtcaactcactgaaaacatcaattcactggttcgcacatctaaggaggagaagaagcatgagatacatctggtacagaagcttgggaggagcttgttcaaactcaaaaaccagatggctgaacccctggccccagagcccccagcagggccatctaaggtagagcagctacaagatgagaccaaccacctaaggaaggagctagagagtgtgggaagacagctccaggctgaggtggaaaacaatcagatgttgagtctcctgaacaggagacaggaggagaggctacgtgaacaggaggagaggctacatgaacaggaggagaggcaacgtgaacaggaggataggctacatgaacaggaggagaggctacgtgaacatgaggagaggctgtgtgaacaggaggagaggctatgtgaacaggaggagaggctacgtgaacaggaggagaggctacatgaacaggaggagaggctacgtgaacaggaggagaggctgtgtgaacaggaggagaggctacgtgaacatgaggagaggctgtgtgaacaggaggagaggctacgtgaacaggaggagaggctgtgtgaacaggaggagaggctacgtgaacaggaggagaggctgtgtgaacaggaggagaggctacgtgaacaggaggagaggctgtgtgaacaggagaagctgccagggcaggagaggctgctggaagaggtggagaagctgttagaacaggagaggcggcaggaggagcaggagaggctgctggagagggagaggctgctggaagaggtggagaagctgttagaacaggagaggcagcaggaggagcaggagaggctgctggagagggagaggctgctggaagaggtggagaagctgttagaacaggagaggcggcaggaggagcaggagaggctgctggagagggagaggctgctggacgaggtggaggagctcctggacgaggtggaggagctcctggagcaggagaggcttcggcaacaggatgagaggctgtggcagcaggagactctgcaggagctggagaggctgcgggagctggagaggctgcgggagctggagaggatgctggagctggggtgggaagccctgtacgagcagcgggccgagccacgcagcggcttcgaggagctgaacaacgagaacaagagcacactgcagttggagcagcaagtaaaggagctgaagaagtcggccctactccgactagagttgaggcatcagggagaggcggagctgggagagcgccgccgagaggtcccgcgggtggttgcggccgtgacagcggctcccgacgggctcaccttccgcgcccctcccgccagaggagaaactaacaatgaaaacggactcgttgatggaggaaaagttggaatgcagcctctggtgctgtttgagcgatccctctatcccgggtcgctgctgtgttctggaaaggcgcattgtaccctggatgcagcagaccctctccattcaaagcccctcttcaactgcccccccccccccactacctccaagacagagattctggattcttgcaactgcagcccctcagagagtgtaagaggggcagaaaaaggagatcaggagctgctagcgaatataaagcaggcagaaaaacatgaaaagaaccacccggaggtgactgtggccatggctctgactgacatagacctgcagctgcagttctccatgtcccaacccgaagccctccttctcctggcagcaggcccagctgaccacctcctgctgcagctctactctggacacctgcaggtcaggcttgtcctgggccaggaggagctgaggctgcagaccccagcagaaattctactgagtgactccgtcccccacaccacagttctgactgtctcagaggactggcccacattgtcagtcaatgggtttctgaatgcctcctctgtagtcctgggagcccccctagaagtcccctatgggctctttgttgggagcactgggagacttggcctgccctacctgaggggaaccagccatcccctgaggggttgcctccatgcagccgctctcaatggccgcagactcctccagcctctgacccccaataagcatgagggctgtgctgaagagttttctgccaatgacgatgtggccctgggcttctctgggtcccactctctggctgccttgcctgcctggggcactcaggatgaaggaaccctggagtttacactcaccacacagagctggcaggcacccttggccttccaggcagcaggctggcatggggacttcatccatgtggacatatttgagggccacctgtggtccatggttgagaagggccagggtactgtattgctcctcaacagtgtgcctgtgactgatgcacagccccacaaggtcagcatccacatcaacattcaccagctagaaatctccatggaccagtaccccacatgtactttgaaccgaggagtcctcagctacctggagccacgtgacagtctccttcttggggagctggtgcagaggcctctcgtcacctccaggaacaccgctcaggcctga

SEQ ID NO: 129644 - DNA, 2835 bp, Homo sapiens; identical to SEQ ID NO: 121594

SEQ ID NO: 129645 - DNA, 551 bp, Homo sapiens
caatcactgataccctttcttccagttgattgaatcagctactgaagcttgtgcattcatcacatagttctcatgccatggttctcagctccatcaggtcatttaaggacttttctacactggatattctagttagccatttgtctaatcttttttcaaggtttttagcgtctttgccatgggttcgaacttcctcctttagctcaaagaagtttgatcgtctgaggcgtgacgtacagatgggattttggtgtggatgtcctttctgtttgttagttttccttctaacaatcaggaccctcagctgcaggtctgttggagtttgctggaggtccactccagaccttgtttgcctgggtatcagcagcaccctgaaagccctacttgctttctcagtggggaggcttgtagcctggggcaagttctcagccctgctcaccagctgcctgggaacaaactcagtgcagttggcgggggcatggtggaagtaagaggctcttacctataagcgccatctactggcttacaagtcaaaccgcatagcccaataa

SEQ ID NO: 129646 - DNA, 5724 bp, Homo sapiens
atggctgtcctcagccttcctcttgctcctccaactcttatgccacctgcacattttaacctagtggaaatgcaagtcaaagctacattaaaagaatattggcagaggaagagccctggcattccagcaggagctaacaggaaaaagaaaatcaatggcagtagccctgacacagccacttctggtggttaccactcacctggggattcagcaacaggtatctacggggaaggccatgcatcatctgctaccctggaggatctggagctgagacaacccacaccctccaccagccctaatgattgttctctctacccctccccacaatcttcctccaactcctcctctctgcatgcacctcacagccagtaccgagaactagcagtggccctgcactcaagctccgcaataatcagtcaactcagtgaaaacatcaattcactgaataatgagaacaagagtgcactgcagttggagcggcaagtaaaggagctgaagcttggtgagctgaaagagacggtaacctctgacccatctaataatggttgggaggcagtcaccagcctctgggaaggggagcgtcttcctgcacgtggagctgaagagccaagaggctcagagtccacagcagcagcaagaccagtacctgtgtcacctgcagcagttcgtggtcgcttagtagcaggagaacctggaagctaccagccagcagaaacagcagctaaagcccagttgagcctcatggctctccctggggaaggatatggaggaggacatctggacaatgaggaggaggcacctcggcccatgctgaacattccaggggacctggagagccgggaggccatggtggcatttttcaactccgctggagccagtgcccaggaggagcaaagcgtgtgctgccagcccctggctcacccagtggcctcatcccagaaaaagccagaggcagcggccccagccccagagactgggggtgaatctgtgtgtggggacacccactgggccctgcaggaggccatggagaagctgcaggaaagtacatcagccagggggcagtgccaaagacgcagcactgggagaggaggacatcgtcaggctggcccaggaccaggaggagatgaaggagaaactaacaatgaaaacggactcgttgatggaggaaaagttggaatgcagcctctggtgctgtttgagcgatccctctatcccgggtcgctgctgtgttctggaaaggcgcattgtaccctggatgcagcagaccctctccattcaaagcccctcttcaactgccccccaccgccccaccacctccaagacagagattctgggttcctgcaactgcagcccctcagagagtgtaagagggtcagaaaaaggagattaggaaatgagggaagcagcgctgtcagagtttccaaagccctggccagcaaggcatcagaggcctctgttggggtgggggcctccctggctatgcgctccagcagcacaaggcagcctctggctgtgaccaccaagccaggtgatcaggccagtgatgtttccctttcagccaggtcggggagccagacctgggagggagactcctctggggcccaggggatgcaagtcagaactggcagaggcctctggctccaggaacctccaagaaggagacctgagttgctgggaatttctgggtctgacctcctgcaaagtcaaggtctgggctggacacaagcttccttctttggtgagaaccacctggaggtgactgtggccatggctctgactgacatagacctgcaactgcagttctccacgtcccaacccgaagccctccttctcctggcagcaggcccagctgaccacctcctgctgcagctctactctggacacctgcaggtcagggttgtcctgggccaggaggagctgaggctgcagatcccagcagaaatgctgctgagtgactccatcccctacactacagttctgactgtctcagagggctggcccacattgtcagtcaatgggtttctgaatgcctcctctgtagtcctgggagcccccctagaggtcccctatgggctctttgttgggaacactgggagccttggcctgccctacctgaggggaaccagccatcccctgaggggttgcctccatgcagccactctcaatggccacagcctcctccggcctctgacccccgatatgcatgagggctgtgctgaagagttttccaccagtgacgatgtggccctgggcttctctgggccccactctctggctgccttccctgcctggggcactcagaacaaaggaaccctggagttggcactcaccacacagatctggcaggcacccttgaccttccaggcagcgggctggcatggggacttcatccatgtggacatatttgagggccacctgtggttcatggtcgagaagggccagggtactgtattgctcctcaacagtgtgcttgtggctgacgtgcagaccctcaaggtcagcatccacatcaacactcaccagctagaaatctccatggaccagtaccccacacacctcagtgtcaatggccagaggtgggggcttcgggaagccttgctgacacacaacatggcggcaggctgcagactggaggaggtggaggagtatgaggacaatacctatggccattatgaagctttctccaccctggcccccagggcttggctgtccatggatctagctgagccatgcatgcttgagccagggctgcctcctgtctttaccaatttcacccagctgctgactatcagcccagtggtggtgaccgagggtggcacagccgagtggtggcatgtgcagcccatgctggccctgatggaggctgaactgcataaatcccaggacttgacgttccgggtcagcaatggactgcaggccagccccccgtccatgctgaaggtggtggccatccagccggccatacagatccactgcagcacagggctgcatctggcccaggactctgccatgcccatcttgcctaccaacctgtcggtggagaccagcaccgtggggcaggatgtgactgtgttgttctgtgtcaccagaggcctgcagttcagggaggtgcagaagcagggggctggtggggtggagggtgctgagtggtgggccacacagtcattccaccagcaggatgtggagcagggccacatgaggtacctgagcactaacccacagcactatgccgaggacaccgtgaagaacctggatctgcaggtgcaggtgagctgggaaatcctgagcaatctgtccttcctagtgaccatccagagagccactgtgtggatgctgcagctgcggccactgcacactcaacacccagcagaggccctcaccacagcccacctggaggccaccctggaagaggcaggcccaagccccccaaccttccactctgaggtggttcaggctcccaggaaaggcaaccttcaactacagggcacgacactgtcagatggtcagggcttcacccaggatgatgtacaggctggagaggtgacctatagggccatggcacatgcctcagtggcagtggaggacaccttctgtttccatgtcacagctccactatatttctccccactctgtactttctccatccatactggcggtgacccagacatgcctgtcctcaccaatgtcctcttggtgcccgagggtggtgggtgtgtcctctctgctgaccagctcttcgtcaagagcctcaacagtgccaggtggcagctgctgactccacacaacatggccttcagcaatgctgattcaggctttgtggatgcccagctggtgctgacccacaaggacctcctgtctggcagtatcatggccacggatgagcccatgcagcccatcttctgcttcatccaggaggggcctcaggaagaggcgagtcctgttcacgcactcaggctgaccatggctggatcctgctgcatgtgtccgacaggcagcaccaggccatcttggtgctggagacagcccttgctggggacagttgctccaggccactcagccagcacagccttcgcccagaaggacctgctggttggggccgttctctttggccacaatggcagcctcagctcccgcaacaccctggccttctcaatggatgtggggccttctcaatggatgtggggccttctcaatggatgtggggccagtgcacacagacagtgcacacggtgcactctacaagtgaccattgccctagagggcccactagccccactgaagctggcctggcacaagaagatctacatcttcctgggagaggcagctgagatcagaagggaccagctggaggcagaacgggagttgttccatagcagggcagagcagggcagactctttgtgggccgtcctgggcaggcagcacacctgatgctcccaccaggagactgcgtgagcatctggacccagcacatgatcacaaccacggagttcatcatctcggagccgctggccaatctgtactcatgtggggaccagaacacactgatggaggagttggcaaagcaggcacagcagcgcgacaagatgctgtgcatgcaccacgcgctgaaggaggcaaatgacatcaacaggaccaccgtcagcatgcccatgcccccgcctgtggatgacacctggctgcaggtgcagagtgtccctgaggaacacaggtaccagggactggcccccatagccccaaagtcccccatccgggccacacagaggagtgcccagggcttagtggcacgctccctcatggggtggttcccacctggacctggcttcaatgcagtccggggcatgactgagataggcatacgttgtgaggaactggagggtaactgggtaaagagctgcagtgtgggcagaagtgtagtgtgggtcacattgaggatagccactggccaaagcagggaacagagacagaatgaggaagagctctgtggggagggtggggcaccgggtggagaaccttcaaagtccaaagagtatgactttttgggattcaatgctgtaggcagtagggagccatggaaggctcttaggtggagaaatgacagccggacattagtgagcaagccctgtctccctgagcagcatgggtggtcctctgagcacgccaggcacgagtgtgcagggagctggtgcacatgcctctgtgtgcgggtgagcatctgtgttgtgactctgcccacgcatgtacttcagtgtgccgagtggctgcacgccccagatccatgcagcacgtgccggccgaggaccctgggctttctgatggctcagaggggcctctggcattcactccagccagccgtcccttatagatccaccattttggttcagtgttccttctctatcaggcttggtggctgttggatggggctctccaagcaagaggtggccctgggccagtgggttggaagacatggggaccacagaagagggaagcccgagggggctggcattggtctgaactctctagcactgggaatcagtccccgtgctgtgcttgcggagtcttgtggaccagcaagaggaagctgtctcctgacatcgcccctccaacgtgcaccacctccattgagcttccgggacatgcgtggcctgcggacagctagcccccgccatccctcccacccttctggccaagcatggcggtgctgtgcaggcagctgtgtggcctga

SEQ ID NO: 129647 - DNA, 1287 bp, Homo sapiens; identical to SEQ ID NO: 121595

SEQ ID NO: 129648 - DNA, 855 bp, Homo sapiens
atgaatggaatttattcaagagacaccagagagctctttcctctttgtgccatgggagcactgaaggagaagtcagtagcgtgtaatgtggagaggccctcaccagaacccaaccatgatggacaaggagtagatgaacctctttcagaaactggatttaaacaagcagcagctgctggtatatttctgaataatgtgaagtttactcatgctttctccagtgatctcatgaggacaaagcagcctccactgctgatacccaggcaaacagggtctggagtggacctccagcaaactccaacagacctgcagctgaggatcctgactgttagaaggaaaactaacaaacagaaaggacatccataccaaaaccccatctgtacgtcaccatcatcaaagaccaaagcaaggcaggccaacattcaaattcaggaaatacagagaatgccacaaagatactcctcaagaagagcaactccaagatgcataattgtcagattcaccaaagttgaaatgaaggaaaaaatgttaagggcagccagagagaaaggtcaggttacccacaaagggaaccccatcagactaacagcagatctcttggtaaaaactctacaagccagaagagagtgggggccaatattcaacattctcaaagaaaagaattttcaacccagaatttcatatccagccaaactaagcttcataagtgaaggagaaataaaatcctttacagacaagcaaatgctgagagatttcggcaccaccaggcctgccctaaaagagctcctgaaggaagcactaaacatggaaaggaacaaccagtaccagccactgcaaaaacatgtcagattgtaa

SEQ ID NO: 129649 - DNA, 1698 bp, Homo sapiens
atggggtcttgcccaggtggattcacagccgaattctaccagaggtacaaggaggagctggtaccattccttctgaaactattccaatcaatagaaaaacagggaaccctccctaactcattttatgaggccagcatcatcctgataccaaagcctggcagagacacaaccaaaaaagagaattttagaccaatatccctgatgaacatcgatgcaaaaatcctcaataaaatactgacaaaccgaatccagcagcacatcaaaaagcttatccaccatgatcaagtgggcttcatccatgggatgcaaggctggttcaacatacgcaaatcaataaatgtaatccagcatataaacagaaccaacgacaaaaaacacatgattatctccatagatgcagaaaaggcctttgacaaaattcaacaacccttcatgctaaaaactctcaataaattagggacatggatgaagctggaaaccatcattctcagcaaacgatcgcaaggacaaaaaaccaaacaccggatgttctcactcatagtaaatattatccctaccataaagatactaattaagcaaaacatgacagcaatggaaactctctgtccaatatttaagttagaaggtgataccatggataaccctattgcaaatagaagagtgaggacagcagttcccacaagtgtggtgtgcctccacgtgggcacagagccagaagcaagactgccacatgggcctatgatcacggcacaaagtccttttggacagtgcctccctggagttgtggggcagttcaggaagagagaggatctcaagaaagaaggacatactaaactcctgtcaaaaaaggaagccaggcctcagactgggctcaggacttgggctctggattcaggcaccaaaggcacagatgagggagagccaccgctgctgatacccaggcaaacagggtctgcagtggacctccagcaaattacaacagacctgcagctgagggtcctgactgttagaaggaaaactaacaaacagaaaggacatccacaccaaaaccccacctgtacgtcaccatcatcaaagaacaaagaaaaagagggaatcctccctaactcattttatgaggccagcatcatcctgataccaaagcctggcagagacacaaccaaaaaagagaattttagaccaatatccctgatgaacatcgaagcaaaaatcctcaataaagtactggcaaaccgaatccagcagcacatcaaaaaccttatccaccatgatcaagtgggcttcatccatgggatgcaaggctggttcaacatacgcaaatcaataaacgtaatccagcatataaacagaaccaatgacaaaaaccacattattatctcaatagatgcagaaaaggcctttgacaaaattcaacaacccttcatgctaaaaactctcaataaattaggtattgatgggacgtatctcaaaataataagagctatttatgacaaacccacagccaatatcatactgaatgagcaaaaactggaagcattccctttgaaaaccggcacaagacagggatgccctctctcaccactcctattcaacatagtgttggaacttctggccagggcaatcaggcaggagaaggaaataaagggtattcaattaggaaaagaggaagtcaaattgccctgtttacagatgacatga

SEQ ID NO: 129650 - DNA, 1167 bp, Homo sapiens; identical to SEQ ID NO: 125291

SEQ ID NO: 129651 - DNA, 2805 bp, Homo sapiens; identical to SEQ ID NO: 121603

SEQ ID NO: 129652 - DNA, 1989 bp, Homo sapiens; identical to SEQ ID NO: 117890

SEQ ID NO: 129653 - DNA, 762 bp, Homo sapiens; identical to SEQ ID NO: 115053

SEQ ID NO: 129654 - DNA, 1023 bp, Homo sapiens; identical to SEQ ID NO: 126287

SEQ ID NO: 129655 - DNA, 382 bp, Homo sapiens
ggctgtgaccaccaagccaggtgatcaggccagtgatgtttccctttcagccaggtcggggagccagacctgggagggagactcctctggggcccaggggatgcaagtcagaactggcagaggcctctggctccaggaacctccaagaaggagacctgagttgctgggaatttctgggtctgacctcctgcaaagtcaaggtctgggctggacacaagcttccttctttggtgagaaccacctggaggtgactgtggccatggctctgactgacatagacctgcaactgcagttctccacgtcccaacccgaagccctccttctcctggcagcaggcccagctgaccacctcctgctgcagctctactctggacacctgcag

SEQ ID NO: 129656 - DNA, 993 bp, Homo sapiens
gtcagggttgtcctgggccaggaggagctgaggctgcagatcccagcagaaatgctgctgagtgactccatcccctacactacagttctgactgtctcagagggctggcccacattgtcagtcaatgggtttctgaatgcctcctctgtagtcctgggagcccccctagaggtcccctatgggctctttgttgggaacactgggagccttggcctgccctacctgaggggaaccagccatcccctgaggggttgcctccatgcagccactctcaatggccacagcctcctccggcctctgacccccgatatgcatgagggctgtgctgaagagttttccaccagtgacgatgtggccctgggcttctctgggccccactctctggctgccttccctgcctggggcactcagaacaaaggaaccctggagttggcactcaccacacagatctggcaggcacccttgaccttccaggcagcgggctggcatggggacttcatccatgtggacatatttgagggccacctgtggttcatggtcgagaagggccagggtactgtattgctcctcaacagtgtgcttgtggctgacgtgcagaccctcaaggtcagcatccacatcaacactcaccagctagaaatctccatggaccagtaccccacacacctcagtgtcaatggccagaggtgggggcttcgggaagccttgctgacacacaacatggcggcaggctgcagactggaggaggtggaggagtatgaggacaatacctatggccattatgaagctttctccaccctggcccccagggcttggctgtccatggatctagctgagccatgcatgcttgagccagggctgcctcctgtctttaccaatttcacccagctgctgactatcagcccagtggtggtgaccgagggtggcacagccgagtggtggcatgtgcagcccatgctggccctgatggaggctgaactgcataaatcccag

SEQ ID NO: 129657 - DNA, 460 bp, Homo sapiens
acagcccttgctggggacagttgctccaggccactcagccagcacagccttcgcccagaaggacctgctggttggggccgttctctttggccacaatggcagcctcagctcccgcaacaccctggccttctcaatggatgtggggccttctcaatggatgtggggccttctcaatggatgtggggccagtgcacacagacagtgcacacggtgcactctacaagtgaccattgccctagagggcccactagccccactgaagctggcctggcacaagaagatctacatcttcctgggagaggcagctgagatcagaagggaccagctggaggcagaacgggagttgttccatagcagggcagagcagggcagactctttgtgggccgtcctgggcaggcagcacacctgatgctcccaccaggagactgcgtgagcatctggacccagcacatgatcaca

SEQ ID NO: 129658 - DNA, 487 bp, Homo sapiens
accgttccagacctgatgtcagatttggctcatcagagtccacagaccatatcggtgaagaagatgaatagtattcctgctgcatccagggtacaatgcgcctttccagaacacagcagcgacccgggatagagggatcgctcaaacagcaccagaggctgcattccatcttttcctccatcaaagagtccgttttcattgttagtttctccttaaacacgattggcgtgatgttgcagtggagcgtgagctgcggcggcggctcctggttcttgtggaagatagaggccaacaacttcagcttggccttgaaccctcacacggacattttactctcacctctggcgggaggggcgcggaaggtgagcccgtcgggagccgctgtctcggccgcaaccacccgcgggacctctcggcggcgctctcccggctccgcctctccctgatgcctcaactctagtcggagacgaaatcgtcgacccgggga

SEQ ID NO: 129659 - DNA, 561 bp, Homo sapiens
atggatccaaaccaagaagaaatccctgatttacctgaaaaagaactcaggaggttaattattaaactattcagggaggggccagagaatggcaaagcccaatgcaaggaaatccaaaaaatgatgcaagaagtgaagggagaggctggaataatcggtgttactgaggaagaagacaattctaaaagcttggaaaacatctttggtggaataatcgaggaaaacttccctggccttgttagagacctagacatacaaatacaagaagcacaaagaatacctgggaaattcatcgcaaaaagatcttcacctaaacacattgtcatcaggttatccaaagttaagacaaaggaaaaaagtcttaagagctgtgaaacagaagcaccagtcacaaccctcagctgcaggtctgttggagttgactggaggtccactccagaccctgtttgcctgggtatcagcagcactggctgcagaacagcggatattggtgaaccgcaaatgctgctgcctgatcattcctctggaagttttgtctcagaggagtacctggccgtgtga

SEQ ID NO: 129660 - DNA, 420 bp, Homo sapiens
cctcttggcatgataggtcttaagtcccctcccagatctgtgacatttgacaggtgtcttttcctctggacctcggtgtccccatctgagtgagaaaaggcagtggggaggtggatcttccagtcgaagcggtatagaagcccgtgtgaaaagccatactccaaggggctccaagtccagcgcacagtcccagaagggcccagcaaggcagccagggcggcacaggcaccaggtcccaaccttcttccctgtttgcccactctcagaccccggagttcatcatctcggagccgctggccaatatgtactcatgtgggaaccagaacacactgatggaggagttggcagagcaggcacagcagcacgacgagatgctgcacatgcaccacgcgctgaaggaggcgctcagcatcatcagtg

SEQ ID NO: 129661 - DNA, 781 bp, Homo sapiens
tcctgttcacacactcaggctgaccacggctggatcccgctgcaggtgtccgatgggcagcaccaggccatcacggtgctggaggtgcaggccttggagccttacctctgtgtggccaatggctccggcctcatggttcctcaaggaggccagggtaccatcaacatggccgagctccacctgggcaccaacctcaacatctgcagtagggatgaggcccactaccacgtcacagacagccctcactggggacagttgctccaagccactcagccagccacagccttctctcagcaggacctgctggttggggctgttttctatggccacaatggcagcctcagctcccgcaacaccctggccttctcaatggatgtgggaccagtgcacacagatgccaccctacaagtgaccattgccctagagggcccagtagccccactgaagctggcccagcacaaggagatctacatcttccagggagaggcagctgagatcagaagggaccagctggaggtagcccaggaggcagtgccgccagcagacatcgttttctcagtgaagagcccaccgagtgccggctacctggtgatggtgctgcgtggcatcttggcagatgagccacccagcctggaccccgtgcagagcttctcccaagaggcagtggacacaggcaggatcctctacctgcactcccgccctgaggcccggagccatgccttctcgctggatgtggcctcggcctgggtgctccccttgaggacgtcacgtggagctggag

SEQ ID NO: 129662 - DNA, 581 bp, Homo sapiens
gcatgcacactctaacacatgcccacaaacaacacgcatacgtcgccctctccgccacctcccggtgcccaacacccctcaccagccggcacgtgccgcatggatctggggcgtgcagccactcggcacactgaagcacatgcgtgggcagagtcacaacacagatgctcacccgcacacagtaggcatttgcaccagctccctgcacactcgtgcctggcgtgctcagaggaccacccatcctgctcagggagacagggcttgctcactaatgtccggctgtcatttctccacctaagagccttccatggctccctactgcctacagcgttgaatcccaacaagtcatactctttggactttgaaggttctccaccctgtgcgctggacttggagccccttggagtatggcttttcacacgggcttctataccgcttcgactggaagatccacctccccactgccttttctcactcagatggggacaccgaggtccagaggaaaagacacctgtcaaatgtcacagatctgggaggggacttaagacttatcatgccaagaggaaaaaaaaaaaaaaaaa

SEQ ID NO: 129663 - DNA, 511 bp, Homo sapiens
agaggctgccttgtgctgctggagcgcatagccagggaggcccccaccccaacagaggcctctgatgccttgctggccagggctttggaaactctgacagcgctgcttccctcatttcctaatctcctttttctgaccctcttacactctctgaggggctgcagttgcaggaacccagaatctctgtcttggaggtggtggggcggtggggggcagttgaagaggggctttgaatggagagggtctgctgcatccagggtacaatgcgcctttccagaacacagcagcgacccgggatagagggatcgctcaaacagcaccagaggctgcattccaacttttcctccatcaacgagtccgttttcattgttagtttctcctctggcgggaggggcgcggaaggtgagcccgtcgggagccgctgtcacggccgcaaccacccgcgggacctctcggcggcgctctcccagctccgcctctccctgatgcctcaactctagtcggagtaggg

SEQ ID NO: 129664 - DNA, 1684 bp, Homo sapiens
tcatgatattgattcttccaatccgtgggcatggaatgctcttccatttgtgtcctcttttatttcgttgagcagtggtttgtagttctccttgaagagatccttcacatcccttgtaagttggattcctaggtattttattctctttgaagcaattgtgaatgggagttcactcatgatttggctctctgtttgtctgttattagtgtataagaatgcttgtgatttttgcacattgattttgtatcgtgagactttgctgaagttgcttatcagcttaaggagattttgggctgaaacagtggggttttctagatatacaatcatgtcgtctgcaaacagggacaatttgacttcctcttttcctaattgaatacactttatttctttctcctgcctgattgccctggccagaacttccaacacagctcctccttgtacctctgatagaattcggctgtgaatccgtctggtcctgtacttttttttggttggtaagctattgattattacctcaatttcagagcctgttattggtctattcagagattcaacttcttcctggtttagtcttgggagagtgtatgtgtcgaggaatttatccatttcttctagattttctagtttaattgcgtagaggtgtttatggtagtctctgatggtagtttgtgtttctgtgggatcggtggtgatatccaacttatcattttttattgcatctttttgactcttctctcttttcttctttattagtcctgctagtggtctatcaattttgttgatcttttcaaaaaaccagctcctggattcattgattttttgaagggttttttgtgtctctatttccttcagttctgctgtgatcttagttatttcttgccttctgctagcttttgaatgtgtttgctcttgcttctctagttcttttaattgtgatgtcagggtgtcaattttagatctttcctgctttctcttgtgggcatttagtgctataaatttccctctacacactgctttgaatgtgtcccagaaattctggtatgttgtgtctttgttctcgttggtttcaaagaacatctttatttctgccttgatttcgttatgtgcccagtagtcattcaggagcaggttgttcaatttccatgtagttgagcagttttgagtgaatttcttaatcctgagttctagtttgattgcactgtggtctaagagacagtttgttataatttctgttcttttacatttgctgaggagtgctttacttccaactatgtggtcgattttggaataagtgcagtgtggtgctgcgaagaatgtatattctgttgatttggggtggagagttctgtagatgtctattaggtctgcttggtgcagagctgagttcaattcctggatatccttgttaactttctgtctcgttgatctgtctttggtctttgatgatggtgacatacagatgggtttttggtgtggatgtcctttctgtttgttagttttccttctaacagtcaggaccctcagctgcaggtctgttggagtttgctggaggtccactccagaccctgtttgcctgggcatcagcagtcgtggctgcagaacagcagatattggtgagcagcaaatgttgctgcctgatcgttcctctggaagttttgtctcagaggagtacctggccgtgtga

SEQ ID NO: 129665 - DNA, 582 bp, Homo sapiens
tttttttctatccatgatatcaatccctctcagtcactaactgattgtgacaacaccttgtacagttgttggtggcattaaaccagatggtgtataagagtattttgtcaaaactgtaaaggaggatgtggctataggggctgattgttctcatgagtgttactactcttctttcccacagttaaaagaatattggcagaggaagagccctggcattccagaaggagctaacaggaaaaagaaaatcaatggcagtagccctgacacagccacttctggtggttaccactcacctggggatgtgagtcttggctggccagggtcctgggggcagggggcccaaggggcagtagagggtaattgttaagattgtagatggactgttgggtactggttaagaattctggatttgaatcctgcctctccatctgctaagaattgattagggattgattagcatatgatttagggcaagttgcttgaggtctttgggcctctcttttcacatctgtataatagaggtggtattttttgacttccatttgtgaagtttaaatgagattcgttattgatgcttttaag

SEQ ID NO: 129666 - DNA, 807 bp, Homo sapiens
actcgcagacgttactgccctcttgcgtgccccggccacccccgggcggcttgtagccggtgcgcggggtggctggggctacgtgcagagctgtcgcggagccggagcagcagcggtgaagcccctcggctcggccgagaccgccgtgcccactgctcgcctcggttgccgccgctttagccgcagccgctgctgccgccgccgggggagaggcagcctattgtctttctccgcggcgaaggtgaggagctgtctcggctcggcccgcgggggagccccgggagccgcacggtggcatttttcaactccgctggagccagtgcccaggaggaacaaagggtgtgctgccagcccctggctcacccagtggcctcgtcccagaagaagccagaggtagcggccccagccccagagagtgggggtgagtctgtgtttggggagacccaccgggccctgcagggggccatggagaagctgcagcgactttatggaaggagaaggtggacctgaaggagcgggtagagaaactagagcttcaattcatccacctctcaggacagacagacaccatagggagaaagtacatcagccagggggcagtgtcagagacgcagcactgggagaggaggacatcgtcaggctggcccaggaccaggaggagatgaaggtgaacctgcaggagctgcggggcaggtgttgcagcttgtgggagaccacaaggaggggcatggcaaattctgaccattgcccagaaccctgctgatgagcccactctaggagccccaatagcccaggagcttgggtgtg

SEQ ID NO: 129667 - DNA, 1411 bp, Homo sapiens
gaattcccgggtcgacgatttcgtcacgagttggtggttgtgctgcccggagcctctatgtccgcgagtgtgaagaacggaccagatgggtccagcagtgctgggtcaaggcgaggagggggcagccggaagcgcgcgcatgctctggactcctgcagccgccgaaacggtcaggttttccttgttcccgcatgttcagccaatcgtgtttaaggagaaactaacaatgaaaacggactcgttgatggaggagaagttggaatgcagcctctggtgctgtttgagcgatccctctaccccgggtcgctgctgtgttctggaaaggcgcattgtaccctggatgcagcaggaatcctattcatcttcttcaccgatatggtctgtggactctgatgagccaaatctgacatcagttctggaacgtctagaagatactaaggacaacagttcgctgctagcgaatataaagcaggcagaaaaacatgaaaagaaccacccggaggtgactgtggccatggctctgactgacatagacctgcagctgcagttctccatgtcccaacccgaagccctccttctcctggcagcaggcccagctgaccacctcctgctgcagctctactctggacacctgcaggtcaggcttgtcctgggccaggaggagctgaggctgcagaccccagcagaaattctactgagtgactccgtcccccacaccacagttctgactgtctcagaggactggcccacattgtcagtcaatgggtttctgaatgcctcctctgtagtcctgggagcccccctagaagtcccctatgggctctttgttgggaacactgggagacttggcctgccctacctgaggggaaccagccatcccctgaggggttgcctccatgcagccgctctcaatggccgcagactcctccagcctctgacccccaataagcatgagggctgtgctgaagagttttctgccaatgacgatgtggccctgggcttctctaggtcccactctctggctgccttgcctgcctggggcactcaggatgaaggaaccctggagtttacactcaccacacagagctggcaggcacccttggccttccaggcagcaggctggcatggggacttcatccatgtggacatatttgagggccacctgtggtccatggttgagaagggccagggtactgtattgctcctcaacagtgtgcctgtgactgacgcacagccccacaaggtcagcatccacatcaacattcaccagctagaaatctccatggaccagtaccccacatgtactttgaaccgaggagtcctcagctacctggagccacgtgacagtctccttcttggggagctggtgcagaggcctctcgtcacctccaggaacaccgctcaggcctga

SEQ ID NO: 129668 - DNA, 1493 bp, Homo sapiens
ttacaatttggcatgtttttgcagtggctggtaccagttgttcctttccaggtttagtgcttccttcaggagctcttgtaaggcaggcctggtgatgacaaaatctcttagcatttgtttgtctgtaaaggattttatttctccttcacttatgaagtttagtttggctggatatgaaattctgggttgaaaattcttttctttaagaatgttgaatattggcccccactctcttctggcttttagagtttctgccaagagatcagctgttagtctgatgggcttccctttgtgggtaacccgacctttctctctggctgcccttaacattttttccttcatttcaactttggtgaatctgacaattatgtgtcttggagttgctcttctcaaggagtatctttgtggcattctctgtatttcctgaatttgaatgttggcctgccttgctagattggggaagttctcctggataatatcctgcagagtgttttccaacttggttccattctccccgtcactttcaggtacaccaatcagacatagatttggtcttttcacatagtcccatatttcttggaggctttgtttcttttctttttattcttttttctctaaacttctcttctcgcttcatttcattcattttgtcttccatcgctgatatcctttcttctaattggttgcattggctactggggcttgtgcattcgtcacgtagttctcgtgctgtggttttcagctccatcaggtcctttaaggacttctctgcattggttattctagttatccattcgtctaattttttttcaaagtttttaacttctttggcattggttcgaacttcctcctttagctcagagaagtttgttattactgatcttctgaagcctacttctgtcaactcgtcaaagtcattctccatccagctttgttccattgttggtgaggaactgtgttcctttggaggagaagaggcactctgatttttagagtttccggtttttctgctctgttttttcccccatctttgtggttttatctacctttcgtctttgatgatggtgacctacagatggagttttggtatgagttgtcctttttgttgatgttgctgctgttcctttgtgcttgttggttttccttctaacagtcaggaccctcagcagcaggtctgttggagtttgctggaggtccactccagaccctgtttgcctgggtatcagcagcggtggctgaagaacagtggatattggtgaaccgcaaatgctgctgcctgattgttcctctggaagttttgtctcagaggagtacccggccgtgtgaggtgtcagtccatccgtatgttcattgttgtctaggcattgaagaattaaatatctattgtagtcttcacagtctgggtttgtttgaagccatccttcttgggaaggcttttgaagaacttgggtgttgtgatccaagtcttttcgccactgttgccgtatctgcat

SEQ ID NO: 129669 - DNA, 5800 bp, Homo sapiens
atggacagccacaggccaactgcctggccagccgcagtcttggccggccgctctcctgtggctgcagaaagtgagaggtactgcagccgccagcccccgctaccccgccgccaggctctcctgtctgtcctagtcctcgcatcagacaccaggcttcccttcccctggagcagccagaccttctgtggtatcttgagcaagcccctggtcctgtctgggcctctgcagactcaaggagaaactaacaatgaaaatggactcgttggtggaggagaagttggaatgcagcctctggtgctgtttgagcgatccctcttccctggtcgctgctgtgttctggaaaggcgcattgtaccctggatgcggcaggaatcctattcatcttcttcaccaatatggtttgtagactctgatgagctaaatctgacatcagttttggaatgtctggaagatgataagaacaacaatttgcttcatcagcaattgaagtggttgatatgtggactctgcagattatataaccttcctaagcacctggatgttgccatgccagatcaaccactacccatgggtcagtcaggaccctcagctgcaggtctgttggagtttactggaggtccacttcagaccctgtttgcctgggtgtcagcagcgttggctgcagaaaagcagatattggtgaactgcaaatgctgctgcctgattgttcctctggaagttttgtctcagaggagtacctggcagtatgagttaaaagaatattggcagaggaagagccctggcattccagcaggagctaacaggaaaaagaaaatcaatggcagtagccctgacacagccacttctggtggttaccactcacctggggattcagcaacaggtatctacggggaaggccatgcatcatctgctaccctggaggatctggagctgagacaacccacaccctccaccagccctaatgattgttctctctacccctccccacaatcttcctccaactcctcctctctgcatgcacctcacagccagtaccgagaactagcagtggccctgcactcaagctccgcaataatcagtcaactcagtgaaaacatcaattcactggagaggcttcaggagcaggatgagaggctgtggcagcaggagactctgtgggagctggagaggatgctggagctggagtgggaagccctctacaagcagcaggccgagccccacagcagctttgaggagctgaataatgagaacaagagtgcactgcagttggagcggcaagtaaaggagctgaagcttggagaacctggaagctaccagccagcagaaacagcagctaaagcccagttgagcctcatggctctccctggggaaggatatggaggaggacatctggacaatgaggaggaggcacctcggcccatgctgaacattccaggggacctggagagccgggaggccatggtggcatttttcaactccgctggagccagtgcccaggaggagcaaagcgtgtgctgccagcccctggctcacccagtggcctcatcccagaaaaagccagaggcagcggccccagccccagagactgggggtgaatctgtgtgtggggacacccactgggccctgcaggaggccatggagaagctgcaggaaagtacatcagccagggggcagtgccaaagacgcagcactgggagaggaggacatcgtcaggctggcccaggaccaggaggagatgaaggagaaactaacaatgaaaacggactcgttgatggaggaaaagttggaatgcagcctctggtgctgtttgagcgatccctctatcccgggtcgctgctgtgttctggaaaggcgcattgtaccctggatgcagcagcttccttctttggtgagaaccacctggaggtgactgtggccatggctctgactgacatagacctgcaactgcagttctccacgtcccaacccgaagccctccttctcctggcagcaggcccagctgaccacctcctgctgcagctctactctggacacctgcaggtcagggttgtcctgggccaggaggagctgaggctgcagatcccagcagaaatgctgctgagtgactccatcccctacactacagttctgactgtctcagagggctggcccacattgtcagtcaatgggtttctgaatgcctcctctgtagtcctgggagcccccctagaggtcccctatgggctctttgttgggaacactgggagccttggcctgccctacctgaggggaaccagccatcccctgaggggttgcctccatgcagccactctcaatggccacagcctcctccggcctctgacccccgatatgcatgagggctgtgctgaagagttttccaccagtgacgatgtggccctgggcttctctgggccccactctctggctgccttccctgcctggggcactcagaacaaaggaaccctggagttggcactcaccacacagatctggcaggcacccttgaccttccaggcagcgggctggcatggggacttcatccatgtggacatatttgagggccacctgtggttcatggtcgagaagggccagggtactgtattgctcctcaacagtgtgcttgtggctgacgtgcagaccctcaaggtcagcatccacatcaacactcaccagctagaaatctccatggaccagtaccccacacgctgcagactggaggaggtggaggagtatgaggacaatacctatggccattatgaagctttctccaccctggcccccagggcttggctgtccatggatctagctgagccatgcatgcttgagccagggctgcctcctgtctttaccaatttcacccagctgctgactatcagcccagtggtggtgaccgagggtggcacagccgagtggtggcatgtgcagcccatgctggccctgatggaggctgaactgcataaatcccaggacttgacgttccgggtcagcaatggactgcaggccagccccccgtccatgctgaaggtggtggccatccagccggccatacagatccactgcagcacagggctgcatctggcccaggactctgccatgcccatcttgcctaccaacctgtcggtggagaccagcaccgtggggcaggatgtgactgtgttgttctgtgtcaccagaggcctgcagttcagggaggtgcagaagcagggggctggtggggtggagggtgctgagtggtgggccacacagtcattccaccagcaggatgtggagcagggccacatgaggtacctgagcactaacccacagcactatgccgaggacaccgtgaagaacctggatctgcaggtgcaggtgagctgggaaatcctgagcaatctgtccttcctagtgaccatccagagagccactgtgtggatgctgcagctgcggccactgcacactcaacacccagcagaggccctcaccacagcccacctggaggccaccctggaagaggcaggcccaagccccccaaccttccactctgaggtggttcaggctcccaggaaaggcaaccttcaactacagggcacgacactgtcagatggtcagggcttcacccaggatgatgtacaggctggagaggtgacctatagggccatggcacatgcctcagtggcagtggaggacaccttctgtttccatgtcacagctccactatatttctccccactctgtactttctccatccatactggcggtgacccagacatgcctgtcctcaccaatgtcctcttggtgcccgagggtggtgggtgtgtcctctctgctgaccagctcttcgtcaagagcctcaacagtgccaggtggcagctgctgactccacacaacatggccttcagcaatgctgattcaggctttgtggatgcccagctggtgctgacccacaaggacctcctgtctggcagtatcatggccacggatgagcccatgcagcccatcttctgcttcatccaggaggggcctcaggaagaggcgagtcctgttcacgcactcaggctgaccatggctggatcctgctgcatgcagcaccaggccatcttggtgctggaggtgcaggccttggagccttacctctatgtggccaatggctccggcctcaaggtccctcaaggagaccagggtaccatcaatatggccgagctccacctgggcaccaacctcgacatccgcagtggggatgagcccttgctggggacagttgctccaggccactcagccagcacagccttcgcccagaaggacctgctggttggggccgttctctttggccacaatggcagcctcagctcccgcaacaccctggccttctcaatggatgtggggccttctcaatggatgtggggccttctcaatggatgtggggccagtgcacacagacagtgcacacggtgcactctacaagtgaccattgccctagagggcccactagccccactgaagctggcctggcacaagaagatctacatcttcctgggagaggcagctgagatcagaagggaccagctggagaccacggagttcatcatctcggagccgctggccaatctgtactcatgtggggaccagaacacactgatggaggagttggcaaagcaggcacagcagcgcgacaagatgctgtgcatgcaccacgcgctgaaggaggcaaatgacatcaacaggaccaccgtcagcatgcccatgcccccgcctgtggatgacacctggctgcaggtgcagagtgtccctgaggaacacaggtaccagggactggcccccatagccccaaagtcccccatccgggccacacagaggagtgcccagggcttagtggcacgctccctcatggggtggttcccacctggacctggcttcaatgcagtccggggcatgactgagataggcatacgttgtgaggaactggagggtaactgggtaaagagctgcagtgtgggcagaagtgtagtgtgggtcacattgaggatagccactggccaaagcagggaacagagacagaatgaggaagagctctgtggggagggtggggcaccgggtggagaaccttcaaagtccaaagagtatgactttttgggattcaatgctgtaggcagtagggagccatggaaggctcttaggtggagaaatgacagccggacattagtgagcaagccctgtctccctgagcagcatgggtggtcctctgagcacgccaggcacgagtgtgcagggagctggtgcacatgcctctgtgtgcgggtgagcatctgtgttgtgactctgcccacgcatgtacttcagtgtgccgagtggctgcacgccccagatccatgcagcacgtgccggccgaggaccctgggctttctgatggctcagaggggcctctggcattcactccagccagccgtcccttatagatccaccattttggttcaggcagtgttccttctctatcaggtctggtggctgttggatagggctctccaagcaagaggtggccctgggccagtgggttggaagacatggggaccacagaagagggaagcccgagggggctggcattggtctgaactctctagcactgggaatcagtccccgtgctgtgcttgcggagtcttgtggaccagcaagaggaagctgtctcctgacatcgcccctccaacgtgcaccacctccattgagcttccgggacatgcgtggcctgcggacagctagcccccgccatccctcccacccttctggccaagcatggcggtgctgtgcaggcagctgtgtggcctga

SEQ ID NO: 129670 - DNA, 523 bp, Homo sapiens
atgctctgccgcctgggcgcccaagctgcagttgctctctgtgtgcaggcagcagctgcctggcaacccccgagcccgctcgcactcccaccatcgcagaaccagggccaggtgtcccagtggctgcggccaagccaggcattctgccggatcatggcacaagttgcagtttccactctgcccatggaagatgaggagtccattgaagatgaggagtctgttgaagatgattccgtcggagagcaggatggtggtgacatttctcatatcagctctcgagtccacggaacaataccacgggggcgtgtacaccccctgcgatattgacagtaatatcatcctctcccccccagatattagtaacaatatcaccgaaggtgtctacaccccctgtgatattgacagacacctgattcccttcttcctgcccttggacatgagactccaggttcttatgcctttggactctgggacttgcaccagcggcttccccgaggctctcaggccctcggcctcagactga

SEQ ID NO: 129671 - DNA, 1261 bp, Homo sapiens
atgagtgagcataatattacagaggaatgtcaacaggaaaaccagagcatagagcagtggagatccatagctcacagtgatagcatagaagtttcctggttacatgaagtaattaagacatatttaaaagccaaaagtacaaaattagacctgatgaaaaagctgaaggagttatcatcccagccaagcaggaaacccaaaccttttattccttctcaagaaggaacaggagacaatgatgtgatctattctacagaaagactttccaaactgctcaatcaaaagaaaggttcaacacggttgtacgataagcctctttccaatctgctcaatcaaaagaaagtttccactcgaacagaaggtctcaccgtggactcgagagctgatatgagaaatgttaccaccatcctgctctccacggaatcatcttcaacagactcctcatcttcaatggactcctcatcttccatggactcctcatcttccattggcagggtggaaactgcaacttgtgccatgatccctgtgcaaaaaagtaagagatcggggccaccccaggggccgtctgcagccaccggggatggtgctgagggtcggttcctgccccggtgcagccgcccctgggcagaccgcctggcttggtcgcagccacggcgacatctagccccggggccctctgcagccacaggggatggggctgagggccggttcccgcccctgtgcagctgctgcgggacagaccgcctggcttggccacagccacagggacatttggccctgcttccgagatgtggggagtgtgggcgggctcgggagttgcctggagactgctgcctgcacgcagaaggcggctgcagctcggtactggaagtcctagccagagcaatcagacaaaagaaggaaatagaggaaatccaaatcggtaaacaggaagtcaaactgtcacttgttgctgatgatataatcttttgcctagaaaacgctacggactcctctagaaacctcctagaactgataaaagaattcagcaaagtttccagatacaagattaatggacacaaatcagtagctcttccatacatcaacagctaccaagcagagaatcacatcaagaactcaaccccttttacaatagctgcgacaaacaacaacaacaaaaaaacaaaacttaggaatatacctagcaaaggaatcaaaggacagctacaatgaaaattacaaaaccgctactgaaagaaatcatagatggagccaagcacgg

SEQ ID NO: 129672 - DNA, 590 bp, Homo sapiens
ttcttgggtcgacccacgcgtccgccaatccactgtccatacccttggattggttgaagagtttttggttttactgaacttcattggaagtccgaggattaggaacaccgagagcaataacttcaaccaatccaagggtatggacagtggatttgcaggtggagaagatgaaatttataatgtttatgatcaagcctggagaggtggtaaagatatggcccagagtatttataggcccagtaaaaatctggacaaggacatgtatggtgatgacctagaagccagaataaagaccaacagatttgttcccgacaaggagttttctggttcagaccgtagacagagaggccgagaaggaccagttcagtttgaggaagatccttttggtttggacaagtttttggaagaagccaaacagcatggtggctctaaaagaccctcagatagcagccgccccaaggaacacgagcatgaaggcaagaagaggaggaaggaataaggcacaggtctctccaaagttgaattgaactcttacccataaccctaattgattgcaagtcatatgggggaacactttgtaaatggtcagg

SEQ ID NO: 129673 - DNA, 1419 bp, Homo sapiens
atgcctcagaccacagatctaagacatacctacaagagcactccaaggagagtagcgccaactccctcccaccccggtgagcaccgccgggtcagcactgtggggcgagtgctcagagccccagaccagatgaaggaccagcatctgctggacgatggactcaagtgtgcagaatacagtgctaggccctacaaggagttcagtaaagggagtgatggagtggctgcagtatctacaaatggagagacgagtacgctgagtatctccatggagagcatgccgcgtgtggcagaggatgcaggagatgttggagcagctgaacccctacacctggagcccccagcaggacccttggaggtggagcagcagctacaagcggagatcaagcacctgcggaagacgctggagagtctggcaggacagctccaagcccaagtggaagccaatgagggctcgagtcacctgaaccggcagcaggacgagaggctgcgggagtggaaagcagagctctgggaggagcagggggagacgggcaggtcctccgtgcagaaagaccgcaccaccatcagccacgcgctctcccagaatcaccagctcgaggagcagctggccaaggagcgcctggaagctaccagccagcagaaccagcagctacagtcccagatgagcctcatggctctccctggggaaggcgatgaactgggcagtaaggaggaggaggaggcgcctcagcccatgccgagcatcttggaggacctgaagagccgggaggccatggtggcctttttaaactcagctttagtcagtgccgaggaggagcagcaggcacagctacatgggcagctgaaggagcaaagggtgtgttgccagcacctggctcacccagtggccttggcccagaaggagccagaggcggcagccccaaccccaaggaccgggggcgattccgcggtatggacagtggatttgcaggtggagaagacaaaatttataatgtttacgatcaagcctggagaggtggtaaataaagatatggcccagagtatttataggtctggtaaaaacctggacaaggatatgtatggtcatgacctagaagccagaagaaagaccaacaggcctctggaaaccaccttctactttctgtcttatgaactcgactactctaggtgcttcataggctgtttgaagtgcctctgtctcccttcaccttccgccacgattggaagcttcctgaagccttcccagaaacagaagccagtatgcttgctgtacagcctgcagaaccacgaaccaattaaacctcttttctttataaattacccagactcagacagctaccgtcatactcaagtaattcgcattctcctctctggcagtattcacgtgcaggttcctgccacaaagacgcccttgtag

SEQ ID NO: 129674 - DNA, 1668 bp, Homo sapiens
atggggggtcatgtgggagggagacacagaatgcttactcctaaactcattccagaaactctggcagctgggtcaatgaaaatcaacccggaagagcccaacagacctcccataaatggagctcctggtggccctgcccttcctctcgcagcgggagactcaggctctgagcaggctggggagccggcccttgccgccagcgagctgcagggctgggactcgaccctcggctcaccaggttccctgcgcggcactggcatcgtggccacccgctctggaagccggggcttcagactctctccagcaagcctgggccgcagaagccgggaccgcaaaacaaaggagctcgcgtttgcggggagcggcctggccaccagggggcagcgtgcgtcctccgatgccgccgctgggccgcctttgtcgcggtgcagcccggcccgcaccccgcagctgcccgtccggggatccctcacaggcccccgagcccccgcgcccccgcgcgcccgggtctgcctcctgagctgctcctgccgccagcccttccctcctttgactggcgggttgaatgtcggccgtccctctgggcctagctggaagatctgcccacgcagccttccttcggcttcggcagagacaggcatccgccgccgccgggccgcagcccacccgcccctccagcagcccccgctctgcggtgaaagtcttcccagcgtccagtgcagcgcaaatgcagattccagcatcccagtgccgtctagatggagccaagacgcctgcagaaatacgggggctgccgggcctcctggatacccggcatgtgttaataacagaaatagaacggataaaaatagtcaacttgatgaaacgcaccacatgaagacaaaggtgacggacagaggaggctttggagcgtttacgatgctgttacgggttgtggacacagggcatacttcatgctcaggctctgttgagtgggacccaaggctgtatggagaccaagccgacctttcccgctcaggacacctggaccgtcccggtgcccaccatgattactacacagccattaaaaaatgtgaagagggtaaatctcttgacaccacggtgaaggtgaaggctggagtcaatggatttggtcgtattgaacacctggtaaccaagcctgcttttaactctggtaaagtggatattgtcaccatcaatgaccccttcgttgacctcaacaacatggtctacatgttccagtatgattccacccatggcaaattctgtggcaccgtcaaggctgagaacaggaagcttgtcgccagtggaaatcccatcaccgtcttccagggcgagatccctccaaaatcaaatgggtacattgcggagtccacttgtatcttcaccaccatggagaaggctggggctgacttgcagggaggagccaaaagggtcatcatctctgccccctctgctgatgcccccatgttcgtgatggatgtgaaccacgagaagtatgacaacagcctcaagatcgtcagcaatgcctcctgcatcaccaactgcttagcgcccctggccaacgtcatccacaactttggtatcgtggaaggacccatgaccacagtccatgctatcactgccacccagaagattgtggatggcccctccgggaaactggcataa

SEQ ID NO: 129675 - DNA, 1312 bp, Homo sapiens
cggacgcgtgggctgttcgacagtcagccgcatcttctcttgcgtcgccagccgagccacatcgctcagaacacctatggggaaggtgaaggtcggagtcaacggatttggtcgtattgggcgcctggtcaccagggctgcttttaactctggtaaagtggatattgttgccatcaatgaccccttcattgacctcaactacatggtttacatgttccaatatgattccacccatggcaaattccatggcaccgtcaaggctgagaacgggaagcttgtgatcaatggaaatcccatcaccattcttccaggagcgtttatccctccaaaatcaagtggggcgatgctggcgctgagtacttcgtggagtccactggcgtcttcaccaccatggagaaggctggggctcatttggcaggggggagccaaaagggtcatcatctctgccccctctgctgacgcccccatgttcgtcatgggtgtgaaccatgagaagtatgacaacagcctcaagatcatcagcaatggcctcctgcaccaccaactgcttaacaacccttggccaaggtcatccatgacaactttggtatcgtggaaggactcatgaccacagtccatgccatcactgccacccagaagacttttggatggcccctccgggaaactttggcgtgatggccgcggggcttttccagaacatcaatccctgcctctactggcgctgccaaggctgtgggcaaggtcatcccctgagctgaacgggggaagctcactgggattggccttccgtgtccccactgccaacgtgtcaagtggtggacctgacctgccgtctagaaaaacctgccaaatatgatgacatcaagaaaggtggtgaagcaaggcgtcggagggccccctcaaggggccatcctgggctacactgagcacccaggtgggtctcctctgactgtaacagcggacccccagtctttccaccttttgacgctgggggctggcattgccctcaacgaccactttgtcaagctcatttcctggtatgacaacgaatttggctacagcaacagggtggtggacctcatggcccacatggcctccaaggagtaagacccctggaccaccgagccccagcaagagcacaagaggaagagagagaccctcactgctggggagtccctgccacactcagtcccccaccacactgaatctcccctcctcacagttgccatgtagaccccttgaagaggggaggggcctatgggagccgcaccttgtcatgtatccatctaataaagtatccctgtgctcaacc

SEQ ID NO: 129676 - DNA, 404 bp, Homo sapiens
aaactgggatatacgggccaaggttgctcacgtgattggtttactggcttcgcacacaactgagctccaggaaaatacacctgttgttgaggcaattgttctcttaactgaattaattagggaaaacttcaggaacagcaaattaaaacagtgccttttaccaacccttggggagctgatctatcttgtagccccccaggaagaaaaaaaaaagaaccctagagagtgctgggctgttcccttggctgcatacacagtgctaatgaggtgccttcgggaaggggaactctgaatcctctacagcctattattataaaatgtttcaaagattagaaaagaaaagaaagctgtaataatcacctttgtttccatcacctagattaaccagtaaacatttaaaaaaa

SEQ ID NO: 129677 - DNA, 560 bp, Homo sapiens
cttcctgggtggctacaagatagatcagctccccaagggttggtaaaaggcactgttttaatttgctgttcctgaagttttccctaattaattcagttaagagaacaattgcacaaggcactgtctaggcactggagtggagtgttgaacaagacagttcaaaatcccgattccaatggagcttgtagtctcaacaacaggtgtattttcctggagctcagttgtgtgcgaagccagtaaaccaatcacgtgagcaaccttggcccgtatatcccagtttggagctatccgcaaatgctggattagcaattggaacaggggggaatggaggagcctggtggccacctcctggtgaccagccaccacgcacaaatagcaaaggagattcagcttggctcgggaggcccccatgctcttctcagtggagtcgatctgcgagcacacttgttgcaaaaagtcattccaatcttgatctttcagaaataataacttatccactgaatatgttggtagatgcaatatttttgcatcaaatttaactggtggctgtttcattatct

SEQ ID NO: 129678 - DNA, 2511 bp, Homo sapiens
ccgatcgtgcaggaccaccaggagcacccaggcttgggcagcaactgctgtgtgccattattttgttgggcttggctgccaagaagaaggagataaacatcaccatcatcaaacagctgctcaagaaatttttaaataagaaaccaagttatgggctggagcggcaaatggaaaccacccagaaccttgtggactcctacatggccattgtcaacaagaccgtgtgggacctcatggttggtgtcatgcccaagaccatcatgcacgtcatgatcaacaacaccaaggagttcatcttctcggagctgctgtccaacctgtactcacgtggggaccagaaaacgctgatggaagagtcggcagagcaggcacagtggcgcgacgagatgctgcgcatgtaccacgtgctgaaggaggcactcggcatcatcggcgacatcaacacgaccaccatcagcacgcacatgggggcccgtggacaactcctggctgcaggtgcagagcgtccttgccagacgcaggtaccagggctggctcccacggccccaagtctccccacgccccataggctgagcctgggggctcttggaacaggctccgtgcccacgctgcttcatcatcctggttcaagcagtgtttcttctctatcaggcctggtggctgttgttttgggctccccaaggcgagaggtggccctggacaaagacttccctttccaagcctgcctgggcggctgttctgtgacttggcagtggctcccccagccccaaaggcagcccccttcatctgtgacttcgtctattgttgcgatcaggcttctgagcctgttggctgtcagggccagactgcgccccatagactacatggcagtccccttggaatcccccaggcgccaccaggcagcatacaggcctggctgcgcgctgctgtgttctggaaaggcgcattgtgccctcgctgtggcaggcatattcaagagttcctgctacatcgatgtacgctggtttccctttgatgtgcagcactgcaaactgaagtttgggtcctggtcttacggaggctggtccttggatctgcagatgcaggacggcagatatcaagtggctatatccccaatggagaatgggacctagtgggaatccccggcaagaggagtgaaaggttctatgagtgctgcaaagagccctaccctgatgtcaccttcacagtgaccatgcgccgcaggacactctactaatgggcctcaacctgctgatcccctgtgtgctcatctccgccctcggcctggctggtgttcctgcttcctgcagattccggggagaagatttccctggggataacagtcttactctctcttaccgtcttcatgctgctcgtggctgagatcatgcccgcaacatccgattcggtaccattgatagcccagtacttcgccagcaccatgatcatcgtgggcctctcggtggtggtgacagtgatcgtgctgcagtaccaccaccacgaccccgacgggggcaagatgcccaagtggaccagagtcatccttctgaactggtgcgcgtggttcctgcgaatgaagaggcccggggaggacaaggtgcgcccggcctgccagcacaagcagcggcgctgcagcctggccagtgtggagatgagcgccgtgggcccgccgcccgccagcaacgggaacctgctgtacatcggcttccgcggcctggacggcgtgcactgtgtcccgacccccgactctggggtagtgtgtggccgcatggcctgctcccccacgcacgatgagcacctcctgcacggcgggcaaccccccgagggggacccggacttggccaagatcctggaggaggtccgctacattgccaaccgcttccgctgccaggacgaaagcgaggcggtctgcagcgagtggaagttcgccgcctgtgtggtggaccgcctgtgcctcatggccttctcggtcttcaccatcatctgcaccatcggcatcctgatgtcggctcccaacttcgtggaggccgtgtccaaagactttgcgtaaccacactggttctgtacatgtggaaaactcacagatgggcaaggcctttggcttggcgagatttgggggtgctaatccaggacagcattacacgccacaactccagtgttcccttctggctgtcagtcgtgttgcttacggtttctttgttactttaggtagtagaatctcagcactttgtttcatattctcagatgggctgatagatactccttggcacatccgtaccatcggtcagcagggccactgagtagtcattttgccattagccctcagcctggaaagcccttcggagagctccccatggctcctcaccaccgagacagttggttttgcatgtctgcatgaaggtctacctgaaaattcaacatttgctttttgcttgtgtacaaacccagattgaagctaaaataaaccagactcactaaatcctttccaataattgactggtggaaggaaaa

SEQ ID NO: 129679 - DNA, 1242 bp, Homo sapiens
ccgtattccggttacgacacacgcgctcgccacgcgtcgactggctccttttccgcgcccctcccgttggaggtgaggggaagatgtccatgtcagggttcaaggccaaaccgaagttactggcctctatcttccaggagaaccaggagccacagccgcggctcacgccccaccgcaacattaagattacaagtggacacctgagtcagcaggacctggaatcccagatgagagagcttatctacacgactcagatcttgttgtcacccccattattgacaatccaaaggtgcagaaagcactctgacaaataatgaaacaaccaccatcggttaaatttgatgcaaaaatattgcatctaccagcattttcagttccaattgctaatccagcatttgtggatagctgcaaactgtgatatatgggccaaggttgctcgggtgattggtttactggcttcgcacaaaactgatctccaggaaaatacacctgttgttgaggccttccctaacagtcccagaactcctacattgcctggtgtgctgacctaaagccctcattaagaccagtaacaaatcaagcctatcttatcaactgacaacacattctggaaccatggcgtgtccatggataagacatgaagtccttctttcaagacttggttttctggtactggaaaataccaatatggataaaagaccttcaaagctgctacgatggctggagcggcaaatggaaaccacccagaaccttgtggactcctacatggccattgtcaacaagaccgtgtgggacctcatggttggtgtcatgcccaagaccatcatgcacgtcatgatcaacaacaccaaggagttcatcttctcggagctgctgtccaacctgtactcacgtggggaccagaaaacgctgatggaagagtcggcagagcaggcacagtggcgcgacgagatgctgcgcatgtaccacgtgctgaaggaggcactcggcatcatcggcaacatcaacacgaccaccatcagcacgcacatgggggcccgtggacaactcctgcctgcaggtgcagagcgtccttgccggatgcagcttcatcatcctggttcaagcagtgtttcttctctatcaggcctggtggctgttgttttgggctccccaaggcgagaggtggccctggacaagtgggttggaagacacggtgaccagagaagagggaagcccaaaggggctgagcatcagtcttaa

SEQ ID NO: 129680 - DNA, 540 bp, Homo sapiens
atagaaaattgtgtctttgcatttccagccctcaaaatccatgggcacacctgaatgacattaactcacagtaaattgtcactggtgggcctgtgaattgtgtgtaagctcaaaagcatcacttgacctgactttctttcctaccacgtcactgaattctgacatagaatctcactaaaatccccaccagcaagattaagaagacccccaggagcagaagccctcgccgcagcaccagctgtttcctggacaatttagcgccgtcctgtggatgttccggcaaaggttcttcttggcgcatctgctgatctgactgaggctcgcctgtctttccaacatcgttcgttaaaattccttcaaggttttcagggcaccctgggaggaaaaaggaacttagcagcttaaaagggattttttttttttcatttttataaagggctatgtataaaaggaatatgtgctaatagtggagagaaagttaattcaggacactattgctacagtgaataaataaaagaaatcttatcgcaaaaaaaaaaa

SEQ ID NO: 129681 - DNA, 1940 bp, Homo sapiens
ggcgcctgtggtggagtcctgagaggtacaggaaaacaaaacattggcgctatcttgaatgccattgggtactatgtctttggttttcccattggagtatctctgatgtttgccactaaactcaggataatagaacaccaccactcgtgcactgcaggcagagagcattccatcactgtgaacacatccggcgctcttgaaacactcccatctcccgagcacttcatattctgtgctaaaatccatgggtgccctgaaaaccttgaaggaattttaacgaacgatgttggaaagacaggcgagcctcagtcagatcagcagatgcgccaagaagaacctttgccggaacatccacaggacggcgctaaattgtccaggaaacagctggtgctgcggcgagggcttctgctcctgggggtcttcttaatcttgctgtcctttggaggcaagaacctcaagcgcgtggggatcatacttcagagaggggtcctcatccttatgctgtgctgctttccctgctgggccgacttggtcaacaccgagcgcatcctcctgctcttaaaacaagacccgaagtctccaggtgaggggcgaaatcaggcacccaccgtgacggcgagcgtgacagcgtccggctcgaccttgcccagatgtccacagaagatggagctgacgaggctgattagaaagatcatcaactgcgcaagaaactgcggaggcgcggaaagcaaggcgcgttcacagccgccctccctcctggaagcccgcgcccacccctgcgcggcggccgctccggaggcgtcgggctgggcgtccgggggcagcgcaccccgcaggccccacaagccgtcacgccatccgagggcccggagccgctatgggggccggtccttggcggcggcggggagcatcggcggggaaccggggcgtcggcggccgcaggggcctccatgcggaggctgggagcggctggcggcggcgcgggcgcgggaccgcagcgcggtgtgggggccagagtcgtggtcagtgaagaagctaactcacctggggctgccatcaccagtaaccgtgagacccaggacgcaaatgagggtctttcagcccctcgtcctgaatgcctcctgcaccctacctgcaggctactctatgtgcccttaattgtcagggactgggtctgccacaccaggtctgtggttctcttgcaggtggtgaacgttactgggattgcagttggcactggcttagcctcagcttatgacaccctcatgtctcagtcctttggagtcaagaacctcaagcgcgtggggatcatacttcagagaggggtcctcatccttatgctgtgctgctttccctgctgggccgacttggtcaacaccgagcgcatcctcctgctcttaaaacaagacccgaagtctccaggttggacgagggagtgcttccaggagtggggctcctacatccacctggttattcccagtatgttcatggtgtgcactgagcagtggacctttgagatcggaaacttccttgcaggactgattgatgtgatggagctcggcactcagggcatcatctgtgagctggcgtcagtagcctacatgaactatttccgattaaatccgcaaccccccatctctgactttaccatcaacctagcattccttacactcactgaacggaaaatcttaggctatatacaactacgcaaaggacctgacattgtaggtccctatggactgcttcaaccattcactgatgcagtaaaacttcaccaaagaacccttatggccctcaacatctactattaccctttatattattgctccaaccctggccctttctatcattgtcctcttagcattgcccactcggatgctggctgcaactccaaggcccaggggtacctgagaattaagaagcataaatcacagtcgtaa

SEQ ID NO: 129682 - DNA, 1176 bp, Homo sapiens
atgaacgagtgcagaggagtggaaattaccacagtttgttctgaagactggatacagcggcaccttcctggagcagtggtaccccttaaaggtgaagggaacgtgggtgttgcaacagaggaccattatcaagaagactcttttgggtttggtctgagaggcactgggaaacctcttaaacttgaaaaatcacgaccaggtgcagtgactcatacatctcccagtgatggcctgacccagtatgtgcctgacagcctgacagccatgccagctgcagcagttgtcatttgggtcatcagacctggctgtggggtacagcagcagattgggtttttgaggcacagcaacattgatgacattaggccacggacaattattagggctgtggctcctgtaaaacttcatggcattagaataaaaatggctagttttactagtgctacaagacttacggatgaacaggtaattactgctcctgctgatagtgggatagttatacctagattttctgataattgggtggctggtgggaagactcacctaacacataaggactcacataaacttaaagttaaggggtggaaaaaggcatttcatgcaaatggacaccaaaagcaagcaggagtagctattcttacatcggacaaaacaaactttaaagcaacagcagttaaaaaagataaagagggacattatataatggtaaaaggccttgaccaacaggaaaatatcacaatcctaaacatatatgcacctaacactggagctcccaaatttatgaaacaattactaatagatgtaagaaatgagatagacagcaacacaataatagcaggggacttcaatactccactgacagcactagacaggtcatcaattcagaaagtcaacaaagaaacaatggatttaaactataccttggaacaaatggacttaaaggatatatacagaacactccatccaacaactgcagaatacacaatctattcaacagtgcatggaacattctccaagatagactatatgacaggtcacaaaacgagcctcaataaatttaagaaaagtgaaattatatcaagcagtctgtcagaccacagtggaataaaactggaaatcgactccaaaaggaaccatcaaaaccatgcaaatacatggaaattaataacctgctcctga

SEQ ID NO: 129683 - DNA, 1448 bp, Homo sapiens
gggctcaggcccagggagatctgaattttgtccctgagcctctggctggagttattgaagatcctgagggaaagctccacccactgacgaaggatgtgtcagggattcctggggccctgatgacagctgtgtctactaggccctatcatcagtattccaatgctcaaattgaatactgtgaagaccaagttgtatacctccccaaagccctcaaacccttgactgatgacagatctgaaaaagaagagcctgagagaagtcaaatgtttgaggattttgaggaagccacatccataggaaaagggggagagtactacatcaaggaaacaccatgtgggacaaaagaatctgaacaacagccttcagcccaagaccttccctctgacagagcctacccaaatgagaaggaaccagaaaaccagctctgcctaaatgctccacttaaaaaatacagaattgcagaatggataagaattcaccaaccaactatctgctgccttcgagaaacttacctaacacataaggactcatataaacttaaggatcacaactccttgccagcaaggaaatgcaacttgatggagaatgagtttgacgaactgacagaagtaggcttcagaaggtgggtaataataaactcctccaagctaaaagagcatgttgtaacccaatgcaaggaagctaagaactgtgaaaaaaggcaaatcgatcaagtggaagaaaggatatcagtgattgaagatcaatttaatgaaataaagagagaagacaagattagagaaaaaagaataaaaaggaacgaacacagccgccaagaaatatgggactatgtgaaaagaccaaatctacatttgattggtgtacctgaaagtgacggggagaatggaaccaagttggaaaacactcttcagcgtattatccaggaaaacttccccaacctagcaagacaggccaacattccaattcaggaaatacagagaataccacaaagatactcctcgagaagagcaaccccaagagaaataatcatcagattcaccaaggttgaaatgaaggaaaaaatgttaagggcagccaaagagaaaggtcgggatatgcacaaagggaatcccatcagactaacagcagatctctctgcagaaaccctacaagccagaagacagtgggggttaatattcaacattcttaaagaaaagaattttcaacccagaatttcatatccagccaaactaagcttcataagcaaaggagaaacaaaatcctttacagacaagcaaatgctgagagactttgtcaccaccaggcctgccttacaagagctcctgagggaaaacactaaacatgaaaagaaacaactggtaccaaccatggcaaaaacataccaaattataaagaacatcgaaactatgaagaaactgcatcaactaatgggcaaaacaaccagctag

SEQ ID NO: 129684 - DNA, 324 bp, Homo sapiens
atggatccaaaacaagaagaaatccctgattcacctgaaaaagaattcagaagatacagaattgcagaatggataagaattcaccaaccaattatctgctgccttcaagagactcacctaacacataaggactcacataaacttaaagtgaggggtggaataaggcatttcatgcaaatggacaccaaaaatcagcagcaagggagaccaaatgaactggtgcctgacagtaatggtggaagtgaaagcatgttatgcttgcatatcgcgatatgctacttgcatattgatggatttgctgcagcactgacaagttcacagtga

SEQ ID NO: 129685 - DNA, 1527 bp, Homo sapiens
atgaagttggaggacttacatacttgttatcaaaatttgccatgtagctccagtaatcaagacatcttagtattgccacaagctcagcaggagagcatctgggcatttggacatggaaggtgtggggcacaagcatctcatggccagggaacgggggaggagcatctcagagctgcatcagagttcatgctggtcctaagacaagagtcaagcacaccctgctttcaccagctgctggtagctttcactcaggattttgtgccactgtatcaagactttgaaaatttttatacaagaaacctttacatgcgaatcagagacaactggaaccggcccatctgcagtgccccagggcctctgtttgatgtgatggagagggtatcggacgactataactggacgtttaggtttactggaagagtcatcaaagatgtcatcaacatgggctcctataacttccttggtcttgcagccaagtatgatgagtctatgaggacaataaaggatgttttaaaggtgtatggcacaagcgtggccagcaccaggcatgaaatgggtgaattcacctcatcctggcagaatgccctctgtgtgggaggggtcttgcaagctgactcagtgccacaggggccaccctggtcatggaaaatgggcaggcactcttccctgttggagcaaaatgggaagccacatttttatgataagctcattgttgaatcgtttgaggaagcaccccttcatgttatggttttcacttacatgggatatggaattggaaccctgtttggctatctcagagactttttaagaaactggggaatagaaaaatgcaacgcagctgtggaaagaaaagaacaaaaagagactcacttaacacataaggactcacataaacttaaagtaaacgggtggaaagaggcatttcatgcaaatagacaccaaaagatagcaggggtagctattcttatattagacaaaacaaactttaaagcaacagcagttaaaaaagacaaagaggaacattatataatgaaaaaaggccttgtccaacaggaaaatatcacaatcctaaacatatatgcacctaacactggagatcctaaatttataaaacgattactaacagacctaagaaatgagacagacagcaacacgataatagtgagggacttcagtactccactgacagcactagacagaataaccagtttagagaagaacataaatgacctgatggagctgaaaaacacagcacaaaaacttcgtgaagcatacacaagtatcaatacccaaattgatcaagcggaagaaaggatatcagagattgaagatcaacttaatgaaataaagcgtgaaaacaagattagggaaagaagaataaaaaggaacgaacaaagcctccaagaaatatgggactatgtgaaaagaccaaacctacatttgattgatgtacctgaaagtgacagggagaatggaaccaagttggaaaacactcttcaggatattatccaggagaaaaatgtttaa

SEQ ID NO: 129686 - DNA, 806 bp, Homo sapiens
atggcgctaagtgaaagaagccagccacaagatcacgtgtcgcatgaccgcatttatgtgaaacatccggagtacgcaaatctatacagacagaaagtagattatacattgcctagagtgagtatctctatccacgtggggcaggcaggtgtccagataggcaatgcccgctgggaactgtactgccttgaacttgcaattcagcctgacggtcaaatgccaagtgacaaaaccatcggtggtggggatgactccttcaacatgttcttcagtgagattggggctggcaagcacgtgcccagagcagtgtttgtggacctggagcccactgtggttgataggtgcctcgggcactggatggcagctttcctgggagagtgaagtgcacacagggacctacaggcagctcttccacccagagcagctgatcagtgggaaggaagatgcagccaataattactccagaggccattataccatcggcaaggagaccttgtcctggaccggatccacaaactgctcacttcgcagtgccgcaagccaaaggcaacaatgtggttatcacaagctacatgacaaacagaggcttcttcgaggataaaaaggcaacatttgcgccaagcttcttaatgaacatcaaaggcaataaaacatccgttgtcaaaaacagcatcctggagcaaggacagctgacagtcaactaaagcaaatgctgagagattttgtcaccaccaggcctgccttacaagagctcctgaaagaagcactaaacatggaaaggaacaaccagtaccagccgctgcaaa

SEQ ID NO: 129687 - DNA, 465 bp, Homo sapiens
  misc_feature (1)...(465): n = a,t,c or g
gtgcgaccggtccggattcccggtcgannnnnctgccccggcaagagaacgccaggagggataacgggaggaaggccggccggggccgccaaggcagtcccaggctcgcgtaggaggcgcgcagaccttgcaccttgcaccttcgcagcgccctgcaccccgccaccatgtgcgagctgtacagtaagcgggacactctggggctgaggaagaagcacatcggtgggacactgtcacccaggagtggtcaaagctgccctgaaacagatggaactgctaaatacaaattctcgattcctccacgacaacattgttgagtatgccaaacgcctttcagcaactctgccggagaaactctctgtttgttattttacaaattcaggatccgaagccaacgacttagccttacgcctggctcggcagttcagaggccaccaggatgtgatcactcttgaccatgcttac

SEQ ID NO: 129688 - DNA, 954 bp, Homo sapiens
ttcccgggtcgacgatttcgtccgacgccccgggcaagagaacgccaggagggataacgggaggaaggccggccggggccgccaaggcagtcccaggctcgcgtaggaggcgcgcagaccttgcaccttgcaccttcgcagcgccctgcaccccgccaccatgtgcgagctgtacagtaagcgggacactctggggctgaggaagaagcacatcgggccctcatgcaaagttttctttgcatcggatcccatcaaaatagtgagagcccagaggcagtacatgtttgatgagaacggtgaacagtacttggactgcatcaacaatgttgcccatgtgggacactgtcacccaggaagtggtcaaagctgccctgaaacagatggaactgctaaatacaaattctcgattcctccacgacaacattgttgagtatgccaaacgcctttcagcaactctgcccggagaaactctctgtttgttattttacaaattcaggggctattggccgtcatccaccaacccctctagccggccggcagcccccgctagtccgccggctgcagagcgagccggggactttcgagcgggcaggaagcccagcgttccgggttccaggagcgtttctgggagtccgcgcggcccctgcagccggctttctctctccaccttctgcactcgttattgccccctctctgcacttacttccgggccagggtgcccttacccgatgtgcttcttcctcagccccagagtgtcccgcttactgtacagctcgcacatggtggcggggtgcagggcgctgcgaaggtgcaagaacagtcactgagcaaaagacttaccctaaaattctcagtggcaaaggaaagataattctcagtggcaaaggaaaaatgtggaatgaacctcagatggaaattgccatgacatcttggagtttagaaagtaatatatag

SEQ ID NO: 129689 - DNA, 1218 bp, Homo sapiens
gtgggggattgtgggaaaagatggcggctgccgcagcaatcccgggttgtccggtacctgtcaatgtcacgttctgccattactgctaatagccacatctgtgtgtcacggcccaccctgtcgccagcttcatcatgccctcatgcctcatgggaaaggtggacgttcctcagtcagtgggattgtggccactgtgtttggagcaacaggattcctgggggcgatatgttgtcaaccaccttgggacggcatgggggtcacagggtaatcatacccctatcgggtgtgaataaaatattgacaatcaatgcacctttcgttcccatggggttgaccggggggccagctttctgtttttctggggaattgggggacggcgagagattaaagatttttattccgacgagttagttacaacacaggcaatgtgggttcatcaatcttatttgggacgagacttggggaaaccaaaaacttttgatttttggagggatgtttttgtgaagattccccaagcaattgcttcaactgtccaagggaagctgggagtttgaaaaattcatttcatgttttcacatctggaatggcggaattatttaaaaggctctttcttaggatatttgaggaaataaggctgttggagagaaagtagtgagagatgcatttccgggaagccattatcgtaaagccgtcggacatctttggaagagaagatagattccctaaattccttttgccagtatgcatcggtttgggtcctataccccttgggttccttgggctggaagacagttaaacaaccagtatatgtcgtagatgtatccaaaggaattgttaatgcagttaaggatcctgatgccaatgggaaatcctttgctttcgttggtcccagtcggtacctcccttttccacctggtgaagtacatctttgctgtggctcacagattgttcctcccattccccttgccgctttttgcctatcgatgggtagcaagagtctttgaaataagcccatttgagccctggataacaagggataaagtggagcggatgcacatcacagacatgaaattgcctcacctgcctggcttagaagaccttggtattcaggcaacaccactggaactcaaggccattgaggtgctgcggcgtcatcgcacttaccgctggctgtctgctgaaattgaggatgtgaagccggccaagaccgtcaacatt

SEQ ID NO: 129690 - DNA, 800 bp, Homo sapiens
gggattgtgggaaaagatggcggctgccgcacaatcccgggttgtccgggtccgtgtcaaatgtcacgttctgccattactgcaatagccacatctgtgtgtcacggcccaccctgtcgccagcttcatcatgccctcatgcctcatggggaaaggtggacgttcctcaagtcagtgggattgtggccactgggtttggagcacacaggattcctgaggcgatatgttgtcaaccacccttggacgcatggggtcacaggtaatcataccctatcggtgtgataaatatgacatcatgcaccttccgtcccatgggtgacctgggccagcttctgtttctggaatgggacgcgagagataaagattctatccgacgagtagtacaacacagcaatgtggtcatcaatcttaattgggacgagaccgtgaaatccaaaaactctgattatgaggatgtttttgtgaagattccccaagcaattgctcaactgtccaaaggaagctggaagttgaaaaattcattcatgttttcacatctgaatgcgaatattaaaagctcttctagatatttgagaaataagaatagaaaaagagagaaagaggaaatgaagaaggacttgttaagcaaaaaggaaccggaacctgaagatttggaaaattctcagcttatccatattgcaaaaaatgagaaagcttgttttgaagagaacactaagagtgtggctgaacaaccatttgatgaagagattgtggatgcgactcaccaactaacaagctatcttggcagaagccaggaatag

SEQ ID NO: 129691 - DNA, 1396 bp, Homo sapiens
tttttttttttttgagacggaatctcactctgttacgcaggttggaccatcttatagattatcaattgtacagataattgcactccggcctgggagacagagtgagtacctgtctcaaaaaataaaataaaataaaataaaattaaaaaaaacacttaaattagtgaataaccttggtgaaaagcaacgtccatgcttctacggcatttctcttcaaaggtcacaacccgcggaaggcgccgtgcgccggttgctatacaggccgcacttcacaccccgtgcctccccgcctttcctggctcctccgcccagatccccggcgctcccgcgttcggtgacggccgggtaggctgtaggcagcgcaatgccaagacagagctgctggcggcggcgggcgaatctccctgcaccatgagccgtcggctccggccccgttaggggccgataagcacagcgcacgccgccctccatttgccccggggcctcggctgcgaagatagcggcggccggacaggaagctcgaggaaagcgctgggccgggtcttctacgaacacgtgaaggaaaagcagctccgtccacaacgccgcttcggggctcctagggagtcgggccccgggcgctcaccgtcacctcggccgctgccgctgtcgccatcgccttgtttccccatcccccgccatggccgaggacctctctgcggccacgtcctacaccgaagatgatttctactgccccgtctgtcaggaggtgctcaaaacgcccgtgcggaccacggcctgtcagcacgttttctgtagaaaatgtttcctgactgcaatgagggaaagcggagcacattgtcccctatgtcgtggaaatgtgactagaagagagagagcatgtcctgaacgggccttagaccttgaaaatataatgagggaagttttctggtagctgcagatgctgtgcaaaaacagattaaattctatcgcatgagacatcattacaaaatcttgtaagaagtatcaggatgaatatggtgtttcttctatcattccaaactttcagatctctcaagattcagtagggaacaggattgagaacaacactggcataaaacagatccccggcgctcccgcgttcggtgacggccgggtaggctgtaggcagcgcaatgccaagacagagctgctggcggcggcgggcgaatctccctgcaccatgagcctcggctccggccccaaccttggtccgtcccctcggtccaagagctcttctgtaacttcccctcaaccctgcttcacagaacaccctcgagagcgttttgtttcgtttccagtccactatgtgttagagggatctagaatgagttttcttctctggtctcttaaaactgacaggattttcgggcattga

SEQ ID NO: 129692 - DNA, 1029 bp, Homo sapiens
atgaaggttgtgtgcaaagaagtgaaatttgagaaacagtgtcctgaagcagttctccttcactgggaacagacagatgatgatgagaacaaaagatgtgacctcagggaacctaggaagccagaaacccacaccaaggggcctggcctgttagttcctaccacccaaccaggaaggaatgagggtcagtcgggagcagacgggaagcatgcacgttgcagcaaaacttcctgctgtctttctggcaaggagcctagcttcatcatcactgagcactgccctttggtgcctgtgcagaacacgacaataaagcctgacagtgggattaggattctgcagaccctcgacagcagggaaactttcacaatgtccacagcccttgatgtcctgcaaatgaaagaggaggatgtccttaagttccttgcagcaggaacccacttaggtggcaccgaccttgacttccgaatggaacagcacatctgtaagaggaaaagtggtggcatctacatcataaatctaaagaggagctgggagaagcttctgctggtggctcctgccatcgttgccattgaaaaccctgctgatgtcagtgtcatatcctccagtagcactggccagagggccatgctgaagtgtgctgctgccactggagccactcctattgctggccacttcactcctggaaccttcactaaccagatccaggcaacattcccgaatccacgggttcttgtggttactgattgcaggaccggccaccagcctctcgcagaggcatcttatgttataacctacctaccattgctctgtgtcacacagattctcctctgcaccatgtggacattgccatcccatgcaacaggaagctcactcagtggacttgatgtggatgctggcccgggaaattctgcccatgcagcggcacaattgcccgcaaacactggtgggagcgatcctgaagagattgaaaaagaagagcaggctgctgctgacaaggctttgaccaaggaggaatttcagggtgaatga

SEQ ID NO: 129693 - DNA, 512 bp, Homo sapiens
aaccctgaacgcctggtagaccgccgagatagccatcccatgcaacaacaagggagctcactcagtgggttagatgtggcggatgctggctcgggaagatctgcgcatgcgtggcaccatttccggtgaacacccatgggaggtcatgcctgatctgtacttctacagagatactgaagagattgaaaaagaagagcaggctgctgctgacaaagcagtgaccaaagaggaatttcagggtgaatggactgctcccgctcctgagttcactgctactcagcctgaggctgcagactggtctgaaggtgtacaggtgccctctgtgcctattcagcaattccctactgaagactggagcgctcagcctgccacggaagactggtctgcagctcccactgctcaggccactgaatgggtaggagcaaccactgactggtcttaagctgttcttgcatacgctcttaagcagcatggaaaaatggttgatggaaaataaacatcagtttctaaaa

SEQ ID NO: 129694 - DNA, 569 bp, Homo sapiens
ccgggtcgacccacgcgtccgacctgcagaggggtccatacggcgttgttctggatttccgtcgtaacttaaagggaaactttcacaatgtccggagcccttgatgtcctgcaaatgaaggaggaggatgtccttaagttccttgcagcaggaacccacttaggtggcaccaatcttgacttccagatggaacagtacatctataaaaggaaaagtgatggcatctatatcataaatctcaagaggacctgggagaagcttctgctggcagctcgtgcaattgttgccattgaaaaccctgctgatgtcagtgttatatcctccaggaatactggccagagggctgtgctgaagtttgctgctgccactggagccactccaattgctggccgcttcactcctggaaccttcactaaccagatccaggcagccttccgggagccacggcttcttgtggttactgaccccagggctgaccaccagcctctcacggaggcatcttatgttaacctacctaccattgcgctgtgaacacagattctcctctgcgctatgtggacattgccatc

SEQ ID NO: 129695 - DNA, 1305 bp, Homo sapiens
atggattcctttgggcaacccagaccagaagataatcagtcagtagtcagaagaatgcaaaagaaatactggaaaactaaacaggtctttatcaaagcaacaggaaaaaaagaggatgagcacttggtggcgtctgatgctgaactggatgctaaacttgagactcccatagtgaccctctctggccacatggaggcagtttcctcagttctgtggtcagatgctgaagaaatctgcagtgcatcttgggaccatacaattagagtgtgggatgttgagtctggcagtcttaagtcaactttgacaggaaataaagtgtttaattgtatttcctattctccactttgtaaacgtttagcatctggaagcacagataggcatatcagactgtgggatccccgaactaaagatggttctttggtgtcgctgtccctaacgtcacatactggttgggtgacatcagtaaaatggtctcctacccatgaacagcagctgatttcaggatctttagataacattgttaagctgtgggatacaagaagttgtaaggctcctctctatgatctggctgctcatgaagacaaagttctgagtgtagactggacagacacaggggtcagcctgggcaacagagtgagactctgtcgtcgaaaagacgaaaccgaacgagacaaaagaggccccacagatttgcaacaatctgatgttagcacagccgaaaagccgtctgagttccacaaacatgtggagtttgatttccttattaagggccagtttctgcgaatgcccttggacaaacacatggaaatggagaacatctcatcacagcttcttgtaagtggagatcttgatgtccatggccagtttaacattcaccagctcctgttactcaagcagctgacaggccatgtcttgcttggctctctggaggatggcttccagcttggcactggcatccttaatggccagctccccctgctactcagcatctgggatggcagcctccaaggaagccctctggcctttgaggccctcattctcagcctgaagcaagctgatgttctggaccagggatgtgaccaagaactgggactacagctcacagatctcctcttcatacagctgaatgaggaagttgatcttgtcagtcagctcttccaggttgttgatgtagctctcaaacatgctgtccatgttgctccaagctactttttgctgctgcaaaaggatccacttggtctccagtatcttgttctgctgctccaggaagggtaccttctcagtgaagggggcaaacttgtttag

SEQ ID NO: 129696 - DNA, 960 bp, Homo sapiens
cccgggtcgacgatttcgtcgtctgtagaagggcaacctcgtgctttctgcagaggataccggagggcagaaggcagagtccaggcttagactgcagttcctcgcttacctgtgcagactaattttgagctgcctctttgtagtcttaaaaggcaggagcttcgtgttgtgggtctgctaacccgtacgtttccgtgggcaagtcgtgtgtactcctcgccatggctcagctccaaacacgcttctacactgataacaagaaatatgccgtagatgatgttcccttatcaatccctgctgcctctgaaattgccgaccttagtaacatcatcaataaactactaaaggacaaaaatgagttccacaaacatgtggagtttgatttccttattaagggccagtttctgcgaatgcccttggacagacacatggaaatggagaacatctcatcagaagaagttgtggaaatagaatacgtggagaagtatactgcaccccaagccagaagcaatgcatggttccatgatgactggatcagttcaattaaaaggggcagaggaatggatcttgactggttcttatgataagacttctcggatctggtccttggaaggaaagtcaataatgacaattgtgggacatacggatgttgtaaaagatgtggcctgggtgaaaaaagatagtttgtcctgcttattattgagtgcttctatggatcagactattctcttatgggagtggaatgtagagagaaacaaagtgaaagccctacactgctgtaaaggtcatgctggaagtgtaaattctatagctgttgatggctcaggaactaaatattttggtcttcgaattgagcctaaacctgcagtcagtttagtagaagagattaacagtttgtcatatagatggactgctgataattataaagttgggagtggagggaaggaggaggaggactga

SEQ ID NO: 129697 - DNA, 410 bp, Homo sapiens
atgtcttctgttgcccccattgttctttgacttttagcaagtctttcagctcattttccaggctggtcagacaccagcagacccactggaagcagaagagctacctttgccctatctgtgacctctcctttggggagaaagagggccttatggatcactggaggggctataaaggcaaggacctggccagagcagccaccataaatgccgggtgatcctgggccagtggcttggcttctctcatgatgtccccactatggctggggaggaatggaagcatggaggtgatcaatctccccccaggatccatacccccaggagaagaggcctaagagagaaggcctgcaaaggagacaaaacaaaggaggcagtgagcatcttgaaacataaataaatggcctttctgactg

SEQ ID NO: 129698 - DNA, 537 bp, Homo sapiens
ctacaaaacaatgatgatgatgatgatggtgatggtgatgatgatgatggtgatgatgatagtgatgatgatgatggtgatgatgatagtgatgatgatgctgataatgatggtgatggtgatggcgatgatggtgatggtgatgatgatgtaacgatgatggtgatgataatgatggcaatggtgatggtgatgatggtgatggtgatgataatagtgatggtgatgatgatggtgatggtgctgaatccaattcacatcttgtttttcctctccaagagcagcctttgcacacatacacacacgtgaacactcaatatgatttagccgatgagtgtatttcaagcaggtcacgttagacagctcttgccgactttgagaaaggcaggtgaagtccacatcctcatggaacatcttgtcttcaacttggaggttgccgttctgtcccacctctgtggtgctccgattcttaacctggatctgcctgaggacaatatccacgtcttctatatcctggttccccgcagattccagcat

SEQ ID NO: 129699 - DNA, 828 bp, Homo sapiens
tttcgtcgggagaccctgtgcccctaaatcgcggtccactgcgcgcgtcaggtttctagaagcagggtagaacagacggcagacacctagcccaggctggtgttgttactaaacaatggcagctggtgagccaagggtgaccagggccctgaactcggtggcccagctttgagggaagcaaaattgttctcaattgtggaagaggagaatttggacagcagaacgaaaaagggaagaacagcctcttggagcagatacatttgtcacaggaagccacatcaaaccctggggcctttgctgggcctctccatctgcccagttactgggaggtagatagccccaggaaggaatccagtcaggcctgggcaccaggccaggagtggataaagctagaaagagacaccacagaagagaagatgtttgaacagctgaagccaatcgaacctgtacagaagacgctcccatgggtgggcgaggtagctgccaccctgcaggaagccatgaagagagattgctggagggaggcacgggtgaagaagaagccagtcacctttgaggatgtggcagtgaatttcacccaggaagagtgggactgtctagatgccagccagagggtcctttaccaggatgttatgtcggaaacctttaagaatctaacatctgtggcctgggtccgaaaaaaagaagaagaagaagaagaagaagaagaagaagaagaagaagaagaagaagaagaagaggaagaggaagaagaagaggaagaggaagaggaagaggaagaggaagagggagaggaagaagaagaagaagaagaagaaggagagaaca

SEQ ID NO: 129700 - DNA, 2036 bp, Homo sapiens
atgctggaatctgcggggaaccaggatatagaagacgtggatattgtcctcaggcagatccaggttaagaatcggagcaccacagaggtgggacagaacggcaacctccaagttgaagtgtcatacactcaggctcacattgcccctaggccacttgccagccaagggacatggccacattttgtgtcttctgcacctcagccttgctttcaagtgcagaatcactctaagtaccaaaatctgtattattctggattcatcagagaaacagaaccaataagtaagggagatgtgggtgagtggctgtcagcaggaaaaggtgagagttcagctatgtttgcatctgagcaggaaatttccaaggatgagcagggaactccagtgctgggctcattttactgggaggtagatagccccaggaaggaatccagtcaggcctgggcaccaggccaggagtggataaagctagaaagagacaccacagaagagaagatgtttgaacagctgaagccaatcgaacctgtacagaagacgctcccatgggtgggcgaggtagctgccaccctgcaggaagccatgaagagagattgctggagggaggcacgggtgaagaagaagccagtcacctttgaggatgtggcagtgaatttcacccaggaagagtgggactgtctagatgccagccagagggtcctttaccaggatgttatgtcggaaacctttaagaatctaacatctgtggaaggcaagaagaaagagcttcgagaacaacatcccagtctgagagatgaggggactagtgatgacaaggtcttccttgcatgcagaggggccggccagtgccccctatctgccccagctgggactatggacaggacccgggtgcttcaagcatcccaggctgggccacccttttttttgctaccactgtgggcaaatgtttcagcaggcgctcctacctctatagccaccagtttgttcacaatcccaagctgactaacagctgcagtcagtgtgggaagttgtttcggagccccaagtccctcagctatcacagacgcatgcatcttggggagaggcccttctgttgcacgctctgtgacaagacctactgtgatgcttctggactaagtcgtcaccgccgcgtccatctgggttaccggccccattcatgctctgtgtgtgggaagagcttccgggaccagtctgagctcaaacgccaccagaagatacaccaaaaccaggagccagtggatggaaaccaggagtgtactttgaggattccaggcacccaggctgaattccagacacccatcgccagaagccagaggtccatccaggggcttttggatgtgaaccatgcaccagtggccaggtcccaggaacccatatttagaactgagggtcctatggcccagaaccaggcatctgtacttaagaaccaagcacctgtgaccaggacccaggcacccatcactggaaccctctgtcaggatgccagatccaactctcatccagtgaagccctcaagactcaatgtcttctgttgcccccattgttctttgacttttagcaagaaatcctatctctccagacaccagaaggcccacctcacagagccgcccaactactgcttccattgcagcaagtctttcagctcattttccaggctggtcagacaccagcagacccactggaagcagaagagctacctttgccctatctgtgacctctcctttggggagaaagagggccttatggatcactggaggggctataaaggcaaggacctgtgccagagcagccaccataaatgccgggtgatcctgggccagtggcttggcttctctcatgatgtccccactatggctggggaggaatggaagcatggaggtgatcaatctccccccaggatccatacccccaggagaagaggcctaagagagaaggcctgcaaaggagacaaaacaaaggaggcagtgagcatcttgaaacataaataaatggcctttctgactgaaaaaaaaaaaaaaaaa

SEQ ID NO: 129701 - DNA, 1048 bp, Homo sapiens
atgcccagccttgcagagctttttgaggggtcatctaaagcctttggtgcggctgcatcacagctcaacttccccgtcgccagtggggagatgttgaagttcaaatatggatcttcggaatcctttgcatgctgtcgctgctgaacccattgccagccggacctccaggctgaatctgttcttccaggggaaaccaccctttatgactcaacagcagatgtctcctctttcccgagaagggatattagatgccctctttgttctctttgaagaatgcagtcagcctgctctgatgaagattaagcacgtgagcaactttgtccggaagtattccgacaccatagctgagttacaggagctccagccttcggcaaaggacttcgaagtcagaagtcttgtaggttgtggtcactttgctgaagtgcaggtggtaagagagaaagcaaccggggacatctatgctatgaaagtgatgaagaagaaggctttattggcccaggagcaggtttcattttttgaggaagagcggaacatattatctcgaagcacaagcccgtggatcccccaattacagtatgcctttcaggacaaaaatcacctttatctggtcatggaatatcagcctggaggggacttgctgtcacttttgaatagatatgaggaccagttagatgaaaacctgatacagttttacctagctgagctgattttggctgttcacagcgttcatctgatgggatacgtgcatcgagacatcaagcctgagaacattctcgttgaccgcacaggacacatcaagctggtggattttggatctgccgcgaaaatgaattcaaacaagatggtgaatgccaaactcccgattgggaccccagattacatggctcctgaagtgctgactgtgatgaacggggatggaaaaggcacctacggcctggactgtgactggtggtcagtgggcgtgattgcctatgagatgatttatgggagatcccccttcgcagagggaacctctgccagaaccttcaataacattatgaatttccag

SEQ ID NO: 129702 - DNA, 508 bp, Homo sapiens
atgggtatctggggaacagcccaaaagtggagccctagaggaaagccaagggcccaggtgcctggaagaggggttggaggagaatggaagatgtggttagaagaggcagcaagcttttggactcttggacttacaccagtggtttgccaggggctctcagggctttcggctacagactgaaggctgcattattggcttccctacttttgaggttttgggacttggagtggcttcctggctcctcagcttgcagacagccaattatgggacttcaccttgtgatcatctgactcctgagttctcacaacgcttgaccaataagattcgggagcttcttcagcaaatggagagaggcctgaaatcagcagaccctcgggatggcaccggttacactggctgggcagcaccttcaaacattaaagggacatcagcccacacagatgagaaagaaccagtgcaagaactctggcaactcaaaaagccagagtgtcttcatacctccaaatga

SEQ ID NO: 129703 - DNA, 808 bp, Homo sapiens
atggttaatattgagtgtcaacttgatcgaaggatacaaagtattgttcctgtgtgtatctgtgagggtgttgccaaaggagataaacatttgagtcagtggactgggagaggcagacctaccctcaatctggtgtcctctaatcagctgccagcatggctagaatacagcaggaagaagttgaagggatttgaattgctgagtcttctggctttcatctctctcccatgctggatgcttcctgctctcgaacatcagactccaagttcttcagcttttggactcttggacttacaccagtggtttgccaggggctctcaggccttcagccacagactgaaggctgtactattggcttccctacttttgaggttttgggactcagactggcttccttgctcctcagcttgcagacggcctattgtggggacttcaccttgtgatcgtgtgcatcaatactccttaataaactccccttcatatatacatatatcctattagttgtgtccctttagtgaactctaatataaggatgatgatatggaaacataaatacacaaatataggccagaagtagagcaaatttctaatagtaaataacaatgaaaagtcagagacagataattaaaaaagcagtaactacaaaggaaatgaaatcagtgtgtcgaagagatatccagcttttatgttcattgcagcactgttcaaaatagctaagataaggattcaacgtctatgtctatcaacagatgaatggataaagaaaatgtggtacatacacacaatggaatactactcaaccttaaaa

SEQ ID NO: 129704 - DNA, 4594 bp, Homo sapiens
agcccccaatgagaccatcgactgagcgcgtaggcaaggcccgggccgagaagggcttcaggacgcgggaggcgcacttgcttcaagtcgcgggcgtgggaacggggttgcaaaacggggcctctttgtccgggcttgcttccggcgtcatggctcaaagggccttcccgaatccttatgctgattataacaaatccctggccgaagagctactttgatgctgccgggaggctgactcctgagttctcacaacgcttgaccaataaaattcgggagcttcttcatcaaatggagagaggcctgaaatcatcacaccctcgggatggcaccggatacactggctgggcagggattgctgcgctttacttacatctttatgaaggactgggcgaccctgcctacctacaggtagcacatggctatgtgaagcaaagtctgaactgcttaaccaagcgctccatcaccttcctttgtggggatgcaggccccctggcagtggccgctgtgctatatcacaagatgaacaatgagaagcaggcagaagattgcatcacacggctaattcacctaaataaggtttgatcctcatggttccaaatgaaatgctctatggggcgaatagggttacatctatgctcttctttttgtcaataagaactttggagtggaaaagattcctcaaagccatattcagcagatttgtgaaacaattttaacctctggagaaaacctagctaggaagagaaacttcacggcaaagtctccactgatgtatgaatggtaccaggaatattatgtaggggctgctcatggcctggctggaatttattactacctgatgcagcccagccttcaagtgagccaagggaagttacatagtttggtcaagcccagtgtagactacgtctgccagctgaaattcccttctggcaattaccctccatgtataggtgataatcgagatctgcttgtccattggtgccatggcgcccctggggtaatctacatgctcatccaggcctataaggtattcagagaggaaaagtatctctgtgatgcctatcagtgtgctgatgtgatctggcaatatgggttgctgaagaagggatatgggctgtgccacggttctgcagggaatgcctatgccttcctgacactctacaacctcacacaggacatgaagtacctgtatagggcctgtaagtttgctgaatggtgcttagagtatggagaacatggatgcagaacaccagacacccctttctctctctttgaaggaatggctggaacaatatatttcctggctgacctgctagtccccacaaaagccaggttccctgcatttgaactctgaaaggatagcatgccacctgcaactcactgcatgaccctttctgtatattcaaacccaagctaagtgcttccgttgctttccaaggaaacaaagagtcaaactgtggacttgattttgttagcttttttcagaatttatctttcattcagttcccttccattatcatttacttttacttagaagtatccaaggaagtcttttaactttaatttccatttcttcctaaagggagagtgagtgatatgtacagtgttttgagattgtatacatatattccagaacttggaggaaatcttatttaagtttatgaatataaccatctgttactgttctaaaaatgtttaaaagaaactcaatacagataaagataaatatgtgactattattgggtattacacttcacttctctttaatatttttcctccaactggagggcagacaattttctgacttgcttttctctaggtggttcattttgaaaggggacagaaatataactaaatgcttccaggagaaaaattccaagagttacaatctggacttggtacctaaatatcattttttaaattcttgatgcctatttggactagaggtaaacatactttcagattggcctgtttttgtcggtaaggcatacagccttcagaagccaacatttttaatcaaaaacttataaaacatgatgatcattgtgaaaattctgagttgaaggttagtttaagataagctaacaataacagtctgtgttttctctaaaataatctgagttttttggaactctttatttaaatatgtgtgtttttcagtattcaaataagatcaggaagccaattttctatgtatgaatatgctttaacctaggatttcagtccactctgactgactttctaaactttaacttgggtttttacagtgactatgcattagtgctgactctttggtataagccataaaatattttccttcctatcaatttatctgaactttggtcttttcactaaattgtacagtattctacttctgtttaaaaaggggagatgagaaagggaatactatctaaccaataacttgaacaaaaacactaaactaagcatttaatagaaatgctttttattgaggaggtattatccagagttcatgcttagaacaaatgcatctttgcgtatcctagacttaacaattcatcagtttctgagaccacagaatcaggttttccgtagtagataaagactctctggtgcttcaaattctgttcaagtgttttgactcatcagcttctactctttctattactgcctttgcctggcttgttttgtctctttgcaactgattttgcaaaaaaaaattgtagctttaaaataacagggtctaagtattttaaatgtgcctatttcacagctctcttggtcacaaaaacatgctatttttattggaacttcaaaccaaatccccactgagtgtgtactggttcctgcaggtagcagtctcctattatctcctgtttagcaccaaaagagctaatattattggaaactgaccttttaaaggccactggcagtaggatttaaaaagcagcccactgctcagtttccaggatcagcttcctccttctgtcacttgtgtaagttggcactaccttgtgcctctcagattgctgaagtgctgctggtaagcatgtgcatgctctgcctttcttgtgaaagttttcaatcagcgatatcagcacttacagtaagaagtaaaagtagtgcacagcaaagctaatttgcctttgcctggggtgttcagcttgaaagaataaagctcatttggtttagttaaatgtcttactctactgtgcctatgcttttagctgcgttactaagcaagggaaaaataacagtttctctgagccagagaagacttgatcacagttctccaagcatcgtgatagcaatgcttaaccccaggaagatttcaaggcagggagaagaacatttcaaataagattcttgttaacccatttatgcctagtgttccattattggaatgctaagcttgtgggagtcatttacatcctactgctcaaagtcattgccaaggtctgatttttcacacaaaaaattgcaacccccagcataaatgggttagctactgtcatcagttagcaaattcatccacacaaacacaattagagtttggtttttttttaagcttttcaaaacttactaaactggcacaattttatatgtatgctatttgttgtatttatgcttaagagcaaaaaagttttgatgggattttaaattcagcaaagcctacaacgctgagacaatcccctaacaacatggtagtaactaaagaaacttttatactaggcttcttagttttaaaaggaagtggcatcattgtttcagttctagtttgtatttttctctcagatatttttcttctttaaaaatctttcccagaagttggttcctagaaaactcaataccatcatctcttatctctatacagggactaggtaataaaaccttcaaaggttgtcaaaggtcatcaagcagtgttcatttatcctgtcacatgtttctgtttctatagtaatttagaaattgcaaatagttaacttttcatcatgtaaaaagttaacattatcctatttccatagataccatggacggcggtgtggcctgagttgtcagtctttaatcctgagtcatgtggctctcttttcatctttgatgtcagttccaattatttggcatcaaaaaccttcatggtaggtagagttttaggtaaaagtggatctagggttactttctttattaacatttcctaaataactgaattgagagacatactctgctactatgtcctcaggttaatttttgtctgatcttacgatgccctgccttttactagctactttagaaatagaaaatgtgaagagtgactatttacatgtatactcctttggctgctagaactcatctgtagtcctttattatttacactgaattccaatttcatttctcttccgctaagtaagagcacctcattcctgtgttttctctactattgagctgtagacgaactgtttctctaattataaagcaaactgtttgggatattcagggaaactaccccaatgttatgttgtcatttaatgggaaaggctgggatcatatgtatttctatgttctgtaaagtatttgacttactagttctcaataaaattttattaggactataaaaaaa

SEQ ID NO: 129705 - DNA, 371 bp, Homo sapiens
attcagctgctgaatctgtctcctccagactagtgcgagtcccctgccagcaaggtccaccttcacccctccagcccagtcactctccagacagaaggagaaggtagtttcatctcggagcttcctgcaacagcgtggttggagagctgtaagttgctcattactcttctacacctgttcccctcaactggcaactgaaaacccccccactgaccttggaagaggtgggcgccatgttacatctggcctttttgtgcctttgacaatttgagtgctcactttgttgccaggtatagggccagttgctgattcatttaaaaactacatctagtccattatagtagaagaaaagataccagattctttggata

SEQ ID NO: 129706 - DNA, 1821 bp, Homo sapiens
gcacgagggaaagagtggcgggagaagttgcagggaattatttgatagcacatactgatggctctaaagaagtcatcaccctcactggattctggtgatagtgactctgaggagttgccaacatttgcctttctgaagaaggaaccatcttcaacaaagaggagacagcctgaaagggaagagaagattgtagtggttgacatctcagattgtgaagcctcctgtcctccagcaccagagttattttcaccacctgtcccagacatagctgaaactgtcacacaaacacagccagtcaggttgctaagcagtgaaagtgaagatgaaggaagaatttattcctctgggcttcaaaggctttacatgttaagttttcttgacccacaaggcaactgagccctgaggactctagctccccagtttaaaagtgttttggatcatcaaaataatgaaggtgcatcatgtgactggaaaaagcagccctttccaaagatccctgaagttcccctccatgataccccagagaggagtgcagcagataacaaggacctgatcttagatccatgctgtcagcttccagcctacctgtctacctgccctggccagagcagcagcttggcagtaaccaaaacaaattctgacatccttccaccccagaagaaaaccaagccgagtcagaaggtccagggaagaggctcacacggatgccggcagcagagacaagcaaggcagaaggaaagcaccctgagaagacaggaaagaaagaatgcagcactggttaccaggatgaaagcccagaggccagaggaatgcttaaaacacatcattgtagtgctggatccagtgctcttacagatggaaggtgggggccagctcctaggagcactgcagaccatggagtgccgctgtgtgattgaggcgcaggctgtgccttgcagtgtcacttggaggagaagggctgggccgtctgaggacagagaggactgggtggaggagccaacagtactggtgttgctccgggcagaggcatttgtgtccatgatcgacaatggaaagcagggaagcctggacagcactatgaaagggaaggaaacgcttcagggctttgtaactgacatcacagcaaagacagcagggaaagctctgtcactggtgattgtggatcaggagaaatgcttcagcctggagctgctgttctttgatttcctcccctgcaccagtgctcagaatcctccaagaagagggaaacagggagcaaataaacagaccaagaagcagcagcagagacaaccagaggccagcatagggtccatggtatccagggtagacgctgaagaggcattggtggatctgcagctacacacagaagcccaggctcaaattgtgcagagctggaaagagctggccgacttcacatgcgcattcacaaaggctgtggctgaggcgcccttcaagaagctccgagatgaaactaccttctccttctgtctggagagtgactgggctggaggggtgaaggtggaccttgctggcaggggactcgcactagtctggaggagacagattcagcagctgaaccgagtcagcctggaaatggccagtgcagttgtgaatgcctatccctccccacagctcctggtacaggcttatcagcagtgtttttcggataaagaacgccagaatttgctcgcagacatacaggtgcgccgtggggaaggtgtgacatccacttctcgccgcattggaccagaactatccaggcgtatctaccttcagatgaccactttacagccacatctctctttagatagtgctgactga

SEQ ID NO: 129707 - DNA, 2415 bp, Homo sapiens
atggctaaatcaaaaggatgttcagcagcaaccctggcctctacccaccagatactagtaacaccctggagttgtgacaaccagaaatgtctccagacattgccaaatgtccctggaggcacaaagttactcctctgtgaggaccactggtttagaaatgattcttgcaatcaagccattccaaccatcgctaccctcctctcattcccatcactacaagcttctctgtggaccactcacttcttatctccactgaatcatcatccagtcaatcctgacagtcacctggaacagccacctggccagagtccacgcctcaacttcgaggctggcgatccagaaagagcacctcacgccctgggctgcaagcgcagccggacgcgcgcgaccagtgatcgccagccaatggcaagccgggacccggggtggggtaaagccagcgttgggaaagcctgtgcattaggcagcgctgttctgcctgcagggaacgattgcacaactgataacttgggcctaggctcagctggatttgaggatttgagacttagactgggtcagggtcccccgcgtcgccagggggcgctgcaggccgctccccggaaggcctcatcctgcgcggctggacagcgcctggcgccggactcctctttctcccggaagcggagaccgagccggcaaaggcttgggtgtgagacagcagcggtggcagacaccgcagaagcaaagagcagtgaggctcctgcattcgggtggagcaccatggacgaagctggcagctctgcgagcggcgggggcttccgccgggccctggacgaaccgcccaacagccgcatcttccttgtgatcagcaagtacacacctgagtcggtgctgagggagcgcttctcgccttttggcgacatccaggacatctgggtggtgcgggacaagcacaccaaggagtccaagggcattgctttcgtcaagttcgcccgcagctcacaggcctgcagggccatggaggagatgcatggccagtgcctcggccccaacgacaccaagcccatcaaggtgcgggtgcccgggtcggggtgccctcgggggaaggagtgggcctcttggacctcccttcacctgctgctctgccggggtgagggaggagtggaacatccgttcccggcagctgaccagacagcacctggcttggggacaggggctgctttgaggagaggctcccctcccacgaagctgcgccgggttgcagggaaggggacgggatgcggagtgtttgccccacgagagcggacccggcagccgcggccaccgggtgacagaacagcagtggctgggcttcccctctccctcgccctcactaatccaccagctcttgagttcactgccaaactcgtcctagcctactttgagtacttttctgaccttcctctctcagatgcccagatttccatatataaaaaacggaaaaactctacttttcctcaggttttcattgctcagtcccgatcatctggaagtcaccgagatgttgaagatgaagaacttacaagaatctttgttatgataccaaagtcctacacagaagaagatctgcgggaaaaatttaaggtgtatggagatatcgagtattgcagcattattaagaataaagtgactggagaaagtaaaggtttgggctacgtacgatacttaaaaccatcacaagctgcccaagcaatagaaaactgtgatcgaagttttagagcaatcttggctgaacctaaaaataaagcatctgaatcctctgaacaagattattatagtaatatgaggcaagaagctttgggacatgaacctagagtaaatatgtttccatttggtcatggagtggttcagtattttaatgtagcatcagctatttatgcaaaatacaaattacatggatttcagtaccctcctgggaaccgaataggtgtttccttcattgatgatggaagtaatgcaacagaaaaaatggcaacacagatggtagctgcacagcttgcatcaatggtgtggaataacccaagtcagcaacaatttatgcaatttggaggaagctctggatcacagttgcctcaaatccagacagatgttgtacttccatcatgcaaaaaaaaagctcctgctgaaactcctgtgaaagaaagactttttattgtgtttaatcctcatcctttacctttagacgtattagaagatatattctgtcgttttggtaacctgatcgaagtttaccttgtgtcaggaaaaaatgtggggtatgccaagtatgccgatagaataagtgctaatgatgccattgccactctacatggaaagattctgaatggggtgagacttaaagttatgctggcagattcgccaagagaagaatctaacaaacggcaaagaacttactga

SEQ ID NO: 129708 - DNA, 2401 bp, Homo sapiens
atggtgaaaagccgcaaggaattggagcagaagatccaagttttggttctggtgccagatctctctaggtgtcaacacagaagcagtcacctggaacagccacctggccagagtccacgcctcaacttcgaggctggcgatccagaaagagcacctcacgccctgggctgcaagcgcagccggacgcgcgcgaccagtgatcgccagccaatggcaagccgggacccggtcccactgctgattggcccccagatcccggggcgctgcaggccgctccccggaaggcctcatcctgcgcggctggacagcgcctggcgccggactcctctttctcccggaagcggagcaccgagccggcaaaggcttgggtgtgagacagcagcgtgtggcagacaccgcagaagcaaagagcagtgaggcccctgcattcgggtggagcaccatggacgaagctggcagctctgcgagcgacgaggggcttccgcccgggcgtggacagcctggacgaaccgcccaacagccgcatcttccttgtgatcagcaagtacacacctgagtcggtgctgagggagcgcttctcgccttttggcgacatccaggacatctgggtggtgcgggacaagcacaccaaggagtccaagggcattgctttcgtcaagttcgcccgcagctcacaggcctgcagggccatggaggagatgcatggccagtgcctcggccccaacgacaccaagcccatcaaggtgcgggtgcccgggtcggggtgccctcgggggaaggagtgggcctcttggacctcccttcacctgctgctctgccggggtgagggaggagtggaacatccgttcccggcagctgaccagacagcacctggcttggggacaggggctgctttgaggagaggctcccctcccacgaagctgcgccgggttgcagggaaggggacgggatgcggagtgtttgccccacgagagcggacccggcagccgcggccaccgggtgacagaacagcagtggctgggcttcccctctccctcgccctcactaatccaccagctcttgagttcactgccaaactcgtcctagcctactttgagtacttttctgaccttcctctctcagatgcccagatttccatatataaaaaacggaaaaactctacttttcctcaggttttcattgctcagtcccgatcatctggaagtcaccgagatgttgaagatgaagaacttacaagaatctttgttatgataccaaagtcctacacagaagaagatctgcgggaaaaatttaaggtgtatggagatatcgagtattgcagcattattaagaataaagtgactggagaaagtaaaggtttgggctacgtacgatacttaaaaccatcacaagctgcccaagcaatagaaaactgtgatcgaagttttagagcaatcttggctgaacctaaaaataaagcatctgaatcctctgaacaagattattatagtaatatgaggcaagaagctttgggacatgaacctagagtaaatatgtttccatttggtcatggagtggttcagtattttaatgtagcatcagctatttatgcaaaatacaaattacatggatttcagtaccctcctgggaaccgaataggtgtttccttcattgatgatggaagtaatgcaacagatcttcttataaaaatggcaacacagatggtagctgcacagctttgcatcaatggtgtggaataacccaagtcagcaacaatttatgcaatttggaggaagctctggatcacagttgcctcaaatccagacagatgttgtacttccatcatgcaaaaaaaaagctcctgctgaaactcctgtgaaagaaagactttttattgtgtttaatcctcatcctttacctttagacgtattagaagatatattctgtcgttttggtaacctgatcgaagtttaccttgtgtcaggaaaaaatgtggggtatgccaagtatgccgatagaataagtgctaatgatgccattgccactctacattggaaagattctgaatggggtgagacttaaagttatgctggcagattcgccaagagaagaatctaacaaacggcaaagaacttactgattcttgagaacacccgactaaataatgacataatcctcagctgactgactgaaaatgtgactggacgcattccctgtggacagttgacagcttttttttttttccatatacctgatagtctgtgtacagcattgttttgtctgggaagcagggattgctgacatgtatttttgaatccatacattaatgctaaaacgaatatagtagttgttccttagagcaatatgttgttacgtgtagcagaaataaagttttctttgcttaactaaaaaaaaaaaaaaa

SEQ ID NO: 129709 - DNA, 534 bp, Homo sapiens
tgacgccaagtttgagtcaggcgatgtgaaggccacagtggcagtgctgagtttcatcctctccggtgcggccaagcacagtgtcgatggcaaatccttggccagtgaactgcagcagctggggctgcccaaagagcacgcggccagcctgtgccgctgttatgaggagaagcaaagccccttgcagaagcacttgcgggtctgcagcctacgcaaactgaagcaggcccagaccctgatgagctccctgggctgaggagaagggtgttccaggcctgtgtggagccgccctgcccgtatggagtcacgccctctgaactgctcttcgggaggcagccctggttctaggatgctgatgccctggcccggactctggcctcccagatccccagctgcctcacttctctcttgagaacttggctcagggctcctgaggacctttcccagcattaccttcccttcccttgaaaggcaattgttggctgttttcataagcaggaaaaataaacagaagtataaaggaaaaaaaaaaaa

SEQ ID NO: 129710 - DNA, 917 bp, Homo sapiens
agcacgcggccagcccgtgctgctgttatgaggagaagcaaagccccttgcagaagcacttgcgggtctgcagcctacgcacgtggtccctggcagcacgagtggcagaagggacagcagagactgtggacccctcagctgcacctaagacctctgtgtggtctagccgtgtgtgctgggggaggcttttggccaccatttccccctctgtaaatgagaccgatacctgtggcatggaggacaggaggctggtggtgtgcaggccctggcgtgcacagtgccacatgaaggcctggggctggcgccaccctgaagaaggtggcacccactctggcgccccctctgctgtcctgcaggctctggcggtggccatccagcttggtggccatctggctgatccactcctccaggtggaccctctgtcctcatgtggtgcagtaagtttggacattctgatctacttggtgttttattatagaactgctagtgtgcccgagacttacattgtgaagacactttttaaaaaacttgagagccaaagcctaatccagagcaatgtcctaactcgctccaattctatgaaggctgagagaggtgaggaagctgcaaaagaaaagtcagaagctagcagaggttggttcatgaggtttaaggaaagaagctgtctccacaacataaaaatgcaaggtgaggcagcaagtgctgatgtagaagctgcagcaagttatccaaaagatctagctaagatcactgatgaacatggctacactaaacaacaggttcgatgtatacaaaacagccttctgttggagggtaatgctgaagaagtacgtaaaattattgtttgttctatgtcccctcccttaaaaccaggtggacctgtgactctggtagaagagttcctatgtgcttctaag

SEQ ID NO: 129711 - DNA, 1036 bp, Homo sapiens
tacgcctgcggtaccgctccggaatttccgggtcgacgatttcgtagaaaaatggtggtgatggcgcgactctcgcggcccgagcggccggaccttgtcttcgaggaagaggacctcccctatgaggaggaaatcatgcggaaccaattctctgtcaaatgctggcttcgctacatcgagttcaaacagggcgccccgaagcccaggctcaatcagctatacgagcgggcactcaacgctgctgccctgcagctacaaactctggtaccgatacctgaaggcgcgtcgggcacaaggtgaagcatcgctgtgtgaccgaccctgcctattgaagattgtcaacaactgtcatgagaggggcctttgtgttcattgcacaagatgcctcgtctgtggctagattactgccaatttcctcatggaccaggggcgcgtcacacacacccgccgcaccttcgaccgtgccctccgggcactgcccatcacgcagcactctcgaatttggcccctgtatctgcgcttcctgcgctcacacccactgcctgagacagctgtgcgaggctatcggcgcttcctcaagctgagtcctgagagtgcagaggagtacattgagtacctcaagtcaagtgaccggctggatgaggccgcccagcgcctggccaccgtggtgaacgacgagcgtttcgtgtctaaggccggcaagtccaactaccagctgtggcacgagctgtgcgacctcatctcccagaatccggacaaggtacagtccctcaatgtggacgccatcatccgcgggggcctcacccgcttcaccgaccagctgggcaagctctggtgttctctcgccgactactacatccgcagcggccatttcgagaagatccggaaagcccccgtaaacggcggtccaacttggatggttggccaaaacagtgtgccaaggttccagacacgaagattgacacccttgaagcggaagggtccccttgtcacagacttccgcgaaaagcaaccaacacccttagcgcaagagtag

SEQ ID NO: 129712 - DNA, 423 bp, Homo sapiens
cgtagggggattctgcaacaaagaacatagagggcccccgaatgagtgggctatcaaagtcataataagcaccaacgcctgattgtagataccagcgggtcatgtccaggaagaaggcgcacccgacaggattgagctgaaacccgagcagcctctgaaactcggagatgagcacgtccttgtcggtggtgcccaggcagctaaacttctgcatcagctccgggtccaggtctacgtccatgccctccatggcggggaccggacacccgcttccccgcctcttcacaaccaagccgccgccgcgccgccgggcccggggacctggaggggggccgctgctagctagcttcgcgaccccgctcctttgaggtaggccccgggcctctcacagtctcataggtgtaaactcactctgccacgaaa

SEQ ID NO: 129713 - DNA, 631 bp, Homo sapiens
cagtgtgccctctatgtcctttgttgaagatgtcaccataggagaaggggagtcaatacctccggatactcagtttgtaaaaacatggcggatccagaattctggtaagtacataatgggcaatcctcccttgcctagttttcattttcttaataaactagtgccattgttcctgcgaccacagttcattgatgttatcaggggagatcaccccattgtttatattttcactaccacccaaggtctaaacttttactgccttttatattcatgtggtctcttgagctcttgagaatttggacatgtgaacatggtgatggtgagatcgctagagccccaagagattgcagatgtcagcgtccagatgtgcagccccagcagagcaggaatgtatcagggacagtggcggatgtgcactgctacaggactctactatggaggtgagtatgtccttgtgcagcccagggtaaaggaactaaggtaacatcttataacatccccagtgttgctcacagagcctgtcaaattgcacaacagcagcagcagcagcagcagcaacaacaacagcaatgtgaaatgactgtactgttcagattaacctctaaaatgcatatatgtgggtcttgaacct

SEQ ID NO: 129714 - DNA, 859 bp, Homo sapiens
catccatccacacacacacacctcactccatgcacactgacagattcttcccaagtctgaacccctctgtctccccaactgggttcagaccctatcacctaaccatggtgtctgcctcacctcctgggtgccagacgcaggtggtcctgcccagaggtggcctgccacttggtgaagattctaagaggagcagggactattggggctgagaggtagccactaccaccccactaggcaggggagcagagaggggccctaggcattgctctgaacccatacccagtgaggggagagagaatgaatgatactgataccctccctgggctggggaagccatggacccctctgcctgcactccatgacttgcacttactctggccctctgcaaggagctcatctcgcctccaaggatgtgcacagaaatggtttgttcttgggaagggagacaaggtgcttgggacatttaacttgccaagtgtggttgcctagaagcaagaggaagagcaagacagacttctggcaggcccagacccactgacggtggcccatgaagcccctgctgggaaactgggaaggggcacccagtgttgggcagaagaggaagtcaggaaagcaggggttgtgaagcctcccacaatcctgccagggacagtggagatgtgctgcttcaaggctactaagcagtaagaacagctgggcatgcatgggctccagggaggcagtgtctcaggagactggtaccagcagcagcagtctgggcctaatgaggccctcagacaaaaagccatcctgaggcctgtggcgtgggtacctggcagagacttccctctgctctgctagggagtggagcactcccatg

SEQ ID NO: 129715 - DNA, 1018 bp, Homo sapiens
acgcgtgtgaatacctcctgatactcagtttgtataaacttggtggatccagaattctgtggcagaggcctggcctccaggggtttgtcttaaatatgtcgggggagaccaatttggacatgtgaacatggcgatggtgagatcgctagagccccaagagattgcagatgtcagcgtccagatgtgcagccccagcagagcaggaatgtatcagggacagtggcggatgtgcactgctacaggactctactatggagatgtcatctgggtgattctcagtgtggaggtgggtggacttttaggagtaacgcagcagctgtcatcttttgaaacggagttcaacacacagccgcatcgtaaggtagaaggaaacttcaacccttttgcctctccccaaaagaaccgacaatcagatgaaaacaactttaaaagaccctgggggctccgagttcgactcgaacagcaaaaacacatgggctcctgctcctgacacatgggctcctgctcctgaccaaactgagcaagaccagaatagactgtcccagaactctgtaaatctgtctcccagcagtcacgcaaacaaccttatcagtagtgacttacagtaaggggctccatgggccttaccccttcggccagtcttaaacgggtgtcagcaagaagaaaaattaacaaaagacagaaggcctgactttggggggttagggcaaggggttcctctgggattgcagaccacatcgcacagacccctgggctctgaccccctctcatcccggaagaagaggaagaagcagaacagactagttttgagtaaacttcagtattgcatgtgtggaatgctgaatcacaggaatggtgttgaggctaccaagaagaaatccatgcagccactttgggttttgttataggcatcagtctaacaagtcattaggtcactcgggaagggggaaaaagtttaaaatgggggaaaaaaagccatctttttaaacaaaaattattttgcctacagaaaggttgt

SEQ ID NO: 129716 - DNA, 1536 bp, Homo sapiens
tttttttttttttttttaaattctcatgactttattttgattgggttgttcctgacggagtgggtggaaggttatggatgtttgtatcgagaccttttttatcttccggagacacgatgctaccgttgcataacacaaacagcaccgataaaatgtagtaataggaaagagtgccagggaatcaagactttaaggcagcatcccactgggaaagcagctcttcaaacacgtccttcaagcgcgagtggcagactccttgctgggagggcctgagtgcactttgctacttgaccttgccactgtctctccgggactttcagtttcctcacctcaaaggagcggggtcgcgaagctagctagcagcggcccccctccaggtccccgggcccggcggcgcggcggcggcttggttgtgaagaggcggggaagcgggtgtccggtccccgccatggagggcatggacgtagacctggacccggagctgatgcagaagttcagctgcctgggcaccaccgacaaggacgtgctcatctccgagttccagaggctgctcggcttccagctcaatcctgccggttgcgccttcttcctggacatgaccaactggaacctacaagcagcaattggcgcctattatgactttgagagcccaaacatcagtgtgccctctatgtcctttgttgaagatgtcaccataaggggaagggggagtcaatacctccggatactcagtttgtaaaaacatggcggatccagaattctgatgtcatctgggtgattctcagtgtggaggtgggtggacttttaggagtaacgcagcagctgtcatcttttgaaacggagttcaacacacagccgcatcgtaaggtagaaggaaacttcaacccttttgcctctccccaaaagaaccgacaatcagatgaaaacaacttaaaagaccctgggggctccgagttcgactcgatcagcaaaaacacatgggctcctgctcctgacacatgggctcctgctcctgaccaaactgagcaagaccagaatagactgtcacagaactctgtaaatctgtctcccagcagtcacgcaaacaacttatcagtagtgacttacagtaaggtaggtgcccttggagaagagaaggggtaggtggtgggccttgggacttgtcagtggaatctgaaatgtggatgggcctcccggtttgaaagtacctccatccagaaggtaccgcgatggtcttcctgcttggcctactgccataggactccccagacaagaacaaaccatttctgtgcacatccttggaggcgagatgagctccttgcagagggccagagtaagtgcaagtcatggagtgcaggcagaggggtccatggcttccccagcctagatgagggaatggatggtgtccaggccaggggtgacaccacccaggaaccaggctgcaagtgcatggaggagtggagccagagccctagtagggcctagtttaattcctgtggtccttcctcccaagatccagtctggggctctggagcc

SEQ ID NO: 129717 - DNA, 1818 bp, Homo sapiens; identical to SEQ ID NO: 117791

SEQ ID NO: 129718 - DNA, 1914 bp, Homo sapiens; identical to SEQ ID NO: 128285

SEQ ID NO: 129719 - DNA, 1128 bp, Homo sapiens
atggggtccagccactgcccacagccaggcactctggctgcagcagggtgggcagtgccaggcaccagctccctgcaaggctgtggctggatgaggcacactgcaagtagcttccatggctggcaccagggaatgtggtggcacccagaaacttggagatgccaggaaccacagaaccccaaaaagggcatcacagccctggctcagggtgctcccagccccaccattcggcaggtcccaagttcttgtactgcatccaggaagaatgagttatgcagacaagtagagggtgagcaaggtgaagaggcaggccatcccatcatctgctcaagtctggctgagtccaagatttttatgggcttaagaggggagaaagtaggtgctgatcggcccttctatggagcactcagccctggctgtgcctcccccattgtagccagtgtcatgcagcggccactcaaggtgggccgccgctgccatcagtattgctctgtcaatgatagaaacagtaaacatggtattcaccttttacagcaggcatcatgggaccataagtacccgtgttctgttggcaagagaccagagagacaggacggccaagacactgtaaaccttggaactttggaagaaacagcttccccatccccagtagtgacaacatcccctcctcaacccatgctgccatcagcctttccacctttgtctgaggagataaaccctgcgctgcctgaggcaacggtgatggcctcccctgaggcggttgccaggcaagataatgttgattctgctcaggagccacccccaacacccctgtgtgcttctagacctacaactagacaaaagtcctggtggggcgctagaggtgaggttgagagtgtgacccatgaggagatgcactacacgggaaaagaactgcttgagttctctaatttatataaagagaaatctggagaacaggcatgggaatggatattaagggtgtgggataatggtggaaggaacatacagttggatcaccctgaatttgttgatttgggcccactaagtaggaactctgcatttaatgttgcagttcggggagttaaaaaaggttctaagagtttatttgcttggttaggtgaaatatag

SEQ ID NO: 129720 - DNA, 504 bp, Homo sapiens
tttcaacaggtcaaaaagaacctttattactttttatgattgccacttatgctttcttgccagatgcctttggagcaggtgctttctgggctggagctttttgacccctctgagcctttggagcaagcgctgctttctgggccgtgggtttcttggcaagaaccctcttggctggaggccttttaatcgcgggggtgaacctttttgccggaactttagcagcagcaacaacagcaacagcaacagcagcagcagtacccctagtaacaagtgctttttttggagaagccttcaggagagctgccttttgaagcctcttaacttcaatcctgaataatccgttcctccgtgcggaaacttgaggatgaaatcagtgagccgcatgcactggaaaggcatggcctgtctcctcacttgagtgcaaggtccatccgacaaagccctgttctgattaataacatctccaatggggacaattttccggcaatagggtccaaagggaat

SEQ ID NO: 129721 - DNA, 1016 bp, Homo sapiens
caacatggtgagtcttactgttgcgggctccggtgccgtcgaccatgccgctcgacctccacctccgctgggaagctgaggcgccgaacggctcccagagggtcccgggaagcgcatggtgttcaggcgcttcgtggagtgttggccgggtggcctatgtctcctttggacctcatgccgggaaaattggtcggcgatggtagatgtattttgatcagaacaagggcttttggtcgaatggaccttgcactcaagtgaggaagacaggcccatgcctttcaaagtgcatgcagctcacgtgatttcatcctcaagtttccgcacagtgcccaccaagaagtatgtccgacaaagcctgggcagaagggaagacatcaatacaaaattggggcagcccacacgatggggccaaggaagatttgaaagccaggaggaaaaggaaaagccaagattgacagatttttgatccgttttttaaagttaatgaagggccaaagaaaattgaagggacaggattaatccaagaaatgaagtttaagaagctttcaaaagggcagcttttcctggaaaagcttcttcccaaaaaaaagcacctgggtactaaggggtactgcttgctgctgctgctgctgctgctgctgctgctgctgctgctgctgctgctgctgctgctgctgctaaaagttccagcaaaaaagatcacccgccgcgagtaaaaaggctccagcccagaaggttcctgcccagaaaagccacaggccagaaaagcagcgcctgctccaaaagctcagaatgggtcaaaaagctccaagccccagaaagcacctgctccaaaggcatctggcaaggaaagcataagtggcaatcataaaaagtaataaaggttctttttgacctgttgacaaatgtatttaagcctttggatttaaagcctgttgaggctagagttaggaggcagattgatagtaggattataataaacattaaataatcaaaaaaaaaaaaaaaaaaaagtc

SEQ ID NO: 129722 - DNA, 1860 bp, Homo sapiens
ctatgatcccgcagcgtccaaggcagggctcaggccccgggattctccccacacgctgctgcactggcgcagccgatcgccaaactttgtctccccaaagccagtgcccccgcagttacttggcgggcagccgctagcccactctcggcgggatgatctgggagaagcgggcgtgggacgagggggctgctgttttgcagccctgcgaggcgtgcagtcggagaagtggtcggggttccacaccgtccctgagcctgcccccggccaaggtggcccgacgtgctgcagtggctggcgcaggtgatccgggcagcgcgtccggcactgcattgccagcagcagcaacagagccaggacaagccgtgcccgcccttcgcgcccctcccgcaccctcaccaccacccgcacctcgcgcaccagcagccggccagcggcggcagcagcccatgcctccggtgcaacagctgcgcctcctccggtgccccggcggcgggggcgggagataacctgtccctgctgctccgcacctcctcgcccggcggcgccttccggacccgcacctcctcgccgctgtcgggctcgtcctgctgctgctgctgctgctcgtcgcgccggggcagccagctcaatgtgagcgagctgacgccgtccagccatgccagtgcgctccggcagcagtacgcgcagcagtccgcgcagcagtcggcgtccgcctcccagtaccaccagtgccacagcctgcagcccgccgccagccccacgggcagcctcggcagtctgggctccgggcccccgctctcgcaccaccaccaccacccgcacccggcgcaccaccagcaccaccagccccaggcgcgccgcgagagcaaccccttcaccgaaatagccatgagcagctgcaggtacaacgggggcgtcatgcggccgctcagcaacttgagcgcgtcccgccggaacctggcgctctatggaaccggcggcggaggcagcactggaggaggcggcggcggtggcgggagcgggcacggcagcagcagtggcaccaagtccagcaaaaagaaaaaccagaacatcggctacaagctgggccaccggcgcgccctgttcgaaaagcgcaagcggctcagcgactacgcgctcatcttcggcatgttcggcatcgtggtcatggtcatcgagaccgagctgtcgtggggcgcctacgacaaggtacaggcttgaaccccagcccacgctaccggagtcgggcactgggtggttgggatgggcactggcggggaccctttgcgtgcggatccctagcctctccgggacgatcaagggagcccgccaggacagcgggcgcgtcttctcaaggacagttacagatctttttgcttgtaagcaacataagctatgccagtgtatgctgccatccagtgttgctgaaccatcttgttttgccagagtgtgtataaacattttataaaaggtcacacggatctgctttccaaggttctccatgaaaatgtcagggcctcctcttgcttcattaagcaattccagaggacatagagccagaaagtcagctataacacttacttttctatgcggatgccattcgttataatgctcgaacgcctctgcaaggttctttgctgccgttaacccgtctggtttgggcatgatactgatgtagtcacgctttatcgttttcacgaagctctctgctatggggtcctctagagtccgtaaagggcgccatgtaaatatgtggtaaagcctgtctgctgcctgccgtcgagcgtaagacatcttcacagcgtctgtgaaatattcagtgacgcgcaggttttgtgactcatacttataagcccagca

SEQ ID NO: 129723 - DNA, 1819 bp, Homo sapiens
atgtggcacatatacaccaaggaatactatgcagccatagaaaaggatgagttcatgtcctttgcagggacatggatgaagctggaaaccgtcatcctcagcaaactaacacaggaacagaaaaccaaacatcacatgttctcactgtgctttgaatataccatcccactggcttctggtcactatggtttagtgatgagaagctgcgactaccggggtgaatcagcccgcgccaggcccctttcccacccgccgctgcagttaggacttggcaaagatgctcgatatttgcgtatttgtgaccggtctttgctttgtgtctgcgctgcaggtgatgtcatgcccattgttttggtgcgcccaaccaatcggactcgccgcctggattctaccggagccggcatgggcccttcctcgcaccagcagcaggagtccccgctcccgaccataacgcattgcgcaggttccagcgcggcttcttcccagagcagccgccgccgccgccgcgctcctcacacctgcattgccagcagcagcaacagagccaggacaagcccgtgcccgcccttcgcgcccctcccgcaccctcaccaccacccgcacctcgcgcaccagcagccggccagcggcggcagcagcccatgcctccggtgcaacagctgcgcctcctccggtgccccggcggcgggggcgggagataacctgtccctgctgctccgcacctcctcgcccggcggcgccttccggacccgcacctcctcgccgctgtcgggctcgtcctgctgctgctgctgctgctcgtcgcgccggggcagccagctcaatgtgagcgagctgacgccgtccagccatgccagtgcgctccggcagcagtacgcgcagcagtccgcgcagcagtcggcgtccgcctcccagtaccaccagtgccacagcctgcagcccgccgccagccccacgggcagcctcggcagtctgggctccgggcccccgctctcgcaccaccaccaccacccgcacccggcgcaccaccagcaccaccagccccaggcgcgccgcgagagcaaccccttcaccgaaatagccatgagcagctgcaggtacaacgggggcgtcatgcggccgctcagcaacttgagcgcgtcccgccggaacctccacgagatggactcagaggcgcagcccctgcagccccccgcgtctgtcggaggaggtggcggcgcgtcctccccgtctgcagccgctgccgccgccgccgccgctgtttcgtcctcagcccccgagatcgtggtgtctaagcccgagcacaacaactccaacaacctggcgctctatggaaccggcggcggaggcagcactggaggaggcggcggcggtggcgggagcgggcacggcagcagcagtggcaccaagtccagcaaaaagaaaaaccagaacatcggctacaagctgggccaccggcgcgccctgttcgaaaagcgcaagcggctcagcgactacgcgctcatcttcggcatgttcggcatcgtggtcatggtcatcgagaccgagctgtcgtggggcgcctacgacaaggcgtcgctgtattccttagctctgaaatgccttatcagtctctccacgatcatcctgctcggtctgatcatcgtgtaccacgccagggaaatacagttgttcatggcgaactatggagcagatgactggcgaagcgccctgacttatgagcctattttcctcatccttttggaagcactgaggggggtcattcatgccacaccatgcagagtatctctctctctctgggacggcctggatttgcccg

SEQ ID NO: 129724 - DNA, 2868 bp, Homo sapiens; identical to SEQ ID NO: 121571

SEQ ID NO: 129725 - DNA, 381 bp, Homo sapiens
tcagaacccccacacagaggccccactggggcactgccaagtggagctgtgagaagagggccactgtcctccagaccccagattggtagatccacagacagcttgcactgtgtgcctggaaaagccacagacgctcaacgccagccggtgaaagcagcggggagtggagctgtaccctgcaaagccacagggtggagctgcccaaagctgtaggagcccatctcttgcatcaacgtgaccatatgttaaaaatatcagtggaatatcacagttgagtccagagcccagatgagtttctgtgttcctttctacttcttgcctgcctcttgttttgctgtctacccttcccccctccacttctccatttgtatcacaactcat

SEQ ID NO: 129726 - DNA, 741 bp, Homo sapiens
tgtgacaatctaaaaacttgtcacacttcacatggttctgtcatggcggaaacagcggttatcaatcacaagaaacgtaaaaatagcccgcgaatcgtccagtcaaacgacctcactgaggcggcatatagtctctcccgggatcaaaaacgtatgctgtatctgttcgttgaccagctcccacaatctgatggcaccctacaggaacaaaaaagtatctgcgaaatccatgttgctaaatatgctgaaatattcggattgacctctgcggaagccagtaaggatatacggcaggcattgaaccgcttcgcggggaaggaagtggtttttatcgggacaggaccctcagctgcaggtctgttggagtttgctagaggtccactccagaccctgtttgcctgggtatcagcagcggtgtttgtagaacagcggtttttcgtgaaccgcgaatgctgctgtctgatcgttcctctggaagttttgtctcagaggagtacccggccccgtgaagtgtcagtctgcccctactggggggtgcctcccagttcagcattcctggtggaagcaatctgggcctggttaaaggaagtggctgttccaaaagtagaagggcagacaaagccaaatctgggggaagctttgtgtcctagcatggttatgggaaggcagcgcatccgccacagagggcagtccactgtgctagaaaaagatgctgaagaaacatatcaagtagaaaagtga

SEQ ID NO: 129727 - DNA, 2663 bp, Homo sapiens
atgggcaaagacttcatgactaaaacaccaaaagcaatggcaacaaaagccaaaactgacaaatgggatctaattaaactaaagagcttctgcacagcaaaagaaactatcatcagggttaacaagcaacctacagaatttggggaaattgaaataaaaagtacaaaagaaacaagtaaaggaacagttaatgacatacaaagggaaccaagagactatggcctcctgaaagccagatacataaagacttctggtaacgccactgttgatcacttatccaagtatctggctgtgaggttagctttagaagaacttcgaagcaaaggtgaatcaaaccagatgaaccttgatacagccagtgagaagcagtataccatttatatagcaacagccagtggccagttcactgtattaaatggctctttttctttggaattggtcaggataatgggattacagtgggcaaaacatcttggaaatgcagtcaaagttacaatcaatgacttgaatgaaaattctgtgacactgattcaggaaaactgccatttaaacaaattgaaagtggtggtggacagtaaggaaaaggaaaagagtgatgatattcttgaagaaggagagaaaaatcttggtaatattaaggtgaccaaaatggatgccaatgtactgatgcatttgagatcttttgatttcatacatctagacccttttggaacatcagtgaattatctagattctgcattcagaaatataagaaaccttggcatagtgtcagtgacttctacagatatcagttctttatatgccaaggcacagcatgttgcccggcgtcactacggatgtaacattgtccgaactgaatattacaaggaactagcagccagaattgttgtagctgcagtggcaagagctgcagcccgatgcaacaaaggcatagaagtactgtttgcagtggctctggaacattttgtgttggtagttgtgagagttttgaggggacctacttcagcagatgaaacagccaagaagattcaatacctgatccattgtcagtggtgtgaagagagaatttttcagaaggatggtaatatggtagaagaactcaggattaagaaactcactcaaaaccacacaacgtcatggaaactgaacaacctgctcctgaatgactaccgagtaaataacgaaatgaaggcagaaataaataagctctttgaaaccagtcagaacaaagacacaatgttaccagaatctctgggacacagctaaagcagtgtttagagggaaatttatagcactaaaagcacacaagagaaagcaggaaagatctaaaattgacaccctaacatcacaattaaaagacgtagagaaacaagagcaaacaaattcaaaagctagcagaagaaaagaaataactaagatcacagcagaactgaaggagatagagacacaaaaaacccttcaaaaactcaatgaatccaggagctggttttttgaaaagatcaacaaaatcgatagaccactagcaagactaataaagaagaaaagagagaagaatcaaatagatgcaataaaaaatgataaaggggatatcaccactgatcccacagaaatacaaactaccatcagagaatactataaacacctctacacaaataaactagaaaatctagaagaaatggataaattcctcgacacaaacaccctcccaagactaaaccaggaagaagttgaatctctgaatagaccaataacaggctctgaaattgaggcaacaattaataacttaccaaccaagataagtccaggaccagatggattcacagccgaattctaccacagcttcaagacccataccagagagcagtttttaaaacctgatttatctccttttgtaggctcggtcacagagttaagtagcagcaacagtgggaggcaggacacttctctttgctccgttttgactgctgtcacccagaagctgatgctgctagaggggattgaggagacaggaccctcagctgcaggtctgttggagtttgctagaggtccactccagaccctgtttgcctggctatccagcagcagtggctgcagaacagcggattttcgtgaaccgcgaatgctgctgtctgatcgttcctctggaagttttgtctcagaggagtacccagccgtgtgaggtgtcagtctgcccctactggggggaaagggaattccctgacccttgcgcttcccgggtgtggcaatgcctcgccctgcttcggctcatgcacggtgtgctgcacccactgtcctacacccactgtctggcactccccactgagatgaacctggtacctcagttggaaatgcagaaatcacccgtcttctgtgtcgctcacactgggagctgtagactggagcttttcctatttggccatcttggctccaccccagttgatccattttctaagaaagattggcatgatgtgaaagcccctgctgtgttcaatataagaaatattggaaagaccctagtcaccaggacccaaggaaccaaaactgcatctgatggcctcaagggtcacatgtttgaagtgagtcctgctgatttgcagaatagtgaagttgcatttagaaaatttaagctgatttttgaagatatttgggcaaaaactgcataa

SEQ ID NO: 129728 - DNA, 2193 bp, Homo sapiens; identical to SEQ ID NO: 126786

SEQ ID NO: 129729 - DNA, 669 bp, Homo sapiens
atggggttttgccatgatggtaggagcattgcttttcgtggtgaaagaggcaatgatgaatctgccatcgaaatgattaaagtatctcatttgaagcagtatttggcagtcgtattcagagataaacccctggagctatgggatgttaggacttgtacccttcttagagagatgtccaaaaacttccctacaataactgctttgatacttactggaagatgtgcttcactaaaatggagaagtaaaccaaaaaaagaggaatttatgggatacagacagtggaatccaacacaagaaagcagcaaaggggatttcgagatacagttagagggaggtcccagtatggcaactgtgtaccggactgaaatgcagccagtccagattggtatagaactgctgccctccccactcagtttccatccaagccccaactctggtattcccaatgaccccagctggctgctctccactgcaaccctgcatcccccgacaggggtggaacgcagctcctcaccagcaacggaacaaaggtggacggagaatgactttgacgagctgagagaagaaggcttcagacgatcaaattactctgagctacgggaggacactcaaaccaaaggcaaagaagttgaaaactttgaaaaaaaatttagaagaatgtataactag

SEQ ID NO: 129730 - DNA, 484 bp, Homo sapiens
atggctcatgaatcagcagaggacttgtttcatttcaacgtagggggctggcatttctcagttcccagaagcaaactctctcagtttccagactccctgctgtggaaagaggcttcagccttgacctctttcagaaagccagaggctatttatcgacagagatggttccacatttaggcacgtgcactattacctctacacctccaaactctccttctccagttgtgcagaactgaacttgctgtatgagcaagcattgggtttgcagctgatgcctttgctgcaggtaagatgctcttgttttctgggagtggtggatcagtaacatggctttacatcactaaatattgtttcctgttatatattggttgctgagatgaccctcttaatgggcaaatgtaataagtgtgttaaagtaataaataatttcctcattagtataggggtgagtaaaaaggaaaaaaaagtaataaccaataccctg

SEQ ID NO: 129731 - DNA, 1443 bp, Homo sapiens
atgctagccagcacacaagggcaagattctaatccatcggtgaaccatgtcacgtggcccccgatttggctggaaaagttcgtatctataccaggaactgccattgctgccctaataaaattagaattatctcaacaagaaagaagtgggaaatggtcactaaacagccctcttacgcttgtgaagaacgcatgtgctgacccccagagcctggtcctgccgagctgctccctggtgctggggaaaggtggcacaactgtagagacagaagagtattttgggggcctggcagggggcagagtgttcacggtggtccagaagattggcagtcattccaaacagctcctggccagcatcagtgaacttcagtactctcagcttcactggcctgtgcaaatgcaaatacaggtcctgagaatggctgcacagctgcctacaccctcctcaaagcatcacgggacagacagctcagaccaagccaaaggcaaccaagcacctagcacacaggagatgccaaatgtgaaacaaccatttcaaccagcttggacaaaagagagaagccaagatggggctgagaaaccaatgcaggcaggcccagggacccaggagtcagggaccaggtgctaccagatgcttgctccgactcgtgttgctgctgtcttctctgtgcctcaactctgtcctctgtcactgcaggcagcttcctcccaaggtgctttcttttctactattatctggtacaaaactggttttctgtacatctcctcaacctctgaccagaaagccttggccctggaacctcttggtgatagtcgtttgcctgtgctaaataacaacctcacttcctgttttctcttttatctcaacacaacagggcaggaaactgaagctcttgggaaggtggaagttgcacgtggtctcacagtcaactgtgccagaataggaggccaggaaccatctctgctggaggaagacccaccacgcatcccttcaagaatgccaaggtccagagcaagtgcttcccttctatgggcacaggagggctgtgggagcccacagaatgtgcttctggccagagatgaactcaaaggtgtgacactaactggaaagataaaaaggatgattaaaaatcaaggtattggccagcgtgcagtagagaatctgcttttaaagcatctttccgatatgattcaccacttcatggtacagatggaggcgaatttggagactgtcattaggatttccatccgcccagcggccatctttcgcccaatcacagcggcggcgcggcgggggaggaggggagccggctgccagctcgcaccgcagcccgcggcggaccccaagccaccgcggacccatgcgcggagcctgctgggccgccgctgccgtcgtcctaaggctgtcattttttacttgccccttctgaaaattcactgttga

SEQ ID NO: 129732 - DNA, 708 bp, Homo sapiens
atggaagtcacagccagccctcagggagtgtccgcagtatccaaaggagaccaaaagtggactgccctgggaaagggtctgacttttattaaagcagttggcagtatccaacgcaatcgctggaggggctggcagctgaaggctctctaccaatgcacaaccatagcaggggcaacaggtgtcttcctgagagtgtacagagcccttgatgtcctgcaaatggaggaggaggatgtccttaagttccttgcagcaggaatccacttaggtggcaccaaccttgacttccaaatgaaacaatacatttataaaaagaaatgtgacggcgtctatatcataaatctgaagaggacctgggagaagcttctgttggcagcttgtgccattgttgccattgaaaaccctgctgatgtccgcgtcatatcctccaggaatactggccagagggccatactgaagtttgctgctgccactggagccactccaattgctggccgcttcactcctggaatcttcactaaccagatccaggcaaccttccaggagccacagcatcttttctttactgattccagggctgaccactgcctctcacagaggcatcttatgttaacttacataccattgctccacgtaatacagattctccgctgtgctatgtggacattgccatcccatgcaagaagggagctcactcagtgggtttga

SEQ ID NO: 129733 - DNA, 757 bp, Homo sapiens
aagttccgggtcgacccacgcgtccgacctgcagaggggtccatacggcgttgttctggattcccgtcgtaacttaaagggaaatttttatcaatgtccggagtctcttgatggcctgctttgtgaaggaggaggatgtccttaagttccttgcagcaggaacccacttaggtggcaccaatcttgacttccagatggaacagtacatctataaaaggaaaagtgatggcatctatatcataaatctcaagaggacctgggagaagcttctgctggcagctcgtgcaattgttgccattgaaaaccctgctgatgtcagtgttatatcctccaggaatactggccagagggctgtgctgaagtttgctgctgccactggagccactccaattgctggccgcttcactcctggaaccttcactaaccagatccaggcagccttccgggagctcacggcttcttgtggttactgaccccagggctgaccaccagcctctcacggaggcatcttatgttaacctacctaccattgcgctgtgtaacacagattctcctctgcgctatgtggacattgccatcccatgcaacaacaagggagctcactcagtgggtttgatgtggtggatgctggctcgggaagttctgcgcatgcgtggcaccatttcccgtgaacacccatgggaggtcatgcctgatctgtacttctacagagatcctgaagagattgaaaaagaagagcaggctgctgctgaagagg

SEQ ID NO: 129734 - DNA, 1767 bp, Homo sapiens
atgcaaactgctgcttttcttcttgatttttgctctctgactcttccccgcggttgctgcgtggccagcgtccctgtcagtccgttcggtagcccacatttagaatatgcctcgctgccatctcggctggcagcgagatacgccggagaagacgtaggcgagcagttatcgcgcgacaaatttgaggtcagaggcgaaagggaaatgtctggtgcaaacatccgctacacgggcgctgtaaaggctgggcaggtcgtacgtctgcggtatccagagaaatctattagggctcatccatgtccctttcacggtccaacagtcgtgagcacttgggaggtggaagcgaatctgataactggagagaccgaaatggaattggacctggaagtcatagtgaatttgcagcttctattggcagccctaagcgtaaacaaaacaaatcaagagctgcttcctttggtgctgatgtttgagctaccaattgctggaattcttcaaccggttcctgatcctaattccccctctattcagcatatatcacaaacgtacaatatttcagtatcatttaaacagcgttcccgaatgtatggtgctactgtcatagtacgagggtctcagaataacactagtgctgtgaaggaaggaactgccatgctgttagaacatcttgctgggagcttagcatcagctattcctgtgagcacacaactagatattgcagctcaacatcatctctttatgatgggtcgaaatgggagcaacatcaaacatatcatgcagagaacaggtgctcagatccactttcctgatcccagtaatccacaaaagaaatctaccgtctacctccagggcaccattgagtctgtctgtcttgcaaggcaatatctcatgcccaccgcagcaccgggcaacaacgagcaccctcgaggtctcagtcacaagaagcatcacaccaacgacgaacgaccgccactctccaatgacgcccccactaagcaacacctccctcctccgaccgtcgggacgtcagcgggcgcaagggacgtcgcacgacccgaccgacaaaggctcaaccctatgaacgcaagctacaacgtactcacgagcctcacggagtccggctaccaacaactctttgtggataagctgcttcctctgttggagctgtatgatgcaaaactcataaaaaactttgacagctgccagacagcccctcccgtccacccgctgaacaatctcggtcgcccccgcctcaacattcggcgacgtatacagccaccctcgcgcgagcacgggtgtatcatacccgcgcgcacggacctaactgcgtacacgaccctacggcgcactcacttcacgtttacgcacgcgacccaaccccggcacgatcgggtgacacgactacgtcgcacacctctactgcagaacttgcacttcccgcgctggaacgcgttaataagtgggtacgtactcgccgtcgacatccgtacacgcgcccgagagattgcgcggtccttccgccccggggtgaattactgggaaaactggctagccatatgtagaaagctgaaactggatcccttccttacaccttacacaaaaattaattcaagatggattaaagacttaattgttagacctaaaaccataaaaaccctagaagaaaacctaggcaataccattcaggacataggcatgggcaaggacttcatgactaaaacaccaaagcaatggcaacaaaagccaaaattgacaaatgggatctaa

SEQ ID NO: 129735 - DNA, 412 bp, Homo sapiens
acgaggatggggctgcctgacgcgtctaggagaaggacttgtagaatggatccagagggatggcaggaagccatgagctcagcgtagggcaggataaccctacagagactgtctacgggagcctgagggtcagggcgggagggagaaggtgggacctgaaggaggaagtgaaaacccgcaacagccgaaggctgcgggagtcctctcaaagcatctccccggcgccccagcccaaccacctcagcggcctccctcctccccgcctccccttgctggcccgctgaccgaacgagttgagaaagtctgcgattttcttgatgctgctggtgattatctcaatgtactcccggttagcccagtcctggtgaatctcccgctgcacaggatcctcctgtcccgccatggccgccgc

SEQ ID NO: 129736 - DNA, 600 bp, Homo sapiens
cccaggctttttggctgtgaatggtctcaaattacatttgaccaagttaggatgtataaaatgttactgaaaaaggtaaaaatgcctaacgttcgtttcccaaccggttcctctggaaactttctttcccacataccacaccaccacccccagaattgccagaccccaaaaggcccaacacttttgaaaaaaaaggaaaacacgagaataaagcccctggttgctctttaaaggaagaaaaggaaggagctgaaaggcctgctggggccctttccccatgtggccctaatgttgtgtaaaagcaaacttccccaagcagcagcacgggcactgttgctaggtgagtgttctacccttttgtcacccgaggcttcaatgtactctaattctccgttcaaagggctgtcaatttctcgtttagtgttgcaagtccttgacgacaagacatatcgaacgagttgagaaagtctgcgattttcctgatgctgctggtgaatatctcaaatgtactcccggttagcccagtcctggtgaatctccccgctgcaaccggatcctcctgtcccgccatggccgccgcctgaggaagagcctcgtgcc

SEQ ID NO: 129737 - DNA, 285 bp, Homo sapiens
ccatgtccgtctgttggttactaaagagttaacccgctggttaaaacagcaaagcgtcatctcccaacgttggctgaatatttctcgtctgctgggctttgtgagcggcatattgatcattgcccaggcctggttcatggcgcgaattctttgtactgcgcgcatgggtggtctggttacgcgaacgggtgggttatcacgccgggcagcatatccgctttgccatccgccgtcaggttctcgaccgtctgcaacaagcagggccagcgtggattcagggtaaac

SEQ ID NO: 129738 - DNA, 468 bp, Homo sapiens; identical to SEQ ID NO: 118911
  misc_feature (1)...(468): n = a,t,c or g

SEQ ID NO: 129739 - DNA, 840 bp, Homo sapiens
atggcttataagctttgtgggaaggaattcaaccggatgcacaacctgatgggccacatgcacctgcactcagacagcaaacccttcaagtgcctctattgcccaagcaaattcaccctgaaggggaacctgacacgccacatgaaagtcaagcatggagtcatggagcggggccttcattcccaagaaattatcgacctacgaaccaacattgatccgcacggtactgcgcaggcattaatgcaggcggatttgcaacaagatttgcgcgtcgatagcggtaaaccactggtctttcatcagctgatacaggtggcggataaccgctggtactggtatcagcgttatcaccatttgctggtcgatggctttagtttcccggccattacccgccagatcgccaatatttactgcacatggctgcgtggcgaaccaacgcctgcttcgccatttacgcctttcgctgatgtagtggaagagtaccagcaataccgcgaaagcgaagcctggcagcgtgatgcggcattctgggcagaacagcgtcgtcaactgccgccgcccgcgtcactttctccggcacctttaccggggcgcagcgcctcggcagatattctgcgcctgaaactggaatttaccgacggggaattccgccagctggctacgcaactttcaggtgtgcagcgtaccgatttagcccttgcgctggcagccttgtggctggggcgattgtgcaatcgtatggactacgccgccggaaggcagtatttttcatacaaaatagccgatgcatccggcgtccaggcgcggcttggtttggctgtcggaaatcacccccaataa

SEQ ID NO: 129740 - DNA, 1176 bp, Homo sapiens
atgtggcccaggccggtctctacctcttgggctcaagcaatcaaggttggacaatcgatgctcgtaccctccttatttgccctatttctcggtaagatcggcgcgccagacgttacgaccattgatcagacccgcagacagcaaccagtcagaaggcaggcgcttgtgcagttcagcaacgtcatctttaccatgtacgaggtcaacatgcagaccctgaacaggcagcgcagtaatcgtgtcgagatttggcgttacgccttcaaaataggtggtcagcagcagtttcacctgtccctggagcgcgtctaccagcgcgggttcatcaatctgtacccactcgatgccgcgtttcgccagttctgccagcacttgctgataaaccggcagaatgtcattcagcaggctcaggcggtcaaattgttcacctttcactttccccagccacagccaggtaaccgttcccagcagcacaggtttcaccttgtggcccagcgccagcgcctaggacacttcgtccagcagctgcgtccaggtcagtttgaactgttggcctttaacgaactccggcaccatgtagtgatagttggtgttaaaccatttggtcatttccgctgccgctatttcactgagacccttcatcagtctggcctgttgggcttcccttatgtcactccgaatgtccacatctccttagccctagccatcattatgctcggtacccgtgatgcggcattctgggcagaacagcgtcgtcaactgccgccgcccgcgtcactttctccggcacctttaccggggcgcagcgcctcggcagatattctgcgcctgaaactggaatttaccgacggggaattccgccagctggctacgcaactttcaagtgtgcagcgtaccgatatatcccttgcgctggcagccttgtggctggggcgattgtgcaatcgtatggactacgccgccggatttatctttatgcgtcgactgggctcggcggcgctgacagctaccggacccgtgctcaacgttttgccgttgggtattcacattgcggcgcaagaaacgctgccggaactggcaacccgactggcagcacaactgaaaaaaatgcgtcgtcatcaacgttacgatgccgaacaaattgtccgtgacagcgggcgagcggcaggtgattaa

SEQ ID NO: 129741 - DNA, 2934 bp, Homo sapiens
atggatctgtttatgaacgtcgccatgttgcgtgcggcacgttatttatggagcgaagcggtcagtggatttggcgcacaggacccgaaatcactggcgctgcgtacccactgccagacctcaggctggagcctgactgaacaggatccgtataacaacgttatccgcaccaccattgaagcgctggctgcgacgctgggcggtactcagtcactgcataccaacgtctttgacgaagcgcttggtttgcctaccgatttctcagcacgcattgcccgcaacacccagatcatcatccaggaagaatcagaactctgccgcaccgtcgatccactggccggatcctattacattgagtcgctgaccgatcaaatcgtcaaacaagccagagctattatccaacagatcgacgaagccggtggcatggcgaaagcgatcgaagcaggtctgccaaaacgaatgatcgaagaggcctcagcgcgcgaacagtcgctgatcgaccagggcaagcgtgtcatcgttggtgtcaacaagtacaaactggatcacgaagacgaaaccgatgtacttgagatcgacaacgtgatggtgcgtaacgagcaaattgcttcgctggaacgcattcgcgccacccgtgatgatgccgcctccgacacccgtgaaatagtagatttgaccaacggaaatattaaaacgttcaacggcagcatcatcatatatgcgagatttgacaccggtcgtcacctgtttagcggaggcaatacggtcaagaccgcccatttccatatcgcgttcaaagaccattttgccgtcaactttgaattgcggcattacgcggttaacggattcgtccagcttggtcgtgtttctggagttataccagtcaagattggtttgctgataatgggttgccagcaacttcgcttcggtattgatgctgccccagttattagagagcggcaaattgatggtcggttccaggtgaacacgggttgcttcaggcatgtcgtctctggtgttaacaaagtgcactgcctggccgtaaatacgcgtatcaaacggaccaacatcattctggccatctgcagggcatcgcaggccagttgcgccgtcatgcgtggcgacattgaccagccaataacggcacgtgaccacaggtcaatgaccactgccagatacagccagccttcatctgtactgttggcggaactgctgacgcgtgcttatccttgtccgccgctgacaccacgtataccagccgctgcgggccacccggagcacgcggcacattgctttgatgctgaactcagcctgatgtttttcaataaagacatacttcatttcaggcgcttcgcgaagtatgtcgcggccttttggaggatagccagctcttcatcccgttctgccagctggcgtttgagacgtgcaatctcgccttgcacccaacccgtcgtgccaacggcgcggatcaatctggcttacaccaaagtcacctctccgattagcggtcgcattggtaagtcgaacgtgacggaaggcgcattggtacagaacggtcaggcgactgcgctggcaaccgtgcagcaacttgatccgatctacgttgatgtgacccagtccagcaacgacttcctgcgcctgaaacaggaactggcgaatggcacgctgaaacaagagaacggcaaagccaaagtgtcactgatcaccagtgacggcattaagttcccgcaggacggtacgctggaattctctgacgttaccgttgatcagaccactgggtctatcaccctacgcgctatcttcccgaacccggatcacactctgctgccgggtatgttcgtgcgcgcacgtctggaagaagggcttaatccaaacgctattttagtcccgcaacagggcgtaacccgtacgccgcgtggcgatgccaccgtactggtagttggcgcggatgacaaagtggaaacccgtccgatcgttgcaagccaggctattggcgataagtggctggtgacagaaggtctgaaagcaggcgatcgcgtagtaataagtgggctgcagaaagtgcgtcctggtgtccagcccggcatctggatggcagaaaaactgtcagaattaccctccgcctggagcgtggcgcattacgttgagttaaccggagaggttgattcgccattactggcccgcgcggtggttgccggactagcgcaagcagatacgctgcggatgcgttttacggaagataacggcgaagtctggcagtgggtcgatgatgcgctgacgttcgaactgccagaaattatcgacctacgaaccaacattgatccgcacggtactgcgcaggcattaatgcaggcggatttgcaacaagatctgcgcgtcgatagcggtaaaccactggtctttcatcagctgatacaggtggcggataaccgctggtactggtatcagcgttatcaccatttgctggtcgatggctttagtttcccggccattacccgccagatcgccaatatttactgcacatggctgcgtggcgaaccaacgcctgcttcgccatttacgcctttcgctgatgtagtggaagagtaccagcaataccgcgaaagcgaagcctggcagcgtgatgcggcattctgggcagaacagcgtcgtcaactgccgccgcccgcgtcactttctccggcacctttaccggggcgcagcggctcggcagatattctgcgcctgaaactggaatttaccgacgggaatactgcagctggctacgcaactttcaggtggtcaaattgcccgacgcgcgccgacttgatgaacgggtcgtctgcacgaatttgtgccgccatccccttgagtaccgagttcaggtttacatcttcgatatccaccaccacgcgttcagggttactcaacgcgaactgcttatatttcagctga

SEQ ID NO: 129742 - DNA, 1779 bp, Homo sapiens
atgagcgtaagatttgtggccgataggggttacccgcatcggcatgaccaacgatcacgttatcagtcatttcaggctggatggctccagcctcgcattagcaaagatgagattatttcgcctgtggtgcagttttgctggtggattgaacacgctgacgggccgtccctctccccagcggccagcgacagcgactaccctcccggggagatgttcctggacagcgacgtgaacccagaggacccgggcgcagatggcgtgctggccggtatcaccctggtgggctgtgccacccgctgcaacgtgccgcggagcaactgctcctcccgaggggacaccccagtgctagacaaggggcagggggaggtggccaccatcgccaacgggaaggtcaacccgtcccagtccacagaggaggccacagaggccacggagcatcccgtggcgctgctcttcgctgctgacgcttgtctggtcgcctcatcttttgaagcagacgccgatgatgccgatgacgccgccgaactggctgacgatgcggcagccgtttttgaggattctgcgcttgtttccgacgctttcgcgttcgtttcggatgtcttcgctgcggaagcagacctcgctgctgcgctggcctgttcagtggcttcgccagccttcgttgtggctgttgaagcagacgatgcggcgctttctgccgattttccggcggcggtggcactggctgaggcctgcccggcacttgttgacgctgcactggcagacgacccacaaacaccgtctgcacaggcccagttcaaggtcatcaaccggaccggttgccagggtatgggtttgcgcctgaacatcaggaatatccagttggtaatcaaataccttgatattgagtaccggaccaaacagcggttcatcacctgccgctcgcccgctgtcacgggcaatttgttcggcatcgtaacgttgatgacgacgcatttttttcagttgtgcggccagtcgggttgccagttccggcagcgtttcttgcgccgcaatgtgaatacccaacggcaaaacgttgagcacgggtccggtagccgtcagcgccgccgagcccagtcgacgcataaagataaatccggcggcgtagtccatacgattgcacaatcgccccagccacaaggctgccagcgcaagggcccccgaaaagacggcggtgtgggggggacacagaggggaggtcgcatgagtctgctgcaaatcagtggcctgtttgttgtctggctgctctgcacgctgtttattgccacgctgacctggtttgagtttcgccgtgtgcgctttaacttcaatgtcttcttttcattgctgtttttgctcacctttttcttcggcttcccgctgaccagcgtgctggtatttcgctttgatgttggtgtcgcgccgccagaaatcttgttgcaggcgttgctttctgcgggctgcttctacgcggtttactatgtcacctacaaaacccgcctacgcaaacgcgttgctgatgtaccgcgccgtccgctgtttaccatgaaccgcgtggagaccaatcttacgtgggtgatcctgatgggtatcgcgctggtaagcgtcggcatcttcttcatgcacaacggctttttgctgttccggcttaactcctacagtcagatcttttccagtgaagtctccggcgtggcgttaaaacgcttcttttactttttcatgggaccctgtaagtggtccccaaggctcacgaagcatgatccggaacgctacgagtga

SEQ ID NO: 129743 - DNA, 1649 bp, Homo sapiens
atgttcaactgctcagtagccatgtgtggccagaggcggccgtatgggacagtgcagatggtgcatgagggtgttcgggcagtgggaacagccagtacagaggcccagtgggggcacatgcctgctgctacgggaacagtgaggagccccgtgtggctgcagtggagtcagctgacgcaccgcccgaatactgcgattttcgaagggcagctggaactggaaaacggctacatcaaagtacagtcgggtattcatggtaatgccacccagaccagcattcctggcgtctttgccgcaggcgacgtgatggatcacatttatcgccaggccattacttcggccgagttaacccgctggttaaaacagcaaagcgtcatctcccaacgttggctgaatatttctcgtctgctgggctttgtgagcggcatattgatcattgcccaggcctggttcatggcgcgaattctgcaacatatgattatggagaatattccccgtgaagccctgctgcttccctttacgttactggttctgacctttgtactgcgcgcatgggtggtctggttacgcgaacgggtgggttatcacgccgggcagcatatccgctttgccatccgccgtcaggttctcgaccgtctgcaacaagcagggccagcgtggattcagggtaaacctgcggggagctgggcgacgctggtactcgagcaaattgacgatatgcatgattactatgcacgctatctgccgcaaatggcgctggcagtgtcggtgccgttgctgattgtggtggcaatcttcccctctaactgggctgcggcgctcattctgctgggcactgcaccgttaaatccgttggttatggcgctggcattaatgcaggcggatttgcaacaagatctgcgcgtcgatagcggtaaaccactggtctttcatcagctgatacaggtggcggataaccgctggtactggtatcagcgttatcaccatttgctggtcgatggctttagtttcccggccattacccgccagatcgccaatatttactgcacatggctgcgtggcgaaccaacgcctgcttcgccatttacgcctttcgctgatgtagtggaagagtaccagcaataccgcgaaagcgaagcctggcagcgtgatgcggcattctgggcagaacagcgtcgtcaactgccgccgcccgcgtcactttctccggcacctttaccggggcgcagcgcctcggcagatattctgcgcctgaaactggaatttaccgacggggaattccgccagctggctacgcaactttcaggtgtgcagcgtaccgatttagcccttgcgctggcagccttgtggctggggcgattgtgcaatcgtatggactacgccgccggatttatctttatgcgtcgactgggcttgggggggcttgacggttaccggaaccgggcgtcaccgttttgccgatgagtatacacattgcggccaagaaacgctgccggaactggcaacccgactggcagcacaactgaaaaaaatgcgtcgtcatcaacgttacgatgccgaacaaattgtccgtgacagcggacgagcggcaggtgatgaaccgctgtttggcccgtactcaatatcaaggatttgattacaaactggtt

SEQ ID NO: 129744 - DNA, 412 bp, Homo sapiens; identical to SEQ ID NO: 129735

SEQ ID NO: 129745 - DNA, 600 bp, Homo sapiens; identical to SEQ ID NO: 129736

SEQ ID NO: 129746 - DNA, 454 bp, Homo sapiens; identical to SEQ ID NO: 124638
  misc_feature (1)...(454): n = a,t,c or g

SEQ ID NO: 129747 - DNA, 2256 bp, Homo sapiens
atgtcgcctgaagaatggacgtatctagtggttcttcttatctccatccccatcggcttcctctttaagaaagccggtcctgggctgaagagatggggagcagccgctgtgggcctggggctcaccctgttcacctgtggcccccacactttgcattctctggtcaccatcctcgggacctgggccctcattcaggcccagccctgctcctgccacgccctggctctggcctggactttctcctatctcctgttcttccgagccctcagcctcctgggcctgcccactcccacgcccttcaccaatgccgtccagctgctgctgacgctgaaggaaggaaatggcctcaggcttcagcaaggggcccaccctgggctgctgcccgacgtgccctccctgatggagacactcagctacagctactgctacgtgggaatcatgacagcgtattgggagcaaagagaagagataaaggagaagcaggaccggattgagggcttgaagcggcacatcgagaagcaccgctaccacgtgcgcatgctagagaccatcctgcgcatgctggacaatgactccatcctcgttgacgccatccgcaagatcaaggacgacgttgagtactatgttgactcatcccaggaccccgacttcgaggagaacgagtttctctacgatgacctggacctcgaggacattcgtgaggccctggggctgatcgtggcacaggaagtgagggcccagaatgggctgtcacaggcgctggtcgccacctccccccccagccacagccacatggaggatgagatcttcaaccagtccagcagcacgcccacctcaaccacctccagctctcccatcccgcccagcccagccaactgtaccacggaaaactctgaagatgataagaagaggggacgttccacagacagtgaagtcagccaggcaggacttgggaagctgggcaggctggaaatcagtgtgagtgttttaagcatgaaggtgattgaagccatgagggtgagtaaggtcacccaggtccccaagagggcaggagcagtctccagcaaaaacggctccaagcctgtccacagcaaccagcaccctcagtccccagctgtgccgcccacctacctctccggccccccgcctgctgcctctgccttgagcaccactcctggcaacaatgtttccccgcccccgcagcacccccaagtgccctggccccaaggccagtccagctcccagccacaactcgggcacccctgctccctatgcccaggctgtgccccaccagctcccagtgggcccagcacgacccagccccggccccccagcgtccagcctagcggaggcggaggcggcggcagcggaggcggagggagcagcagcagtagtaacagcagtgccggtggaggggctggcaagcagaatggcgccaccagtgagttacagctcagttgtggcagacagcccggcagaggtggctttgagcagcagtgggggcaacaatgccagcagccaggccttgggcccccttccggcccccacaacccacctcccagcacctcctccccaacgcccagcttcagtgatgccaaggcagccggtgccctgctcaatgggcctccacagttcagcaccgccccagaaatcaaggcccctgagcctctgagctccttgaagtccatggcggaacgggcagccatcagctctggcattgaggaccctgtgccaacgctgcacctgaccgagcgagctgtcagaggtgaacataccgctgtcgctgggtgtctgtccactgggccctgtgccctcaccaaggagcagctctatcagcaggccatggaagaggccgcctggcaccacatgcctcacccctctgactctgagcgtattcggcagtacctcccccggaacccctgtccgacgcccccctaccaccaccagatgccacccccacactcggacactgtggaattctaccagcgcctgtcgaccgagacactcttcttcatcttctactatctggagggcactaaggcacagtatctggcagccaaggccctaaagaagcagtcatggcgattccacaccaagtacatgatgtggttccagaggcacgaggagcccaagaccatcactgacgagtttgagcagggcacctacatctactttgactacgagaagtggggccagcggaagaaggaaggcttcacctttgagtaccgctacctggaggaccgggacctccagtga

SEQ ID NO: 129748 - DNA, 1901 bp, Homo sapiens
ccacactttgcattctctggtcaccatcctcgggacctgggccctccattcaggcccagccctgctcctgccacgccctggctctggcctggactttctcctatctcctgttcttccgagccctcagcctcctggcctgcccactcccacgcccttcaccaatgccgtccagctgctgctgacgctgaagctggtgagcctggccagtgaagtccaggacctgcatctggcccagaggaaggaaatggcctcaggcttcagcaaggggcccaccctggggctgctgcccgacgtgccctccctgatggagacactcagctacagctactgctacgtgggaatcatgacaggcccgttcttccgctaccgcacctacctggactggctggagcagcccttccccggggcagtgcccagcctgcggcccctgctgcgccgcgcctggccggccccgctcttcggcctgctgttcctgctctcctctcacctcttcccgctggaggccgtgcgcgaggacgccttctacgcccgcccgctgcccgcccgcctcttctacatgatccccgtcttcttcgccttccgcatgcgcttctacgtggcctggattgccgccgagtgcggctgcattgccgccggctttggggcctaccccgtggccgccaaagcccgggcccggaggcggccccaccctccaatgcccaccccccagcagtccggagaaggcggcttccttggagtatgactatgagaccatccgcaacatcgactgctacagcacagatttctgcgtgcgggtgcgcgatggcatgcggtactggaacatgacggtgcagtggtggctggcgcagtatatctacaagagcgcacctgcccgttcctatgtcctgcggacggcctggaccatgctgctgagcgcctactggcacggcctccacccgggctactacctgagcttcctgaccatcccgctgtgcctggctgccgagggccggctggagtcagccctgcgggggcggctgagcccagggggccagaaggcctgggactgggtgcactggttcctgaagatgcgcgcctatgactacatgtgcatgggcttcgtgctgctctccttggccgacacccttcggtactgggcctccatctacttctgtatccacttcctggccctggcagccctggggctggggctggctttaggtgggggcagccccagccggcggaaggcagcatcccagcccaccagccttgccccggagaagctccgggaggagtaagctgtcacgaccctccctctgccagctggtcccgggaattctgtgaaccaggctgctgtctcctccccagaaagagtccttaccttggagagggtcctggagagaatttcctcttccccagctaaataccctgcctgcaactgaagcagacccgggggtgtcctccctgccctctgcccagaggcacctccactcctacaaaatcaaagtattgtccagacaagagtcactggcccctgctccagcttctgggtatccagagagcactgcacttccccaaaacggaaggggcccctgggcagtgggttttgggcaaattccctttctttgcatccacaatgtgggtcggagcttgggggcaggtcctgggagtgggaagcctcttccttgtgtctttcgctccacttttagctcatcgcaccaatattgcagacttggaaggaagcataacttccatttcacaaaggggaaactgaggtgcgggtgcgggcctggggacggccgtcccatggcttccatctgagccacctcgggaccccagcactcctggcgccctcttcttcatcgcttggcctatgacaggtcaccgtgtgtaaatctttcccaataaagtgttgcacaaaa

SEQ ID NO: 129749 - DNA, 697 bp, Homo sapiens
gctgggactgctcggccgcctcctgcccggcgagcagctcagaccatgtcgcctgaagaatggacgtatctagtggttcttcttatctccatccccatcggcttcctctttaagaaagccggtcctgggctgaagagatggggagcagccgctgtgggcctggggctcaccctgttcacctgtggcccccacactctgcattctctgggcaccatcctcgggacctgggccctcattcaggcccagccctgctcctgccacgccctggctctggcctggactttctcctatctcctgtgattccgagccctcagcctcctgggcctgcccactcccatgcccttcaccaaagccggacagatggctgctgacgctgaagctggtgagcctggccagtgaagtccaggacctgcatctggcccagaggaaggaaatggcctcaggcttcagcaaggggcccaccctggggctgctgcccgacgtgccctccctgatggagacactcagctacagctactgctacgtgggaatcatgacagcgtattgggagcaaagagaagagataaaggaggccagaccaccatcatattcgtgcaggtataagagcgcactgaccgaacccgcggaccaaaaagacgagcggctggcgcggaaccgggaggcagggagcgggaacaggcccaacacacaagggcgg

SEQ ID NO: 129750 - DNA, 612 bp, Homo sapiens
  misc_feature (1)...(612): n = a,t,c or g
cgaaccctngacgcgctgccgccagactactcggtggtgcgcggctgcacaactgacaaatgcaacgcccacctcatgactcatgacgccctccccaacctgagccaagcacccgacccgccgacgctcagcgggctcgagtgctacgcctgtatcggggtccaccaggatgactgcgctatcggcaggtcccgacgagtccagtgtcaccaggaccagaccgcctgcttccagggcaatggcagaatgacagttggcaatttctcagtccctgtgtacatcagaacctgccaccgggccctcctgcaccacctgatgggcaccaccagcccctggacagccatcggacctccaaggggctcctgcttgttgaggggttacctctgcaacaggaaatccatgacccagcccttcaccagtgcttcagccaccacccctccccgagcactacaggtcctggccctgctcctcccagtcctcctgctggtggggctctcagcatagaccgcccctccaggatgctggggacagggctcacacacctcattcttgcttgcttcagcccctatcacataggttcactgggaaaatgattgttaaagtaagaattgc

SEQ ID NO: 129751 - DNA, 707 bp, Homo sapiens
agtcaggtagcacatcacacgcgggaggagctgtaccaggtggaccagctcagcaatggcaaagggggcccccagagtcattctgctctgcctctttggggctgcgctctgcctgacagggtcccgagccctgcagtgctacagctttgagcacacctactttggcccctttgacctcagggccatgaagctgcccagcatctcctgtcctcatgagcgctttgaggctatcctgtctctggacaccgggtatcgcgcgccggtgaccctggcgcggaagggctgctggaccgggcctcctgcgggccaagacgcaatcgaacccggacgcgctgccgcaagactactcggtggtgcgcggctgcacaactgacaaatgcaacgcccacctcatgactcatgacgccctccccaacctgagccaagcacccgacccgccgacgctcagcggcgccgagtgctacgcctgtatcggggtccaccaggatgactgcgctatcggcaggtcccgacgagtccagtgtcaccaggaccagaccgcctgcttccagggcaatggcagaatgacagttggtaaggggctggaagggtggaagggcctgggcaagggatatggaggcagggcagccatgagggtagtgataccagacaggcccaacagggagacatggccctgctctgaggtgggaggcatgaccctggtctga

SEQ ID NO: 129752 - DNA, 1650 bp, Homo sapiens
agatgaaggaagagcaaagggacatcatacatggcagcagacaagagaaaatgagagccaagcgaaaggggaaacaccttataaaaccatcagatttcgtgagacttactatcacaagaacagtatgggggaaaccacccccatgattcaattatctcccaccgggtccctcccacaacacgtgggaattatgggagctacaattcaagataagatttgggtgaggactggacttcctggatttccagggacaccaggtcttcctgtaagtagtggatttccaggcagtcccggttttcctggtttacagggtcctccagtaagttatggtcccactggtataccagggccaattggtcccccaggaccaccaggtttgatggtaagctctggtccaccaggacttccaggacctaaggtaattttgggcttaaatttccagggacccaaaggtgaaaaagtgagtaaaggtcttcagggcccacctgggccacctgggcagatcagtgaacagaaaagaccaattgatgtagagtttcagaaaggagatcaggtgagtaatggtgaccgagggcctcctggacctccagggatacgtggtcctccagtaagtacaggtggtgagaaaggtgagaagggtgagcaaggagagccaggcaaaagagtaagtgaaggcaaagatggagaaaatggccaaccaggaattcctgtaagtagtggtgatcctggttaccctggtgaacccggaagggatggtgaaaaggtaagaatgttatgggtcctcctggccctcctggatttcctggagaaaggggtcagaaaggtgatgaaggaccacctggaatttccattcctggacctcctggacttgacggacagcctggggctcctgggcttccagggcctcctggccctgctggccctcacattcctcctagtaagctaggtgacacttgcttcaactgcattggaactggtatttcagggcctccaggtcaacctggtttgccaggtctcccaggtcctccaggtaaattaaggagctccaggtgctccaggctttcctggatctaaaggtgaacctggtgatatcctcacttttccaggaatgaagggtgacaaaggagagttgggttcccctggagctccagggcttcctggtttacctggcactcctggacaggatggattgccagggcttcctggcccgaaaggagagcctgtgagttgtacttttaagggtgaaagaggtccccctgggaacccaggtttaccaggcctcccagggaatatagggcctatgggtccccctggtttcggccctccaggcccagtaggtgaaaaaggcatacaaggtgtggcaggaaatccaggccagccaggaataccaggtaagtttggggatccaggtcagactataacccagccggggaagcctggcttgcctggtaacccaggcagagatggtgatgtaggtcttccaggtatgtgaggacttccagggcaaccaggcttgccagggatacctggtagcaaaggagaaccaggtatccctggaattgggcttcctggaccacctggtcccaaaggtatgttgctcacaaatggcaagagcacacagtggtctgaggacagttcttaaatatatct

SEQ ID NO: 129753 - DNA, 495 bp, Homo sapiens
ttaagatgatgtagataaattacaagatgccgaggaggaccgacgctctttcagaaggcgcctctccaagcctttctccacttcaactaaagaacgtgtttcaatgagtctgcgatctcggtggcctcttattactgtcatctcattcatatccaaatcaggaaaccagagaaagttctgaaatgaggggccggcgttcttattaacgccagccatggcaggcactggaaggaggtgcggactaggggctttttccacttgagccaggtgccaacgggatatgagggtgcagggcagaataagagcccagcgttggcttcctggaagacccaaattcactggcgagagcttcatcagatgaccaccgagagtggcaaaagagtctgggcagctgatttggtttggctgtgtccccacccaaatctcgtcttgaattgtagctcccataattcccacgggttgtgggagggtcccagtgggagataattgaatcat

SEQ ID NO: 129754 - DNA, 6691 bp, Homo sapiens
aggggggaaggaagagtagctccttcttcttcttcttttttttttcttccactcttaaaaagcttctttctcttcacccaagcctcactgtccctctccggctctagctctctccatataaaccctcaagattatgtcaattggttagagccagccgggaatttcgtgcgggtgctgaaggagctgcgggagccggagaagaatgaaactgcgtggagtcagcctggctgccggcttgttcttactggccctgagtctttgggggcagcctgcagaggctgcggcttgctatgggtgttctccaggatcaaagtgtgactgcagtggcataaaaggggaaaagggagagagagggtttccaggtttggaaggacacccaggattgcctggatttccaggtccagaagggcctccggggcctcggggacaaaagggtgatgatggaattccagggccaccaggaccaaaaggaatcagaggtcctcctggacttcctggatttccagggacaccaggtcttcctggaatgccaggccacgatggggccccaggacctcaaggtattcccggatgcaatggaaccaagggagaacgtggatttccaggcagtcccggttttcctggtttacagggtcctccaggaccccctgggatcccaggtatgaagggtgaaccaggtagtataattatgtcatcactgccaggaccaaagggtaatccaggatatccaggtcctcctggaatacaaggcctacctggtcccactggtataccagggccaattggtcccccaggaccaccaggtttgatgggccctcctggtccaccaggacttccaggacctaaggggaatatgggcttaaatttccagggacccaaaggtgaaaaaggtgagcaaggtcttcagggcccacctgggccacctgggcagatcagtgaacagaaaagaccaattgatgtagagtttcagaaaggagatcagggacttcctggtgaccgagggcctcctggacctccagggatacgtggtcctccaggtcccccaggtggtgagaaaggtgagaagggtgagcaaggagagccaggcaaaagaggtaaaccaggcaaagatggagaaaatggccaaccaggaattcctggtttgcctggtgatcctggttaccctggtgaacccggaagggatggtgaaaagggccaaaaaggtgacactggcccacctggacctcctggacttgtaattcctagacctgggactggtataactataggagaaaaaggaaacattgggttgcctgggttgcctggagaaaaaggagagcgaggatttcctggaatacagggtccacctggccttcctggacctccaggggctgcagttatgggtcctcctggccctcctggatttcctggagaaaggggtcagaaaggtgatgaaggaccacctggaatttccattcctggacctcctggacttgacggacagcctggggctcctgggcttccagggcctcctggccctgctggccctcacattcctcctagtgatgagatatgtgaaccaggccctccaggccccccaggatctccaggtgataaaggactccaaggagaacaaggagtgaaaggtgacaaaggtgacacttgcttcaactgcattggaactggtatttcagggcctccaggtcaacctggtttgccaggtctcccaggtcctccaggatctcttggtttccctggacagaaaggggaaaaaggacaagctggtgcaactggtcccaaaggattaccaggcattccaggagctccaggtgctccaggctttcctggatctaaaggtgaacctggtgatatcctcacttttccaggaatgaagggtgacaaaggagagttgggttcccctggagctccagggcttcctggtttacctggcactcctggacaggatggattgccagggcttcctggcccgaaaggagagcctggtggaattacttttaagggtgaaagaggtccccctgggaacccaggtttaccaggcctcccagggaatatagggcctatgggtccccctggtttcggccctccagggcccagtaggtgaaaaaggcatacaaggtgtggcaggaaatccaggccagccaggaataccaggtcctaaaggggatccaggtcagactataacccagccggggaagcctggcttccgtggtaacccaggcagagatggtgatgtaggtcttccaggtgaccctggacttccagggcaaccaggcttgccagggatacctggtagcaaaggagaaccaggtatccctggaattgggcttcctggaccacctggtcccaaaggctttcctggaattccaggacctccaggagcacctgggacacctggaagaattggtctagaaggccctcctgggccacccggctttccaggaccaaagggtgaaccaggatttgcattacctgggccacctgggccaccaggacttccaggtttcaaaggagcacttggtccaaaaggtgatcgtggtttcccaggacctccgggtcctccaggacgcactggcttagatgggctccctggaccaaaaggtgatgttggaccaaatggacaacctggaccaatgggacctcctgggctgccaggaataggtgttcagggaccaccaggaccaccagggattcctgggccaataggtcaacctggtttacatggaataccaggagagaagggggatccaggacctcctggacttgatgttccaggacccccaggtgaaagaggcagtccagggatccccggagcacctggtcctataggacctccaggatcaccagggcttccaggaaaagcaggtcggtctggatttccaggtaccaaaggtgaaatgggtatgatgggacctccaggcccaccaggacctttgggaattcctggcaggagtggtgtacctggtcttaaaggtgatgatggcttgcagggtcagccaggacttcctggccctacaggagaaaaaggtagtaaaggagagcctggccttccaggccctcctggaccaatggatccaaatcttctgggctcaaaaggagagaagggggaacctggcttaccaggtatacctggagtttcagggccaaaaggttatcagggtttgcctggagacccagggcaacctggactgagtggacaacctggattaccaggaccaccaggtcccaaaggtaaccctggtctccctggacagccaggtcttataggacctcctggacttaaaggaaccatcggtgatatgggttttccagggcctcagggtgtggaagggcctcctggaccttctggagttcctggacaacctggctccccaggattacctggacagaaaggcgacaaaggtgatcctggtatttcaagcattggtcttccaggtcttcctggtccaaagggtgagcctggtctgcctggatacccagggaaccctggtatcaaaggttctgtgggagatcctggtttgcccggattaccaggaacccctggagcaaaaggacaaccaggccttcctggattcccaggaaccccaggccctcctggaccaaaaggtattagtggccctcctgggaaccccggccttccaggagaacctggtcctgtaggtggtggaggtcatcctgggcaaccagggcctccaggcgaaaaaggcaaacccggtcaagatggtattcctggaccagctggacagaagggtgaaccaggtcaaccaggctttggaaacccaggaccccctggacttccaggactttctggccaaaagggtgatggaggattacctgggattccaggaaatcctggccttccaggtccaaagggcgaaccaggctttcacggtttccctggtgtgcagggtcccccaggccctcctggttctccgggtccagctctggaaggacctaaaggcaaccctgggccccaaggtcctcctgggagaccaggtctaccaggtccagaaggtcctccaggtctccctggaaatggaggtattaaaggagagaagggaaatccaggccaacctgggctacctggcttgcctggtttgaaaggagatcaaggaccaccaggactccagggtaatcctggccggccgggtctcaatggaatgaaaggagatcctggtctccctggtgttccaggattcccaggcatgaaaggacccagtggagtacctggatcagctggccctgagggggaaccgggacttattggtcctccaggccctcctggattacctggtccttcaggacagagtatcataattaaaggagatgctggtcctccaggaatccctggccagcctgggctaaagggtctaccaggaccccaaggacctcaaggcttaccaggtccaactggccctccaggagatcctggacgcaatggactccctggctttgatggtgcaggagggcgcaaaggagacccaggtctgccaggacagccaggtacccgtggtttggatggtccccctggtccagatggattgcaaggtcccccaggtccccctggaacctcctctgttgcacatggatttcttattacacgccacagccagacaacggatgcaccacaatgcccacagggaacacttcaggtctatgaaggcttttctctcctgtatgtacaaggaaataaaagagcccacggtcaagacttggggacggctggcagctgccttcgtcgctttagtaccatgcctttcatgttctgcaacatcaataatgtttgcaactttgcttcaagaaatgactattcttactggctctctaccccagagcccatgccaatgagcatgcaacccctaaagggccagagcatccagccattcattagtcgatgtgcagtatgtgaagctccagctgtggtgatcgcagttcacagtcagacgatccagattccccattgtcctcagggatgggattctctgtggattggttattccttcatgatgcatacaagtgcaggggcagaaggctcaggtcaagccctagcctcccctggttcctgcttggaagagtttcgttcagctcccttcatcgaatgtcatgggaggggtacctgtaactactatgccaactcctacagcttttggctggcaactgtagatgtgtcagacatgttcagtaaacctcagtcagaaacgctgaaagcaggagacttgaggacacgaattagccgatgtcaagtgtgcatgaagaggacataacattttgaagaattccttttgtgttttaaaatgtgatatatatatatataaaattcctaggatgcagtgtctcattgtccccaactttactactgctgccgtcaatggtgctactatatatgatcaagataacatgctgactagtaaccatgaagattcagatgtacctcagcaatgcgccagagcaaagtctctattatttttctactaaagaaataaggaagtgaatttactttttgggtccagaatgactttctccaagaattataagatgaaaattatatattttgcccagttactaaaatggtacattaaaaattcaattaagagaagagtcacattgagtaaaataaaagactgcagtttgtgggaagaattatttttcacggtgctactaatcctgctgtatcccgggtttttaatataaaggtgttaagcttattttgctttgtaagtaaagaatgtgtatattgtgaacagccttttagctcaaaatgttgagtcatttacatatgacatagcatgaatcactctttacagaaaatgtaggaaaccctagaatacagacagcaatattttatattcatgtttatcaaagtgagaggacttatattcctacatcaagttactactgagagtaaatttattttgagttttatcccgtaagttctgttttgattttttttaaaaaacaaacccttttagtcactttaatcagaattttaaatgttcatgttacataccaaattataatatctaatggagcaatttgtcttttgctatattctccaagattatctcttaagaccatatgccccctgttttaatgtttcttacatcttgtttttactcatttctgactggacaaagttcttccaaacaattctgagaaacaaaaacacacacgcagaattaacaattcttttccctgtgcttcttatgtaagaatcctcctgtggcctctgcttgtacagaactgggaaacaacacttggttagtctcttttaagttacaaaaagccaattgatgtttcttattctttttaaattttaaatattttgttataaatactcacaggataccttatttccctagctatcatctcctgacttaatgttttttaaacccaccaatataaatttaattaaagatatatgttgtaaggatggtctgttgtgtatctcttcagcctgtgtggaaaaaacccctgctcatttacagatgattaccaatctgcacatcaacaagtatctcttcccagggaatcagtttctccacgctttgatcactctgttagtagatagaaaacatatagtaatgtaaactttttccaatgaagaaaactacctattggaagacatttccaagataataaatttcttgacaacattgtgttaatggctaagaaaggaaacaactggcttctattt

SEQ ID NO: 129755 - DNA, 623 bp, Homo sapiens
atggcagaagatgaaggaagagcaaagggacatcatacatggcagcagacaagagaaaatgagagccaagcgaaaggggaaacaccttataaaaccatcagatttcgtgagacttactatcacaagaacagtatgggggaaaccacccccatgattcaattatctcccaccgggtccctcccacaacacgtgggaattatgggagctacaattcaagataagatttggggtcctcctggacttcctggatttccagggacaccaggtcttcctggagaacgtggatttccaggcagtcccggttttcctggtttacagggtcctccaggcctacctggtcccactggtataccagggccaattggtcccccaggaccaccaggtttgatgggccctcctggtccaccaggacttccaggacctaaggggaatatgggcttaaatttccagggacccaaaggtgaaaaaggtgagcaaggtcttcagggcccacctgggccacctgggcagatcagtgaacagaaaagaccaattgatgtagagtttcagaaaggagatcaggtgagtaatggtgaccgagggcctcctggacctccagggatacgtggtcctccagtaagtac

SEQ ID NO: 129756 - DNA, 687 bp, Homo sapiens
gcccgttccagtagaaaagacagctttgctcctttgaaagcgcagaccgccgcacctccagccccttctccccggggaagtaggccccgctaagaatgtgggaaggtggtggggcggcgactgaagtcgcttccgattggcgttgtcccaaggaagcctgcgcggagttgatcggcggcaggcttcccaataagagcctgctaaggggaattggctgctacgcggctggggcccttgtttccggttacctaggcgggcagccatggtgaccggcgagcggcatgcgacgccgcctctgtggcctgtggaggcccgcttggcggcgctgcttcccgacctactggtctttcggaagcctcggggatgggaacccgagctcgccacggcccagggcgtcctcctaggcgtccatgtgacgggtgagggcgacggccggcacttgcacttaagtctcctggcctgcgggagaggcggccgttgggtctaacatatcttcagttattacattagtgacatcgtggagcgtgagtgatcattgtagggtaacaaggtgtggtgctgggctcctgggggtttataaaagaagggggccgggcaggttgtagtgatgtccagttagctcagcgtttggctcaggcgaatgaaattgtcctatcctggaactgctggatgctttgcaagcagtat

SEQ ID NO: 129757 - DNA, 570 bp, Homo sapiens
tagtagtttctaagttacaccatgttaatggataaaggaattactcagcttgaagggatctgtttcctttacactgccctgatgtgtggggagaaagggcccaaaaagtttaggattgggagttaacaccgtaaattcctgctttgttgggtccagggtttaaccagcattaaatggacaggttcacccctgaccctacaagtcggaacgtgacatggacaaactggccccatatccttcagttattacattagtgacatccgtggagcgtgagtgatcattgtagggtaacaaggtgtggtgctgggccccctgggggtttataaaagaagggggccagaagtactttaaaacaggtaccaaagggtcattcctttagcatcattcatctttggtttcttcaagttgccactgaaaagctagacctttgcctattatctgctaatctacccagtctcacattctattgactcattgttcaaaggggggggcaggaggagctaatttcctttgcacatttgtattttatttcaaaataaagtattctcttctaacaaaaaaaaaaaaaaa

SEQ ID NO: 129758 - DNA, 390 bp, Homo sapiens
cgcttccgcaaagctcagtgtaccattgtggagcgcctcactaactccatgatgatgcacggccgcaacaacggcaagaagctcatgactgtgcgcatcgtcaagcatgccttcgagatcatacacctgctcacaggcgagaaccctctgcaggtcctggtgaacgccatcatcaacatgtgtcccccctgcgccgtgtgaaccatgccatctggctgctgtgcacaggcgctcgtgaggctgccttccggaacattaagaccattgctgagtgcctggcagatgagctcatcaatgctgccaagggctcctcgaactcctatgccattaagaacaaggacgagctggagcgtgtggccaagtccaaccgatgattttcccagctgctgc

SEQ ID NO: 129759 - DNA, 892 bp, Homo sapiens
acaggctttccttcccataactccagaccagctgagcaattataaggtgtttgcaaagaagacagctctatggcaaaatgacgatgttcattcccagcacaaaggagagtacaggaatgcagcaggtgagcccaaatataggaactctgtcactactcactcagaagggaaatggcagtcagagaaaggaaaagatctgggggtagggtactggtccatggcctgttacaaactgggccacatagcagggaatgagcagcagaaacatatttgtggaggtatagccaaaaagtggaaacaacccaaatgtccaccaactggcaaatggccagctgtggtcaaaccagcaacagaaagtgagggtgggggagcaaagaaggaagagaaagcacatcttccaagagtagttgagaaagagctgcacgagtcaagccgacacataaggcatagcatcgaaagtgttttattacaggcatttacacagaaggattacactgcagtgaaggagaagtatgccaagtacctgcctcacagtgcagagcggtatgccgccaaacgcttccgcaaagctcagtgccccatcgtggagtgcctcacttactccatgatgacgcacggccgcaacaaccgcaagaagctcatgatcatgcgcatcgtcaagcacgccttcgagatcatccagctgctcacaggcgacaaccctctgcaggtcctggtgaacgccatcatcaacagtggtccccgggaggactccacactcactgggcgagccaggatcgtgagacgacaggctgtggccgtgtccccattaagccgtgtgaatcaggccatctggccgcagtgcacaggagctcttgagcgctgccttccggaacatcaagaccattgctga

SEQ ID NO: 129760 - DNA, 563 bp, Homo sapiens
gatgtgcagatcaatgacatttccctgcaggattacattgcagtgaaggagaagtatgccaagtacctgcctcacagtgcagggcggtatgccgccaaacgcttccgcaaagctcagtgtcccattgtggagcgcctcactaactccatgatgatgcacggccgcaacaacggcaagaagctcatgactgtgcgcatcgtcaagcatgccttcgagatcatacacctgctcacaggcgagaaccctctgcaggtcctggtgaacgccatcatcaacagtggtccccgggaggactccacacgcattgggcgcgccgggactgtgagacgacaggctgtggatgtgtcccccctgcgccgtgtgaaccaggccatctggctgctgtgcacaggcgctcgtgaggctgccttccggaacattaagaccattgctgagtgcctggcagatgagctcatcaatgctgccaagggctcctcgaactcctatgccattaagaagaaggacgagctggagcgtgtggccaagtccaaccgctgattttcccagctgctgcccaatatacg

SEQ ID NO: 129761 - DNA, 437 bp, Homo sapiens
caagtgactccaaggagcatctgtagaaaagaagatggcccaggtcctgcacgtgcctgctcccttcacagggacccctggcccagcctccccacctgccttccctgccaaggaccccgatccaccctactccgtggagaccccctatggctaccgcctggacctggacttcctcaagtacgtggatgacatcgagaagggccacacgctgcgacgcgtggcagtgcagcgccgcccccgcctgagctcgctgccccgtggccctggctcctggtggacgtccactgagtcgctgtgctccaatgccagtggggacagccgccactcagcctattcctactgcggccgtggcttctaccctcagtatggtgctctggagacccgcggtggcttcaatccgcgggtggagcgcacgctgctggatgcccgtcgccgtc

SEQ ID NO: 129762 - DNA, 1058 bp, Homo sapiens
tgttccagggcgacccacgcgtgcgaacaaggagacgtcgctcagggagttgtttcctggtggatttaagaagccaaagccaggcacctagttccgtgaaagtccatacctgtgattaagaggtggtcctgtacccatcccatgtggggtgtaagggtcagtggtacaagtcaaattggttatatcctagctgtcccacagggaggtggtcacccagaatgcagtcgtgtaagaaatatatgtgagttgaccacatggaggaaatgggaggaggtggagaactagaaactctgttgagtttgaataaagttttcttccgttatgagaaagttaaatccttaaagaaaatgcatgctaaggaccccgatccaccctactccgtggagaccccctatggctaccgcctggacctggacttcctcaagtacgtggatgacatcgagaagggccacacgctgcgacgcgtggcagtgcagcgccgcccccgcctgagctcgctgccccgtggccctggctcctggtggacgtccactgagtcgctgtgctccaatgccaggacctgcgagcagcagctcgacttacaggcgcacaccacggaccgcctggcaacgggcgtcttcccagacgctggcgtcactgtagaccaggagcccctggtggcctgtccaggcataacagaaggctacacttgtcttctggtcacacctcactatgtcccctcagctcctatctctctgacagacacccacagacgtgtctgtagcatcctctgtcacactgggacccgtactggcagcaagagccgtagggaggactgggacacctggaagccaggaattgacaaacttgtgtcatggactctagaggatctccgagtagcgagtcaagtgtatcagctgggtagtgaccaaatcacaaaggacgcaagaaatcggcgattatgccgatcccaaggaagtcagcaaatacaggaccgggagagcgccgagaacctcattacgatattgaagagctacgccctcaccataaaagcagacgcggaaacatctttaatgtga

SEQ ID NO: 129763 - DNA, 1818 bp, Homo sapiens
ctagtctttttccggcgttttggggattgtttggtggctcatggcacttttttcccttgtcccatgcgctggtgtgtacgtgttccgttccccctgtattggtcccgtggtttttgtcccttgttggaaccggttggatgggcttgtcgtcctttttccaaacctgtcgcagttatgcctccagttcctgatataaagggctgtaaacagacgcttgatataaggggcttgtaaaaggcgcttgatataaggggcttgctgcacataccacacccctccatgacacttggttgtgggggacgagtcgccgggcgcggtgtcgacgtgcggtggtgcgctggctggatcgatgcgtacgctgcgtgggtggcgcgccatggccgttgttcgatgcccggtgggtcgcgtgtgctgatatacgtaacacggccggtaatggtcattccactggcacgctttttgtttagtattacccttatttgcgtggtgttttgttgttttacatttttgtggtactccttttactttgtgcccgcgtttaccgtcgtcattactgttccgaacattgctatgactgccgtcgtcgaacacacgcaatgtcccgttaactgcccttatccctgccaagggcagcaaggcctgcagttgctccacacctccctcctcgggaaccggggccagctctgcctctgcctccacctcagcctccccgtcccccttccctgcctggttcagctcagggttgcaatagttgacgtactggtacagcggccgcaggcgctgggcctttcgctccagcctcaatgtctctaagggtgcagacaccatgctggccacagcgtggagcacgggagcccccaggctcttgcgcttcttggcttttttgtgctgtttggcagatggtgagggctcactctggctgtcctctggctcctcctcctgcagcggcagcttgggtggcagctcagcttcagccttaagatgggcacgaaggcccgggaggctgagagacttgtaagttttgcggttgcgtccgacccccacgccaccattgccgacatggtgctgcacagtgcgaccacgacgaccggtgctaccgttttgcttaataatgcgacggcgtacggcaggaccgccctgtgcacctattgcggctgcgcctactacaccgtcgagtttgcgaagaggtaaagtgccaacagggagaccgccggtgctttgagggtgagccgcggtaatgctaacaatggcagttacaattacacgtacagttacaactagttgtaatgcagcggcggtaatgccccctaagacggggacggcacatagggcgcccttaactccgggcacggtttgacgagacttgtgtttagttaaacctacggcccaaatgccaccaagtgcacccccttggaccgcgccaccgcgtgtagcggtagccccggtaattgttttgccggcgattagcaacctgggggcgtttgcgtagatgcctgttgcttgggggggtgggcggggttgggggcgctgggtacccagagtgcgccgcccatggcgacatcgacacatacatagtcgaaaacgccggcggttccgccgcccatactcgatgccgccaggtctcttgtgcttggtgacggctaggagatgcggagatacggtgtagggcaggcagccgactatgggagggacaaacggaagatgcggaccacttaagcttttgatacgtgaaaaaatttgtttgaatggggatataaccgatttgaggtgcccgatgtccgtattgcgcaatccgcgctggtgcccgtgcgcgttcat

SEQ ID NO: 129764 - DNA, 551 bp, Homo sapiens
tttttgaaaaagaaaaatatttattttcagcaagaccaaagtcccaagtgggggcaggtgccaaatttgcccccgccaccagagggcctaggcccacaggaagcctgaagccaaattcaggcgtggaaggaggggagccaccagtggggcgggacaagtcacctggttctgagggagagagcggggggacaaaggtggagcagtgcagacacttcaggatcttgtgaatgtccacctggggttgacttatccacctcggccttgtggtcactcacccccaagctgggcaagcccccaggctcctctccagcctcctctccgaggggagccagggcatgggtgggggtcactagtggactgggacagggcaaaagcgaaggcctgggcccagctcacctgccaagggcagcaaggcctgcagttgctccacacctccctcctcgggaaccggggccagctctgcctctgcctccacctcagcctccccgtcccccttccctgcctggttcagctcagggttgcaatagttgacgtactggtacagcggccgc

SEQ ID NO: 129765 - DNA, 227 bp, Homo sapiens
atgcagtccatgactaagatgtactgtggacccctggaccagcctgctagcccatgctccaatgttgatgacatcgaagtaaaactggaaataatgttattaacagaaagggatgatgggaaagaggtgttggatgttggagaggagagaagatatgaaatagaagaatatgacagcaaatggactagaaaatataattgcctagctgtcttaagggtccattcagg

SEQ ID NO: 129766 - DNA, 501 bp, Homo sapiens
gaatgggggaccccacgagggccatagtttcctcccctcagaatggccagccaccgaagaaggaaaaatacttatgcctgcagctaaccaatggaaattacttaaaacccttcaccatatctttctcttaggcattaatagcacccatcagatggtcaaattattatttactagaccaggccttttcaaaactatcaagcagatagtcaaggcctgtgaagtgtgccaaagaaataatcccctgcactgcagcccatacatttcaatccctttatctttaacctccttgttaagtttgtctcttccagaatcaaagctgtaaaactacaaatagttcttcaaatggagccccagatgcagtccatgactaagatctaccatggacccctggaccggcctgctagcccatgctccgatgttgatgacatcgaaggcacccctcccgaggaaatctcaactgcacaacccctactacgccccaattcagcaggaagcagttag

SEQ ID NO: 129767 - DNA, 1017 bp, Homo sapiens
atgcctggccaagacaacatttttcaggaagttctggttgatggggcacccgttcaagagctgcagagaacaagtttgccaagtgcctcagacctgtctcaaatgctgcttctggtgcctggagaagttcatcaaattcttaataggaatgcctacatcatggaatcctggctttcttcttcttcacccaccgtatcacgatcgtgcagatacagcaccagccctcaattattactggggtcctatactggtatggactctggggagagatgggggttcgggaagcacgaggtgtcggacttgctggtgcagtatctgcttgtgagagttgccgcccaagttcttgatgaatttttgctttgtgaggtgtgccccccagcatcgggtgtcgtcaatcagcaggatagtagccggttcctgattactcatgggtatctcttggacgtctgtgaaagttttttcgggaataaaggtgaccaccacttcgtgccacctgattcacgacggcggacgcggcaatcgcctcgtaaactttcgcacgatcgcgcattattatcatgccgtagtgattgctgcggatggcatttcaggcacgccgcagccgttatcctggacggtcagtttgacctgatttcgttttgcgccaccgtcaccacgacttcactcgcttgcgaatgtttgaggcgttacttaatgcctcacgggcaatttgcaacaagtggattgcctgagcgaaggcaccaggcgaggcggcaattgataatccagcttcaccgggaaccaaatttggcgctgtactcttcgcaactcgcctccagcgccggacgtatccaggctcgtgcacccgcagagaatcggaacaaggtgttttcacgggaggagcccaccattgctatgccgccacaaagtaacgtggtgtcgccatggaatggtagcatagaagccgaatggagtattatagttatgccgatcgtcgattcatggcagcgtgatgtactgtatgaaggaggaatttga

SEQ ID NO: 129768 - DNA, 967 bp, Homo sapiens
ttacgccagaccaataaagaacccggcaatagtcgcactcatcaggttggaaagcgttgctgctgccagcgcccgtaaaccaagctgggcgatttccggcgcgcgttttggcgaaatagccgaaaatgcgccaacgacaacaccgatagaaccaaagttagcaaaaccacaaagcgcaaaggagataatcgcaatggttttcacttccagcgtgccgcccgtttgcaggtatggggagaaactcaggtaagcgacgaattcgttattcgccagtttctgcccaatcaggctacccgcaagattggcatcactccagtccacacccatgatccacgccagcggtgccagcacatagccaaaaatactttccagagaggcattggcgaaaccaaaccagccgccaattccgccgataatgccgttgatcagcgcaataattgcgacaaacgccattaccaccgtcgccacaccagcggcgatttttagcccggtcatcgcaccgctcgccgccgcttcgataaagctttttggcggcgtttcgctggaacgacagattttcaaatgtgacctgcgaaggctcggttgccgggctaagaatacgtgcaaacaaaatcccgcccagggatcgccatcagcgatgccgctaacaggtagtcaattggtacgcccattccggcataaccaattcatcatcgaaccagcaatggacgccatcccggtaccaaattgcggtaaacaactcgttgcgattcatgcgatcgataaacggtttaacgatcgccgggatctcattttgcccgaggaaaatagtagtaaccgcaacaaaagattcgattttgctgatgttgagggctttctggaaaatgctgccaaggatgcgaatcagcagccccatcacgccaatgtagtacagcagactgatgagcgcagtaacgaaaataatcgccggaagtggggatcctctaga

SEQ ID NO: 129769 - DNA, 843 bp, Homo sapiens
ctgctgtcttcctgtccacttccaacgaagcggtctataagatctttgatgacagcccctgcccatttactgcgaaaacctgcaacccagagaccttcccctcctccaatgagtcccgccaatgccccaatgcccgttgccagttcgccttctacggtggtgagtcgggctaccaccgggccctgctgggcctgcagatcttcaatgccttcatgttcttctggttggccaacttcgtgctggcgctgggccaggtcacgctggccggggcctttgcctcctactactgggccctgcgcaagccggacgacctgccggccttcccgctcttctctgcctttggccgggcgctcaggtaccacacaggctccctggcctttggagcgctcatcctggccattgtgcagatcatccgtgtgatactcgagtacctggatcagcggctgaaagctgcagagaacaagttttcttatgtgcctcatgacctgtctcaaatgctgcttctggtgcctggagaagttcatcaaattccttaataggaatgcctacatcatgattgccatctacggcaccaatttctgcacctcggccaggaaatgcctgcttcctgctcatgagaaacatcatcagagtggatgtcctggataaaattactgacttcctcttcctgtagggcaaacttctgatcgttggtattgtggggatcctggctttcttcttcttcacccaccggatcaggatcgtgcaggatacatcaccacccctcaattattactgggttcctatactgacggtgatcgttggctcctacttgattgcccacgggttttttcagcgctattg

SEQ ID NO: 129770 - DNA, 1792 bp, Homo sapiens
tttcgtgggatgggggacgagcggccccactactacgggaaacacggaacgccacagaagtatgatcccactttcaaaggacccatttacaataggggctgcacggatatcatatgctgtgtgttcctgctcctggccattgtgggctacgtggctgtaggcatcatagcctggactcatggagaccctcgaaaggtgatctaccccactgatagccggggcgagttctgcgggcagaagggcacaaaaaacgagaacaaaccctatctgttttatttcaacattgtgaaatgtgccagccccctggttcttgctggaattccaatgtcccactccccagatctgcgtggaaaaatgccccgaccgctacctcacgtacctgaatgctcgcagctcccgggactttgagtactataagcagttctgtgttcctggggttcaagaacaataaagaaagccaatggagtcctagaggcgggcaactcgccatgcgcatatttgaagattacaccgtctcttggtactgattatcatggctgtgggatacgtcatgtgctccttgctcacccactggtcaccttcttcttgctgtgcctctgcatcgcctactgggcagcactgctgtgtatctgcccccagacactgatctctgaccccagggatgctaaagaccaactttgcctagaagtgacctgcagcttagggatagggcggaaactgaccttcccctcctccaatgagcccgccaatgccccaatgcccgttgccagttcgccttctacggtggtgatcgggctaccaccgggccctgctgggcctgcagatcttcaatgccttcagttcttctggttggccaacttcgtgctggcgctgggccagtgcagagaacaagtttgccaagtgcctcatgacctgtctcaaatgctgctctggtgcctggagaagttcatcaaattccttaataggaatgcctacatatgggatcctggctttcttctcttcacccaccgtatcaggatcgtgcaggatacagcaccacccctcaatattactgggttcctatactgccggtaccatgggcctgcccgctggatgcccccagctgggcccagggtgcccctgagctggagcaggaacgccggcaccggcaattgtgtcctggttcgccgaccacccccgggccccctttggcctacaccgctggtggagcttgggcagagctcaggcaagaaggcaggtgagggctgctgcagggatccgggagttgctgggtacccgcaggcactcaggccttccctcctgcccccggaaagccgtggagagctgctccgacgtcacccgcctggtggtgtacgttctcaggactgcacaggtagagaaactgaggccaagagggagactggcctgaagtcacacagggaggaggacagaggagttggagcttgaactggatgtgggccctctagatccacacatatggcggctttggtgggaagcgaaacgccgccaaaagctttatcgaagcggcggcgagcggtgcgatgaccgggctaaaaatcgcgctggtgtggcgacggtggtaatggcgtttgtcgcaattattgcgctgacaacggcattatcggcggaattggcggctggtttggtttcgccaatgccctctgcaaagtatttttggctatgtgctggcaccgctggcgtggatcatggtgtggactggagtgatgccaatcttgcgggtagcctgattgggcagaactggcgattaacgacatgcaggcatccaagataa

SEQ ID NO: 129771 - DNA, 1668 bp, Homo sapiens; identical to SEQ ID NO: 123516

SEQ ID NO: 129772 - DNA, 3910 bp, Homo sapiens
ggtcgacgcagcagaagacggctcgaagcaacatggacaacatgttcgagagctacatcaacaaccttaggcggcacgtggagactctgggccaggagaagctgaagctggaggcggagcttgcgcaacatgcaggggctggtggaggacttcaagaacaagtatgaggatgagatcaataagcgtacagagatggagaacgaatttgtcctcatcaagaaggattgtggatgaagcttacattaacaaggtagagctggagtctcgcctggaagggctgactgatgagatcaacttcctcaggcagctgtatgaagaggagatccgggagctgcagtcctggatctcagacacatctgtggtgctgtccatggacaacagccgctccctggacatgaacagcgtcatcgctgaggtcaaggcacagtacgaggagatcgccaaccgcagccaggccgaggctgagagcatgtaccagatcaaggatgaggagctgcagagtctggctgggaagcatggggataacctgcggtgcacaaagacttgagatctcttgagatgaacccggaacatcagccggctccaggctgagattgagggcctcaaaggccagagggctttcctggaggccgccattgcagatgccgagcagtgtggagagctggccattaaggatgctaacgccaagttgtcgagctggaggccgccctgcagcgggccaagcaggacatggcgtggcagctgcgagctgatgaacgtcaggctggccctggacatcgagatcgccacctacaagaagctgctggagggcgaggagagccggctggagtctgggatgcagaacatgagtattcatacgaagaccaccagcggctatgcaagtggtctgagctcggcctgtgggggcctcacaagccccggcctcagctacggcctgggcgccagctccttcagccgcaccagctactccagggccgtggttgtgaagatcgagacacgtgatgggaagctggtgtccgagtcctctgacgtcctgcccaaggacattgtggctgtgctgaatgaagagggaggctaccatcagattggaccagcagaatactgtactgactcctttattatgtcagtgaccatagcatttgctacccagttggaacagattcacctctgctgtggagaccagtcacttggaagtacagaaatacctttaactggattacttaaaaagggcagtacagaaatcaaccagcacccagtcacagtcgaaggtgcttttacccttgaccctccaaacagagccaaacagaagcttgcacctattcctgtggagctagccccaacttctttaattgaattaaagacccagaatgaacatgagccagagcattcaaagaagaaagttttaacccccataaaggagaagacacttactgggccaaaatcaccaacagtgtcccctgttccatctcacaaccagtcacctccaacaaaagatgatgcaacagaaagtgaagtggaaagtttacagtatgataaggacaccaaaccaaatccaaaagccagttcttctgtacctgcttcactggcccagctagtgactacatccaatgcttcagaagtagcttcaggacagaagattgctgtaccagcaacatcacatcatttttgcttttcaatagacttaaggagtatacatgccttggagattggttttccaatcaactgtatattaaggtactcatatccattctttggaagtgcagctcctattatgactaatcctcctgtagaagttcggaaaaacatggaagtttttcttccccagtcttactgtgcatttgattttgcaactatgcctcatcagctgcaagacaccttcttaaggattccattactggttgaactatggcacaaggataaaatgagtaaagatttacttctgggaattgcgagaatccagctttctaacatcttgtcttcagaaaaaactcgttttttaggttctaatggtgaacagtgttggcgtcaaacttacagtgaaagtgtgcctgttatagcagcacagggaagtattgactgctttaatgaaagcattattcaaggggatgaaaagcttaatgatgctgaaaataagtataagattttggaaaaagagttccaacagttcaaggaccagcaaaacaacaaaccagaaatccgtctacagtctgaaataaatcttctcaccttggaaaaggttgaacttgaaagaaagttggaatctgcaactaagtctaaactgcattacaagcagcagtggggacgagctttgaaagaacttgccagacttaaacagggtgtatctgccgtacagcaaaagccgtcttctcttcctccagcaccttgtccttcagagatccagacagagcctcgtgaaacgttagaatacaaagcagcacttgagctagaaatgtggaaggagatgcaagaagatatatttgaaaatcagctgaagcagaaagaactggctcatatgcaggctcttgcagaggaatggaagaaaagggaccgagaaagagaatcactagtaaagaaaaagcttcaaagagaaaaaaaggaactgcaatcagaacgtcagcggaacctgcaagaactgcaggactctatccgtagggccaaagaggactgtattcaccaagtagaactagaaaggttaaaaatcaaacagctcgaagaggataaacaccgccttcagcaacagccgttacatgttggacttcctccaagctcaggacttactttctgcaaaaacaatcttattcgtgatttcatgcccatgatttcagagacagtctacatctgggactttcacatgcaggctctgattggattcgtctggagcagtttcgcgtgctcaaaaggccacagacgaaaccgaacacagaaaaagaccgaggtctcggtcctcaacgggcctcgaagagcctcgaacaagttcaatatgttatctacggagtacgagttcctggttgcggcggcggttgactggctatcgcaggattcaaagtggctgcaggattcgcacatagtacctgacgtaaaactgtgtgtcgtagccagtgcctaccggcaatcgtatcagtctctgggtaacgatatttcgctaggctatcgggcgaggaggctggagccatatgaccctgcatcacctgtggcctgtgttaggcgagttcagggtgaggggcaagctagttccgttacttccgaaagtacttgcagagctctaaatggcttaaaggcggagaagtatctgcgggattattacaatcgagtttataaaaccgctactgcctgcgctgtttataaacctgctttaactaacagcttacggcaagctattcgcagtcctcgaactattgctcaagaagggcgtattacgaatcccttacagctgcctacagcactactacctgcacgccttcctgttctcgtattactcaaacggattgagctgctgcaaatcgtcggcgtcaccctacggcttaaacatagtctcctgtatcacaacgtccgttcgccggagacagaagtcctgactgatgttttgttgggtagtgtactacctgagcgaccactgattgctgcaccaggactcgaactaatccagtcctatcccgtgtggacaacacttctcatactccccggtgctcaacttgtgatttcaactctacccgtcctctatctggctttgattaggctaatccgcgtgcctaatcaccatcgcgcgcttaattcgttacctcctacggggctgcaggagacgtattcgttgatacaacttccggaagtgataagtgcgatagacagggttattctggcgctcgcaactaatacattacaccctgcgaggaattactgtcgtacgttttaa

SEQ ID NO: 129773 - DNA, 804 bp, Homo sapiens
atgaagccacggaccctcgtggtgagtgttacagttcttaaagatggtgtgtccagagtttgttccttcagatgttcagatgtgtccagaatttcttccttccagtgggttcgtggtctcgctgacttcaggaatgaagccacagaccctcatggtctcctggatgacattttgacactcagacaagataagggcagttttatgatatgctggttaaagggtaaagctccccctggtgatcccgcacccccaagaatcactcctacagtcaggttctccacaatggatctcagtgctgcaagtcaccgcataccctctaagtgatggaaacagcattcccatcatcggacttggtacctactcagaacctaaatcgctatgggctacaaatcatgtcccagagatggtccgcccaaccctggagaggacactcagggtcctccagctagattatgtggatctttacatcattgaagtacccatggcctttaagccaggagatgaaatataccctagagatgagaatggcaaatggttatatcacaagtcaaatctgtgtgccacttggggaggcgatgggaagcttgcaaaggacgctggcttggtgaaatccctgggagtgtccaattttaaccgcaggcagctggagctcatcctgaacaagccaggactcaaacacaagccagtcagcaaccaggttgagtgccatccgtatttcacccagccaaaactcttgaaattttgccaacaacatgacattgtcattactgcatatagccctttgtggaccagtacgaatccaat

SEQ ID NO: 129774 - DNA, 906 bp, Homo sapiens
gcccatctgctcacatttctatcactgcagctcacagacttcggttgtctttcacaccccaggtaagatcaactgctaaaaccaacaatgccttgacatccttctacatgaatccacataaggagaccagaaggcaggaggggccagccacagctgccacctttgcctctcctcttctcagggtccgtatgccattaccaggagcgatcaggtgggccgaggacatttgcttgcttcaccttccctgtttctttagattgaaattcagcctgccccacttctcaggaagatgccacgaggctgatccccctgagcagtttgtcctgtcctcttttcactggttttcttcctcattacctgggccaatccaacataaaattgataaattggacttcatcacaattaaaagtttttgtgcatcaaaggacactatgaagaaagtgagtcctgcaaatcaccgcatacctctaagtgatggaaacagcattcccatcatcagacttggtacctactcacttcggaagcttgtaaagatgctggcttggtgaaatccctcggagtatccagttttaacagcaggccagctggagctcatccagaacaacccaggactcaaacccaagccagtcagcaacgaggttgagtgccacccatattacacccaaccaaaacttttgaaatttcgccaacaacatgacattgtcatgattgcatatagccctttggggaccactaggaatccaacctggacaaatatgtcttctctgccttcgttaaaggatgcacttctaaaaaggtgcaataagatcacagctcaagttattttgcgtttcaacatccagcaaggggtggttgtcattcctaaaagctttaatcctgaaaagatcaaggaaaaccttcaggcct

SEQ ID NO: 129775 - DNA, 401 bp, Homo sapiens
cggcacgagcgtggctcaaacgaccgccgctaagaacaaaacgttggctttggcttcgttgcaaagcagccgctcggtggccgtacaacgcttcatctctccgagcctcggtttcctcatctccagccctaaaatgacgacacgccccacaggtcttgggaggattaagtgaggggacatgaggtggtcatcggtgtcctgctcgtggtcattggtgaggagcccagcctgcagtcagaccttcttgccttcggcacccgtgggctgggcagaaaggccccacgtgtcccctggggccaccctgcattggcacaggcagctttgcaaccacacgctgacctgcagtgagccctccgctaacagaagcccaaagaccaacttccaccccgcgagggcaggcg

SEQ ID NO: 129776 - DNA, 1293 bp, Homo sapiens
tttttatttttttttttttttggatttgaagaaacctttatagatatagattccattttacaagaagggaaaattgaggcctggagcagaaggaagcagtggggtagagtcagaaccagcatccttaagccgggcagacttggccttagacagacatgccttacttaggtccagcagatgctaccaggaaggtatggctggcagtacctgcgtctgagctcaggacttcagaccaagatggaagtcccttagaccaataacataaaaatcactttttaaactcaggtgctgtgggtagggagcaagggcagctatactgtcctttcagaagctctcctggggctgtggaaagtgcccacgagcctggcagatcacggaggaaggaggcagaagttccaggcccagaacctgggtcccaggctgcattcagagaggattccttgaggccctggcagccaaggaaccctggtttatgtgccccgaaggctgtaatgaaaacattgagtgaccacagtgaagaagaccaagatggtggctgcgttggtgagctggttgagtcgcccactgcttttctacctcattcaggtttcagccgtgcaatgaccacgagcaggacaccgatgaccacctgcaggagcagagagaggctgatgagggtgaccagggtggtgtagtagtgagaggatggtccctgctccagcaccgccttcagccgcatggcgttggacatgaacagggccacgtccagcatgctctccgccacgctcttcttggtggcgtaatggttcaggttgatgggctggctcctggggtcggagcttccaggctcatgtcccctcacttaatcctcccaagacctgtggggcgtgtcgtcattttagggctggagatgaggaaaccgaggctcggagagatgaagcgttgtacggccaccgagcggctgctttgcaacgaagccaaagccaacgttttgtttttagcggcggtcgtttgagccacgcctcaccgcaacgagtctgccatcagccaagaggtcacatcttttttggaactcgctcccccctcacatcatgggagcagtcagtctactcttccagtagaaactgttttgccacttttggggggaatcttgagctaccagctcatcgctcaggtcttagatgacactttccttgaccccaccgggtgctccagcgcctctgcttccggttttcatagcccttataatatcacctattgcaattgcccatttccttgtctgtctccctctgcagatggagtgaaggtacctga

SEQ ID NO: 129777 - DNA, 3090 bp, Homo sapiens
atggggaaaaaacataacagaaaaactggaaactctaaaaatcagagcgcctctcctcctccaaaggaacacagctcctcaccaccaacggaacaaagctggacggagaatgactttggcaagctgagagaaggcttcagacgatcaaattactctgagctacaggaggacattcaaaccaaaggcaaagaagttgaaaactttgaaaaaaatttagaagaatgtaaaaatagaataaccaatacagagaagtgcttaaaggagctgatggagctgaaaaccaaggctcgagaactacaaagggtatcagcaatggaagatgaaatgaatgaaatgaagcgagaaggaaagtttagagaaaaaagaataaaaagaagtgagcaaagcctccaagaaatatgggactatgtgaaaagaccaaatctacgtctgattggtgtacctgaaagtgatggggagaatggaaccaagttggaaaacactctgcaggatagtatccaggagaatttccccaatctagcaaggcaggccaacgttcagattcaggaaatacagagaacgccacaaagatactcctcgagaagagcaactccaagacacatgattgtcagattcaccaaagttgaaatgaaggaaaaaatgttaagggcagccagagagaaagactttaaaacaacaaagatcaaaagagacaaagaaggccattacataaaggtaaagggatcaattcaacaagaagagctcactatcctaaatacatatgcatccaatacaggagcacccagattcataaagcaagtcctgagtgacctacaaagagacttagactcccacacattaataatgggagactttaacaccccactgtcaacattagacagatcgacgagacagaaagacaacaaggatacccaggaattgaactcagctctgcaccaagtggacctaatagacatctacagaactctccacctcaaatcaacagaatatacatttttttcagcaccacaccacacctattccaaaattaaccacatacttggaagtaaagctctcctcagcaaatgtaaaagaacagaaattataacaaactatctctcagaccacagtgcaatcaaactagaactcaggattaagaatctcactcaaaactgctcaactacatggaaactgaacaacctgctcctgaataactactggatacataacgaaatgaaggcagagataaagatgttctttgaaaccaacgagaacaaagacacaacataccagaatctctgggacgcattcaaagcagtgtgtagagggaaatttatagcactaaatgcccacaagagaaagcaggaaagatccaaaattgacaccctaacatcacaattaaaagaactagaaaagcaagagcaaacacattcaaaagctagcagaaggcaagaaataactaaaatcagagcagaactgaaggaaatagagacacaaaaaacccttcaaaaaattaatgaatccaggagctggttttttgaaaggatcaacaaaattgatagaccactagcaagactaataaagaaaaaaagagagaagaatcaaatagacgcaataaaaaatgataaaggggatatcaccactgatcccacagaaatacaaactaccatcagagaatactacaaacacctctatgcaaataaactagaaaatctagaagaaatggataaattccttgacacatacactctcccaagactaaaccaggaagaagttgaatctctgaatagaccaataacaggatctgaaattgtggcaataatcaatagctttccaaccaaaaagagtccaggaccagatggattcacagccgaattctaccagaggtacaaggaggaactggtaccattccttctgaaactattccaatcaatagaaaaagagggaatcctccctaactcattttatgaggccagcatcattctgataccaaagcctggcagagacacaaccaaaaaagagaattttagaccaatatccttgatgaacattgatgcaaaaatcctcaataaaatactggcaaatggaatccagcagcacatcaaaaagcttatccaccatgatcaagtgggcttcatccctgggatgcaaggctggtttaatatacgcaaatcaataaatgtaatccagcatataaacagagccaaagacaaaaaccacatgaatatctcaatagatgcagaaaatgcctttgacaaaattcaacaacccttcatgctaaaaactctcaataagttaggtattgatgggacatatttcaaaataataagagctatctatgacaaacccacagccaatatcatactgaatgggcaaaaactggaagcattccctttgaaaactggcacaagacaggaatgccctctctcaccactcctattcaacatagtgttggaagttctggccagggcaattaggcaggagaaggaaataaagggtagtcaattaggaaaagaggaagtcaaattgtccctgcttgcagatgacatgattgtatatctagaaaaccccattgtctcagcccaaaatctccttaagctgataagcaacttcagcaaagtctcaggatacaaaatcaatgtgcaaaaatcacaagcattcctatacaccaacaacagacaaacggagagccaaatcatgaatgaactcccattcacaattgcttcaaagagaagaaaatacctaggaatccaacttacaagggatgtgaaggacctcttcaaggagaactacaaaccactgctcaaggaaataaaagaggatacaaacaaatggaagaacattccatgctcatgggtaggaagaatcaatatcgtgaaaatggccatactgcccaaggtaatttacagattcaatgccatccccatcaagttaccaatgcctttcttcacagaattggaaaaaactactttaaagttcatatggaaccaaaaaaaagtccgcatcaccaagtcaatcctaagccaaaagaacaaagctggaggcatcacactacctgacttcaaactatactacaaggctacagtaaccaaaacagcatggtactggtaa

SEQ ID NO: 129778 - DNA, 2235 bp, Homo sapiens
atggggaaaaaacagaacagaaaaactggaaactctaaaaagcagagcgcctctcctcctccaaaggaacgcagttcctcaccagcaacggaacaaagctggatggagaatgactttgacgagctgagagaagaaggcttcagacgatcaaattactccgagctacgggaggacattcaaaccaaaggcaaagaagttgaaaactttgaaaaaaatttagaagaatgtataactagaataaccaatacagagaagtgcttaaaggagctgatggagctgaaaaccaaggctcgagaactacatgaagaatgcagaagcctcaggagccgatgcgatcaactggaagaaagggtatcagcgatggaagatgaaataaatgaaatgaaaccaaatctacgtctgattggtgtacctgaaagtgatggggagaatggaaccaagttggaaaacactctgcaggatattatccaggagaactttctcaatctagcaaggcaggccaacgttcagattcaggaaatacagagaacgccacaaagatactccttgagaagagcaactccaatacacataattgtcagattcaccaaagttgaaatgaaggaaaaaatgttaagggcagccagagagaaacgtcgggttaccctcaaagggaagcccatcagactaacagtggatctcttggcagaaaccctacaagccagaagagagtgggggtcaatattcaacattcttaaagaaaagaattttcaacccagaatttcatatccagccaaactaagcttcgaaacccatctcacgtgcagagacacacatcggctcaaaataaaaggatggaggaagatctgccaagccaatggaaaacaaaaaaaggcaggggttgcaatcctagtctctgataaaacagactttaaaccaacaaagatcaaaagagacaaagaaggccattacataatggtaaagggatcaattcaacaagaagagctaactatcctaaatgtatatgcacccaatacaggagcacccagattcataaagcaagtcctgagtgacctacaaagagacttagactcccacacattaataatgggagactttaacaccccactgtcaacattagacagatcaatgagacagaaagtcaacaaggatacccaggaattgaactcagctctgcaccaagcggacctaatagacatctacagaactctccaccccaaatcaacagcatatacatttttttcagcaccacaccacacctattccaaaattgaccacatactgggaagtaaagctctcctcagcaaatgtaaaagaacagaaattataacaaactgtctctcagaccacagtgcaatcaaactagaactcaggattaagaatctcactcaaaaccgctcaactacatggaaactgaacaacctgctcctgaatgactactgggtacataacgaaatgaaggcagaaataaagatgttctttgaaaccaatgagaacaaagacacaacataccagaatctctgggacgcattcaaagcagtgtgtagagggaaatttatagcactaaatgcccacaagagaaagcaggaaagatccaaaattgacaccctaacatcacaattaaaagaactagaaaagcaagagatcaacaaaattgatagaccgctagcaagactaataaagaaaaaagagaagaatcaaatcgatgcaataaaaaatgataaaggggatatcaccaccgatcccacagaaataaaaactaccatcagagaatactacaaacacctctacgcaaataaactggaaaatctagaagaaatggataaattcctggacaaatatactctcccaagactaaaccaggaagaagttgaatctctgaatagaccaataacaggagctgaaattgtggcaataatcaatagcttaccaaccaaaaagagtccaggaccagatggattcacagccgaattctaccagaggtacaaggaggaactgctggtttgtccaacattcctgtttgaaaaacatccagtgaactatgactttgaacaagaaacattacacttcagtcccatcagtctaagaagtagtgaagaattaaatctttccacctacaggctttatggttggtctgaggagcagtctctttgggtaattcgtacctgggccagggtgcagaagttcagggctgctgtgcccctcgtgaatgaacctcacacgactgaagcttaa

SEQ ID NO: 129779 - DNA, 2088 bp, Homo sapiens
atgccctctctcaccactcctattcaacatagtgttggaagttctgccagggcaatcaggcagaagaaagaaataaagcgtattcaattaggaaaagaagaagtcaaattgtccctgtttgcagatgacattaccgtacatgtaaaaaaccccatcacctcagcccaaaatctccttaagctgataagcaacttcagcaaagtctcaggatacaaaatcaatgtggaaaaatcacaagcattcttatacacaaataacagacaaacagagagtcaaataatgagtgaactcccattcagaattgcttcaaagagaataaaatacctaggaatccaacttacaagggaagtgaaggacctcttcaaggacaactacaaaccactgctcaatgaaataaaagaagacacaaacaaatggaagaacattccatgctcatggataggaagaatcaatatcatgaaaatggccatactgccagaattggaaaaaactactttaaagttcacctggaaccaaaaaagagcctgcattgccaagacaatcctaagccaaaagaacaaagctggaggcatcacgctacctgacttcaaactatactacaaggctacagtaatcaaaacagcatggtactggtaccaaaacagagatacagataaatggaacagaacagagtctgcagaaataataccacacatctacaaccatctgatctttgacaaacgtgacaaaaacaagaaatggggaaaggattccctatttaataaatggtgctgggaaaactggctagccatatgtagaaagctgaaactggatcccttccttacaccttatacaaaaatcaattcaagatggattaaagacttaaatgttagacctaaaaccataaaaaccctagaagaaaacctaggcaataccattcaggacatatgcatgcgcaaggacttcatgtctaaaacactaaaagcaatggcaacaaaagccaaaattgacaaatgggatctaattaaactgaagagcttctgcacagcaaaagaaactaccatcaaaatgaacagtaaacggaactcagttcctcaccagcaacagaacaaaaaaactggaaactctaaaaagcagagtgcctctcctcctccaagggaacgcagttcctcaccagcaacagaacaaagctggatggagaatgactttgacgagctgagtgaagaaggcttcagacgatcaaattactctgagctacgggaggacattcaaaccaaaggcaaagaagttgaaaactttgaaaaaaatttagaagaatgtataactagaataaccaatacagagaagtgcttaaaggagctgatggagctgaaaaccaaggctcgagaactacatgaagaatgcagaagcctcaggagccgatgcgatcaactggaagaaagggtatcagcaatggaagatgaaatgaatgaaatgaagcgagaagagaagtttagagaaaaaagaataaaaagaaatgagcaaggcctccaagaaatatgggactatgtgaaaagaccaaatctacatctgattggtgtacctgaaagtgatggggagaatggaaccaagttggaaaacactctgcaggatattatccaggagaacttccccaatctagcaaggcaggccaacgttcagattcaggaaatacaaagaatgccacaaagatactcctcgagaagagcaactccaagacacataattgtcagattcactaaagttgaaatgaaggaaaaaatgttaagggcagccagagagaaaggtcggattaccctcaaagggaagcccatcagactaacagcggatctctcagcagaaaccctacaagccagaagagagtgggggccaatattcaacattcttaaagaaaagaattttcaacccagaatttcatatcccgccaaactaagcttcataagtgaaggagaaataaaatactttacagacaagcaaatgctgagagattttgtcaccagcaggcctgccctaaaagagctcctgaaggaagcgctaaacttggaaaggaacaactggtaccagccgctgcaaaatcatgccaaaatgtaa

SEQ ID NO: 129780 - DNA, 1515 bp, Homo sapiens; identical to SEQ ID NO: 120624

SEQ ID NO: 129781 - DNA, 1263 bp, Homo sapiens; identical to SEQ ID NO: 129281

SEQ ID NO: 129782 - DNA, 2145 bp, Homo sapiens; identical to SEQ ID NO: 129282

SEQ ID NO: 129783 - DNA, 1356 bp, Homo sapiens; identical to SEQ ID NO: 116174

SEQ ID NO: 129784 - DNA, 1759 bp, Homo sapiens
atgatcatctcaatagatgcagaaaaagcatttgacaaaatccagcatccctatattattaaaactctcagcaaaatcaacatacaagggacataccttaatgtaataaaggccatctatgacaaacccacagccaacataatactgaatggtgaaaagttgaaagcattctctctgagaactggagcaagacaaggatgctcactctcaccactcctcttcaacacagtactggaagccctagccagagcaatcagacaagagaaagaaacaaagggcatccaaattggtaaagaggaagtcaaactgtcactgtttgctgacgatatgattgtttaccttgaaaaccctaaggactcctccagaaagcttctagaactgataaaagaatgcagcaaagtttctggatacaagattaatgtaccacaaatcagtagctcttctacacaccaacagcgaacaagcagagaatcaaatcaagaactcaacccctgttacaatagctgcaaaaataaaaataaaaataaaaataaaatacttaggaatatacctaacaaaagagtcaaaaggcctctacaaggaaaactacaaaacactgctgaaagaaatcacagacgacacaaacaaatagaatcacatcccttgctcatggacctgcagctgagggtcctgtctgttagaaggaaaactaacaacagaaaggacatccacaccaaaaacccatctgtacatcaccatcatcaaagaccaaaagtagataaaaccacaaagatggggaaaaaacagaacagaaaaactggaaactctaaaaagcagagcgcctctcctcctccaaaggaacgcagttcctcaccagcaacggaacaaagctggatggagaatgactttgacgagctgagagaagaaggcttcagacgatcaaattactccgacctacgggaggacactcgaaccaaaggcaaagaagttgaaaactttgaaaaaaatttagcagaatgtataactagaacaaccaatacagagaagtgcttaaaggagctgatggagctgaaaaccaaggctcgagaactacaaagggtatcagcgatggaagatgaaatgaatgaaatgaagcgagaagggaagtttagagaaaaaagaataaaaagaaatgagcaaagcctccaagaaatatgggactacgtgaaaagaccaaatctacgtctgattggtgtacctgaaagtgatggggagaatggaaccaagctggaaaacactctgcaggatattatccaggagaacttccccaatctagcaaggcaggccaacgttcagattcaggaaatacagagaacgccacaaacatactcctcgagaagagcaactccaagacacataattgtcagattcaccaaagttgaaatgaaggaaaaaatgttaaaggcagccagagagaaaggtcgggttaccctcaaagggaagcccatcagactaacagcggatctctcggcagaaaccctacaagccagaagagagtgggggccaatattcaacattcttaaagaaaagaattttcaacccagaatttcatatccagccaaactaagcttcataagtgaaggagaaataaaataccttacagacaagcaaatgctgagagattttgtcaccaccaggcctgccctaaaagaggtcctgaaggaagcgctaaacatggaaaggaacaaccggtacgagccgctgcaaaatcatgccaaaatgtaaagaccatcaagactag

SEQ ID NO: 129785 - DNA, 1998 bp, Homo sapiens
atgggagactttaacaccccactgtcaacattagacagatcaacgacacagaaagtcaacaaggatacccaggaattgaactcagctctgcaacaagcagacctaatagacatctacaaaactctccaccccaaatcaacagaatatacattcttctcagcacctcatcacacttattctaaaattgaccacataattggaagtaaagcactcctcagcaaatgtaaaagaacagaaatcacaacaaactatctctcagatcaccgtgcaatcgaattagaaatcaggattaagaaacttactcaaaaccacacaactacatggaaactgaacaacctgctccggaatgactactgggtaaataatgaaatgaaggcagaaataaagatgttctttgaaaccaacgagaacaaagacacaacgtaccagaatctctgggacacatttaaagcagtgtgtagagggaaatgtacagcactaaatgcccacaagagaaagcaggaaagatctaaaatcaacaccctaacatcacaattaaaagaactagagaagcaagaggaaacaaattcaaaagctagcagaaggcaagaaataactaagatcagagcagaactgaaggagataaagacacaaaaaacccttcaaaaaatcagtgaatccgggaggaggagccaagatggccgaataggaacagctccggtctacagctcccagcgtgagcgacgcagaagacaggtgatttctgcatttccatctgagggcacagacaaacaaaaagacagcagtaacctctgcagacttacgtgtccctgtctgacagctttgaagagagcagtggttctcccagcacgcagctggagatctgagaacgggcagactgcctcctcaaaaggaaaactaacaaccagaaaggacatctacaccgaaaacccatctgtacatcaccatcatcaaagaacaaaagtagataaaaccacaaagatggggaaaaaacagaacagaaaaactggaaactctaaaacgcagagcacctctcctcctccaaaggaacgcagttcctcaccagcaacagaacaaagctggatggagaatgattttgacgagctgaaagaagaaggcttcagacgatcaaattactctgagctacgggaggacattcaaaccaaaggcaaagaagttgaaaactttgaaaaaaatttagaagaatgtataactagaatagccaatacagagaagtgcttaaaggagctgatggagctgaaaaccaaggctcgagaactacgtgaagaatgcagaagcctcaggagccgatgcgatcaactggaagaaagagtatcagcaatggaagatgaaatgaatgaaatgaagcgagaagggaagtttagagaaaaaagaataaaaagaaatgagcaaagcctccaagaaatatgggactatgtgaaaagaccaaatctacgtctgattggtatacctgaaagtgatgtggagaatggaaccaagttggaaaacactctgcaggatattatccaggagaacttccccaatctagcaaggcaggccaacgttcagattcaggaaatacagagaatgccacaaagatactcctcgagaagagcaactccaagacacataattgtcagattcaccaaagttgaaatgaaggaaaaaatgttaagggcagccagagagaaaggtcgggttaccctcaaaggaaagcccatcagactaacagcggatctctcggcagaaaccctacaagccagaagagagtgggggccaatattcaacattcttaaagaaaagaattttcaacccagaatttcatatccagccaaactaagcttcataagtgaaggagaaataaaatactttatagacaagcaaatgctgagagattttgtcaccaccatgcctgccctaaaagagctcctgaaggaagcgctaaacatggaaaggaacaaccggtaccagctgctgcaaaatcatgccaaaatgtaa

SEQ ID NO: 129786 - DNA, 3464 bp, Homo sapiens
atgtacagaaggagtagcagaccttcagcaaggtctcaggatgaaaaatcaatgtgcaaaaatcacaagcactcctatacaccaataacaaacagagagccaaaacatgagcgaactcccatttgcaattgctacaaagagaataaaatacctaagaatacagcttacaagggatgtgaaggacctcttcaaggagaactacaaaccactgctcaaggaaataagagaggacacaaacaaatggaaaaacattccatgctcatggataggaagaatcaatatcgtgaaaatggccatactgcccaaaaaataaaaactaccataagagaatactataaacacttctacacaaataaactagaaaatctagaagaaattgataaattcctggaaacatacaccctcctaagtctaaaccaggaggaagtcgaatctctgaatagaccaataacaagtagtgaaattgaggaagtaattaatagcttaccaaccaaaaaagtccaggaccagacaaagtcacaaccagattctatcagagaaggaaaactaacaaacagaaaggacatccacaccaaaaacccatctgtacatcaccatcatcaaagaccaaaagtagataaaaccacaaagatggggaaaaaacagaacagaaaaactggaaactctaaaacgcagagcgcctcttctcctcctccaaaggaacgcagttcctcaccagcaacggaacaaagctggatggagaatgactttgacgagctgagagaagaaggcttcagacgatcaaattactctgagctacgggaggacattcaaaccaaaggcaaagaagttgaaaactttgaaaaaaatttagaagaatgtataactagaataaccaatacagagaagtacttaaaggagctgatggagctgaaaaccaaggctcgagaactacgtgaagaatgcagaagcctcaggagccgatgcgatcaactggaagaaagggtatcagtaatggaagatgaaacgaaatgaatgaaatgaagcgagaagggaagtttagggaaaaaagaataaaaagaaatgagcaaagcctccaagaaatatgggactatgtgaaaagaccaaatctacgtctgattggtgtacctgaaagtgatggggagaatggaaacaaattggaaaacactctgcaggatattatccaggagaacttcccccatctagcaaggcaggccaacgttaagattcaggaaatacagagaacgccacaaagatactcctcgagaagagcaactccaagacacataattgtcagattcaccaaagttgaaatgaaggaaaaaatgttaagggcagccagagagaaagtgttggaagttctggccagggcaattaggcaggagaaggaaataaagggtattcaattaggaaaagaggaagtcaaattgtccctgtttgcagatgacatgattgtatatctagaaaaccccattgtctcagctgaaaatctccttaagctgataagcaacttcagcaaagtctcaggatacaaaatcaatgtacaaaaatcacaagcattcttttacaccaataacaggcaaacagaaagccaaatcattagtgaactcccattcataagtgcttcaaagagaataaaatacctaggaatccaacttacaagggatgtgaaggacctcttcaaggagaactacaaaccactgctcaatgaaataaaagaggatacaaacaaatggaagaacattccatgcttgtgggtaggaagaatcaatatcatgaaaatggccatactgcccaaggtaatttatagattcaatgccatccccatcaagctaccaatgactttcttcacagaattggaaaaaactactttaaagttcatatggaaccaaaaaagagcccgcatcgccaagtcaatcctaagccaaatgaacaaagctggaggcatcactctacctgacttcaaactatactacaaggctacagtaaccaaaacagcatggtactggtaccaaaacagagatatagatcaatggaacagaacacagccctcagaaataacgccatgtatctacaactacctggtctttgacaaacctgagaaaaacaagcaatggggaaaggattccctacttaataaatggtgctgggaaaactggccagccatatgtagaaagctgaaactggatcccttccttacaccttatacaaaaatcaattcaagatggattaaagacttaaacgttagacctaaaaccataaaaaccctagaagaaaacctaggcaataccattcaggacatatgcatgcgcaaggacttcatgtctaaaacactaaaagcaatggcaacaaaagccaaaattgacaaatgggatctaattaaactgaagagcttctgcacagcaaaagaaactaccatcaaaatgaacagtaaacggaactcagttcctcaccagcaacagaacaaaaaaactggaaactctaaaaagcagagtgcctctcctcctccaagggaacgcagttcctcaccagcaacagaacaaagctggatggagaatgactttgacgagctgagtgaagaaggcttcagacgatcaaattactctgagctacgggaggacattcaaaccaaaggcaaagaagttgaaaactttgaaaaaaatttagaagaatgtataactagaataaccaatacagagaagtgcttaaaggagctgatggagctgaaaaccaaggctcgagaactacatgaagaatgcagaagcctcaggagccgatgcgatcaactggaagaaagggtatcagcaatggaagatgaaatgaatgaaatgaagcgagaagagaagtttagagaaaaaagaataaaaagaaatgagcaaggcctccaagaaatatgggactatgtgaaaagaccaaatctacatctgattggtgtacctgaaagtgatggggagaatggaaccaagttggaaaacactctgcaggatattatccaggagaacttccccaatctagcaaggcaggccaacgttcagattcaggaaatacaaagaatgccacaaagatactcctcgagaagagcaactccaagacacataattgtcagattcactaaagttgaaatgaaggaaaaaatgttaagggcagccagagagaaaggtcggattaccctcaaagggaagcccatcagactaacagcggatctctcagcagaaaccctacaagccagaagagagtgggggccaatattcaacattcttaaagaaaagaattttcaacccagaatttcatatcccgccaaactaagcttcataagtgaaggagaaataaaatactttacagacaagcaaatgctgagagattttgtcaccagcaggcctgccctaaaagagctcctgaaggaagcgctaaacttggaaaggaacaactggtaccagccgctgcaaaatcatgccaaaatgtaa

SEQ ID NO: 129787 - DNA, 369 bp, Homo sapiens; identical to SEQ ID NO: 117836

SEQ ID NO: 129788 - DNA, 1247 bp, Homo sapiens
gagaactacgtgatgaatgcacaagcttcagtagccgatttgatcaactggaagaaagggtatcagtgactgaagatcaaatgaatgaaatgaagcgagaagagaagtttagagaaaaaagaataaaaagaaacgaacaaagcctccaagaaatgtgggactatgtgaaaagaccaaatctacgtctcattgatgtacctgaaagtgacagggagaatggaaccaagttggaaaacactctgcaggacattatcctggagaacttccccaatctagcaaggcaggccaacattcaaattcaggaaatacagagaatgccacaaagatactcctcaagaagagcaactacaagaaacctaattgtcagattcaccaaagttgaaatgaaggaaaaaatgttaagggcagccagagagaaaggtcgggttacccacaaagggaagcccatcagactaacagcagatctcttggcagaaactctgcaagccagaagagagtgggggccaatattcaacattcttaaagaaaagaattttcaacccagaatttcatatccagcaaaactaagcttcataagtgaaggagaaataaaatactttacagagaagcaaatgctgagagattttgtcaccactagccctgccctagaagagctcctgaaggaagcactaaacatggaaaggaacaaccgaacaacaagacagaaagttaacaaggatatccaggaattgaattcagctctgcaccaagcagacctaatagacatctccagaactctccaccccaaatcaacagaatatacattcttctcagcaccacatcacacttattccaaaattgaccacatagttggaagtaaagcactcctcagcaaatgtaaaagaacagaaattataacaaagtgtctctcagaccacagtgcaatcaaactagaactcaggattaagaaactcactcaaaactgcacaactacatggaaactgaacaacctgctcctgaatgactactgggtacaaaatgaaatgaaggcagaaataaagatgttctttgaaaacaatgagaacaaagatacaacataccagaatctctgggacacatttaaagcagtgtgtagagggaaatttatagcactaaatgcccacaagagaaagcagaaaagatctaaaactgacaccctaacatcacaattaaaagaactagagaaggaagagaaacacattcaaaagctagcagaaggcaagaaataa

SEQ ID NO: 129789 - DNA, 1698 bp, Homo sapiens; identical to SEQ ID NO: 117839

SEQ ID NO: 129790 - DNA, 1539 bp, Homo sapiens; identical to SEQ ID NO: 117840

SEQ ID NO: 129791 - DNA, 1911 bp, Homo sapiens; identical to SEQ ID NO: 117842

SEQ ID NO: 129792 - DNA, 1059 bp, Homo sapiens; identical to SEQ ID NO: 126284

SEQ ID NO: 129793 - DNA, 1104 bp, Homo sapiens
cagcagaaaactctgcagacctaaatgtccctgtctgacagcttggaagacagtagtggttctcccagcacacagctggagatctgagaatggacagactgcctcctcaagtggtccctgacccccaagtagcctaactggaaggcacccccaagtaggggcagactgacacctcacacggccgagtactcctctgagacaaaacttccagaggaatgatcaggcagcagcatctgcggttcaccaatatctgctgtgctgcagccaccactgctgatacccaggcaaacagggtctggagtggacctccagcaaactccaacagacctgcagctgagggtcctgactgttagaaggaaaactaagaaacagaaaggacatccacaccaaaaccccacctgtacgtcaccatcatcaaagaccaaagtgggagaaagggtatcagtgattgaagatcaaatgaaggaaatgaagcgagaaaagaagtttagagaaaaaagagtaaaaagaaatgaacaaagcctccaagaaatatgggactatgtgaaaagaccaaacctacgtctgattggtgtacccgaaagtgatggggagaatggaaccaagttggaaaacactcttcaggatattatgcgggagaacttccccaatcgagcaaggcaggccaacattcaaattcaggaaatacagagaatgccacaaagatactcctcgagaagagcaaccccaagacacataattatcagattcaccaaagttgaaatgaaggagaaaatgttaagggcagccagagagaaaggttgggttacccacaaagggaagcccatcagactaacagcggatctcttggcagaaactctacaagccagaagagagtgggagccaatattcaacattcttaaaggaaagaattttcaacccagaatttcatatccagccaaactaaacttcataagtgaaggagaaataaaatcctttacagacaaacaaatgctaagagattttgtcatcaccaggcctgccttacaagagctcctgaaggaagcactaaacctggaaaggaacaactggtaccagccactgcaaaaacatgccaaattgtaa

SEQ ID NO: 129794 - DNA, 1534 bp, Homo sapiens
gttttcactgatatagaagcagcacaggccaagaagtggagaaccaagaggaaagtgaatactgtcaggttgaggactgaagttgagctattggcatatcttggtgctagtgagttaaaattagtcttcagtgtttgccaacgtaaagaagtcctgtccttggtcataattgctgaagatattgatagagaagctcgaagtacattcatttttaataggctaaaagttggtcttcagatcatagcagtcaaagctccagattttggtgacaacagaaagaaccaacgtgaagatacagctattgctactggtggtctggctcaaattgaaaaatatattcaagaaatcgttgagcagttagatgttacaactagtgaatatgaaaaggaaaaactgaatgtatgtctggcaaaactttcagatggagtagcagtgctgaaggctggtgggacaagtgatgtcaaagaatgcagctcctcaccagcaatgcaacaaagctggatggagagtgactttgacgagttgagagaagaaggcttcagacgatcaaacttctccaagctaaaggaggaagttcgaatgcatcgcaaagaagctaaaagccttgaaaaaaaattagatgaatggctaactagaataaccagtgtagagaagtccttaaatgacctcatggagctgaaaaccatggcacgagaactacataaccaatgcacaagcttcagtagccaattccatcaactggaagaaagggtatcagtgattgaagatcaaatgaatgaaatgaagcgagaagagaagtttagagaaaaaacagtaaaaagaaatgaacaaagcctccaagaaatatgggactatgtgaaaagaccaaatccatgtctgattggtatacctcaaagtgacggggagaatggaaccaagttggaaaacactctgcaggatattatgcaggagaacttccccaacctagcaaggcaggccaacattcaaattcaggaaatacagagaatgccacaaagatactcctcgagaagagcaactccaagacacataattgtcagattcaccaaagttgaaatgaaggaaaaaatgttaagggcagccagagagaaaggttgggttacctacaaagggaagcccatcagactaacagcggatctcttggcagaaactctacaagccagaagagagtgggggccaatattcaccattcttaaagaaaagaattttcaacccagaatttcgtgtccagccaaactaagcttcataagtgaaggagaaataaaatcctttacagacaagcaaatgctgagagattttgtcactaccaggcctggcctaaaagaactcctgaaggaagcactaaacatggaaaggaacagctgggcaaagtgttcccatgcagggttatgccacacgtttccattcgagcagatggcagaaaggtttgtctgcaatgtggaacttgttaagggggaaggccttcctgatagagatcaagaaggccgctttaatttacttagtggtgggatggttt

SEQ ID NO: 129795 - DNA, 3904 bp, Homo sapiens
tacgactgcggttttcccgggtcgacgatttcgttgggtattctccttcaatgaaaagaatacttatacataaggtatttcactccatttgccttccctcttacagaaaaggtcaggctgcaggatagtactgtagtttatacttccctcaggtggccatttttccccatcagagagagaaattggggccaggctgtagtatagaaaaaaatgagccacctctttttcagggtttgtgggtcaaattggtcccagtggcttaggatgcatttcaagggtgagcctgttgatgcctgagtgtttcccatctgaaagacaaaaccgcccgtggttttggtttattttgtttctccccctgcccaagaatccacaacggtccctggaccctgctgatcggaatagttgtgctcaccaacgcagcagcagaaacaacccctgcccaagaacccacaacggtccctggaccctgctgatcggaatagctgcactcacctacgcagcagcagaaacattagttttcctcccagaccacatggaggaccgaggaagggtcaaccaacatgttgttgggaccccagagctgcatggctttcctctctgtcaaccctcggctcagcccagaagtaaaggaaaagaggaagctgtttctaggcaaatcaacggtcccaactccaaagagttgggggttgttagagagccctttcctggaaagcctgacacccatgtctttagtccagcggccgcgctagtcgctttccactggccgacaggtcatcacatcctcattcatggacggaaggaaaggaggaataaagggaactgttcatccatacctgacagctttcaacaggaaagccaaaatttcccggaaatgcctataacagacttctccctacatcttattgatcagaatgatgtcagatgcctccccaaccgcgacgccagggcgctaaccccggactcccttcgtccctctccgcgggcgcggcgcggcgtcgaaaaaaacgcacacctcgccgacccggggcggagagcctcgcagacgctcgccaggctcgtccggcgtagagtcgagcctaaccttcgggcacttccgccaatccctcgttccgccgactcgctcaacgccgatagcggggcgccaaagctctttaccaccaccgcgcgggagctcaagctctcccgcaggctatctatgatccgtcccacgaactcgggcgtcttcgcgccggtcgtacacacacccaggacagccagtctcctccgccgaaccgactttcccattaccacgcaacggttcctcccgctctccccgactcccgccggcccaaagctcgccccactagagatcaggaccgtaattttcgttcccccccgccccttacccgtccggcagactccttcttactttcccaccccgagttcacgcgcgctctcctgggaaattcgctgcgttagtcgtaccaacgaactggttaatgtgtggggagaggtggcccgtgcaccgggtgttagggcggccccctcccctattagcgagatgggtaatagtcgaccgtttcctattgttcggtttcgagagagccgtaaaggaaaactaacaaacataaaggacatctacaccaaaaccccatctgtatgtcaccatcatcaaagaccaaagttagataaaaccacaaagatggagagaaaccagagcagaaatgctgaaaattctgaaaatcagagtgcctcttctcctccaaaggaacacaactcctcaccagcaacagaacaaagctggacagagaatgacttcgacgagctgagagaagaaggcttcagacgatcagtaataacaaacttctccaagctaaaggaggatgttcgaacccatcgcaaagaagctaaaaaccttgaaaaaagattagacgaatggctaactagaataaacagtgtagagaagaccttaaatgacctgatggagctgaaaaccatggcacaagaactacgtgacacatacacaagcttcagtagccgatttgatcaagtggaagaaagggtatcagtgattgaagatcaaatgaatgaaataaagcgcagaggcgtctccgtgtgtccacaaccatcagaagacaccccgaggagtactgccagggtcccaaaggggatggtccccttccggccccgggtccccttggtcactccacccagagagaaaaaagaagctccttggcttgcatgccttcgcactagggctctaaggatcctcatagaccctccgagccaggtgtgggatatagtctcgtgtgatgcggagaatgaaaccaagttggaaaacactctgcaggatattatccaggagaacttccccaatctagcaaggcaggccaacattcaaattcggggaaattacagagaacgcccacaaaggttgcctcctcgagaacagcaactccaagcacacctaattgtcagattcaccaaagttgaaatgaagggaaaaaatattaagggcagcccagagagaaaggtcggggttacccacaaaggggaagcccttcagactaacagcagcggatctctcggcagaaacttctacaagccagaagacagagtgggggccaatattcaacattctggaaggaaaagaattttccaacccagaaatttcatatcttagccaaacttaagctttcataagtggaagggaggaattaaattccttttaccggacaagccaaatgctgagagatttttgtcaccgccagcctcccgcctgccctaaaagagcaccaggcctgccctaaaagagctgctgaaggaagaagcactaaacatggaaaggaataacagctcaaatctccttaagctgataagcaacttcagcaaagtctcaggatacaaaatcaatgtgcaaaaatcacaagcattcttatacaccaacaacagacaaacagagagccaaatcatgagtgaactcccattcacaattgcttcaaagagtataaaatacctaggaatccaacttacaagggatgtgaaggacctcttcaaggagaactacaaaccactgctcaacgaaacaaaaggacacaaaaaaaggaagaaccttccatgctcatgggtaggaagaatcaatattgtgaaaacggccatactgcccaaggtaatttatagattcaatgccatccccatcaagctaccaatgattttcttcacagaattggaaaaaactactttaaagttcatgtggaaccaaaaaagagcctgcattgccaagacaatcctaagccaaaagaacaaagctggagggatcacgctacctgacttcaaactatactacaagtctacagtaaccaaaacagcatggtactggtaccaaaacagagatatagacccatggaacagaacagagccctcagaaataataccacacatctacaaccatctgatctttgacaaacctgagaaaaacaagcaatggggaaaggattccctatttaataaatggtgctgggaaaactggctaggcatatatagaaagctgaaactggatctcttccttatgccttatacaaaaattaattcaagatggattaaagacttaaatgttagacctaaaaccataaaaaccctagaagaaaacctaggcaataccattcaggacataggcattggcaaggacttcatgactaaaacaccaaaagcaatggcaacaaaagccaaaattgacaaatgggatctaattaaactgaagagcttctgcacagcaaaagaaactaccatcagagtgaacagacaacctacagaatggcagaaaatttttacaatctacctatctgacaaagggctaatatccagaatctacaaagaacttaaacaaatttacaagaaaaaatcaaccccatcaaaaagtgggtga

SEQ ID NO: 129796 - DNA, 807 bp, Homo sapiens
tcaggacccactctcccaggcccagagcctctgctgtggcctcaatcttgctccctgccacatcccaggagcctgtgagaacccagccaaagacacagccaagacttgcagggctggtcccaggagcatcaggtttgtttgcacagggttggctggggccactgtgccacctgcatcttgcccgctgccactgcaagccacgaaggacctgaagcatggaggccaggctgctggtcccgcagactgcagtgggaatttgtagtgctttttctgggctgcccacgtccactcatgaaccaactggcatgcacttccttccctctgaggcccatgaaaagccccggactcagccagaccagaagagaggacgggatgatctgccttgcacaccctccacttgtctgcatacctcactcttcctggacacaggacaagaattcgggacctgccgaatggcggggctaaaagagcatgttgcaggcgacaatagggaaagaagacaataaggagagaagagctgtggccctttggggaacccagacctaggagctcaatgagccagggttgtgacaccctctttagggatctgtggttcctggcatctctaagcttccaggagccatcacgttccccagtgtcagccgtggaagctggctgcttatggtatgccaggcttccatcaccatggcaacaggggctgatgtcataccaagccaaaagatcaggctctgcctctcccattgcagccagtgtgcctggctgtgcacagtggctggacccttgcttacacacccctcgccaccccat

SEQ ID NO: 129797 - DNA, 448 bp, Homo sapiens
tgaacttaaattttaatagtttccaattttatcaccatcaaggaagacttcccctctaagacagggaagttaggagtccagtaaaagaaaggctttacatccttgagaaaagcaggtaggtggggaatgttggggtgaggggaaatagcctctatataagcccaaggagaaaacaagtgccaagaggtatcttgccatcagcattctcaacgtagcacttccctgttagcaggaacccctgcctcaggtcctgagatatcaagtgcttggttttgcattgtctcttcccagatggcttctcactgttattggtgtatttctgcagcttgagtgagtcggcttttggctgcttgcattgttggataaaaccttattctttcggtggagggcctatataaacctgttgttgcttgtttttaggaaaagagtcctctggcaacttctctgc

SEQ ID NO: 129798 - DNA, 627 bp, Homo sapiens
atgaaggcagaaataaagatgttctttgaaaccaatgagaacaaagacacaacataccagaatctctggaacacatttaaagcagtgcgtagagggaaatttatagcactaaatgcccacaagagaaagcaggaaagatctaaaattgacaccctaacatcacaattaaaagaactagagaaacaagagcaaacacattcacaagctagcagaagactaaaccaggaagaagttgaatccctgaacagaccaataacaggctctgaaattgaggcaataattaatagcctaccaaccaaaaaaaggccaggaccggacggattcacagccgaattctaccagaggtacaaagaggagctgcccaaaatctccttaagcaacttcagcaaagtctcaggataccaaatcaatgtgcaaaaatcacaagcattcctaaacaccaatagcagacaaacagagagccaaatcatgagtgaactcccattcacaattgcttcaaagataataaaatacctaggaatccaacttacaagggacgtgaaggacctcttcaaggagaactacgaaccattgctcaacgaaataaaagaggacacaaacaaatggaagaacattccatgctcatga

SEQ ID NO: 129799 - DNA, 515 bp, Homo sapiens
attcccgggtcgacgatttcgtctccttcccccttccggaagctatagacacttccgagagagcgcgaacttgcggagcactttgcatgcgcgccgcgggtaggactggacggtcggatttgtaggcaattctgacaccgagctcccgggctcggttggcagaagatcgctttgggaatcctcctactctacgaggaccagaaaccaaggacgccaagccatacaaattcagcacagctgactcagagaggtggaaaggaaatcaggacaaaaagccacaatgtcttctggaggaggatattgccagccagaataactgtgagagatgcaagcatagtcctggaaacaaacagcacaattcctttaaagccctaaaggatgaagatcttcctgtagagaagtatttaatggaaaggcagcctgtaggtgagccagctgccgaccaggtagctatggatgtgatgcacagccccatcctccaactggaaaggaaacacaaagtctcaagtgacagc

SEQ ID NO: 129800 - DNA, 3831 bp, Homo sapiens
atgcagcttcctgttcagactatagcagctgatggttatgttataaaactacaaaagcgtaccacggaggatggccatcagtccccggaacgccatcaattcccacacctatcctcatattcagaacaggaaacaaccagggtgccatttgccaaggcagttgctagtggctttccaggcgatacaactctcgtgttctgtgcctcccctcagccctcaccccaggtccaccttcccacccaggctgttgcagacatattctctgagttccatgagcattatgccaggatctctaccgctccttcagtgacactgtcaaaggcaaacatgatgggcagtgagttccccacagcgaggctctccaatagcaaatatcctgagaccctggaagtgggtgagagtgctcagccagtccccatgtacacctggaagacagtggctcaagacaggaaagatggtgtctcacctcctctgttagagaagcagagtattaccaaaagcatctcaaataagccagtagagttgtcttctaaagtggtggaggtagatgcttccaaagctgatcacatgaaaaagatggcttccatgggcctggttcacagcatggctggaagtggcttagtgctctccagaagtgagattctgaaagagatatcttctctaagaaatggctgtgctatctatagatctgaatttattagcactgatccatcatcctgggtagtacccaggccaagaactaatgaagagaacaatggtgaaagcatgttgaaaaacaaggtgatggactggatgataatacaacagcaaagttctttttacctttgcatgaatggcaaaggaactatgatccctaatgttttggggtcagtgtcctgtgcaggccaccccacctctatattaactctatattaccagtccccaaccccacatagggcagatggcactaggaccaacaggagctctgtggataccacatcatccatcattcagcaagtgggccaacctccaaccgtgcctgtcaagcaaagcagcagcactagcagcaaggttgccaaagccagcagcccagaactgagtttcaaagcaaataagaatggccttcaaccaagccccctatttctacctccaaatgaggctttcaggcccccatcaatttcccaccccagaagttactttccttacccagtacctaaggccactgctataagacccttctccttacatgacaaagggcctgtctaccctcatccagttttgttgcccaacaacagtctctttctggggtgtcttgcctcaaagcctagactgccttatgtggtgcccatgggccatccagagtttctgatctaccaagatgccctgggatttggcatggtgcaacccatgttgataacacacaggcccatagagatcaccaaaaaggagaaaccagagaggaggtcacattcccaagaaagagcctgccgcaaagacccaactctccagaatcagttttctgagatgctggaagctagcagtacagcgtttcatccagaagtccccaatgacagtctaaaactgaaccccagctggaatcaagactccaaccaacaaagagaaaaaagaggagaaaccagagaaagatcccattcccatgaaagagcctgccacaaagacccaactgtccagaatcaattttctgagatgttggaagctggcagtacagagtttcatccagaagtccacactgacaatctaaaactaaacctcagctggaaccaagggaagactgttagcagaaataaaaagattgtttacatagaccttctccaagaagaaccagatgccaaaactgaggcaaacatgtccaaaccatgctttacagtgaaaaatattggtcagaatgccaagcctgccaagcccccaattgtcaaggcatccctgcagcagcatggtgattttatcatgctaagagaggagttggggcacattggtgacttgcatgaagcttatgctctcaaacggactccagccaacaaagagaacatagggatgccagtttcaacatcattcctggagccaactctagtgagtgatggtcatgctgtaacttttggtaaaatccaagagtatcccaaaccatattgccttggcagtgccccactaagtatggacataatctctacttacaccaaagatggagccaatgaggccaaatcaagtgatggcaaacttctgaaaccaaagccatctaacctggtaaagagagtcaccacctcagcaggttgcatggctgaccgactcaagtgtgttactactgaactgtatgcagattctagtcagctcagttgggagcaacgggcattgcagaaaccaaggacgccaagccatacaaattcagcacagctgactcagagaggtggaaaggaaatcaggacaaaaagccaaaatgtcttctggaggaggatattgccagccagaataactgtgagagatgtaggcaagcatagtcctggaaacaaacagcacaattcctttaaagccctaaaggatgaagatcttcctgtagagaagtatttaatggaaaggcagcctgtaggtgagccagctgccgaccaggtagctatggatgtgatgcacagccccatcctccaactggaaaggaaacacaaagtctcaagtgacagcaaccagacagagactactgcagagaagttgccagaggactctttcctaaaaaacaagcaaaaacaggtttatatagaccacagtgcaattaaactagaactagaactcaggattaagaaactcaataaaaactgctcaactacacggaaactgaacaacctgctcctgaatgactactgggtacataatgaaatgaaggcagaaataaagatgttctttgaaaccaatgagaacaaagatacaacataccaaaatctctgggacacatttaaatcagtgggtagagggaaatttatagcactaaatgcccacaagacaaagcaagaaagatctaaaattgacacccttatgtcacagttaaaagaactagagaagcaagagcaaacacattcaaaagctagcagaagactaaaccaggaagaagttgaatccctgaatagaccaataacaggctctgaaattgaggcaataattaatagcttaccaaccaaaaaaatccaggaccagatggattcacagccaaattctaccagaggccctccaccgaagaataaggttttatccaacaatgcaagcagccaaaagccgactcactcaagctgcataccattgttgaggctgcctgataagcagcagaaagttaatgagagcattaagacagacatgctgtgcacagacaaggaagaggagtgccctgctgcctccctgctgcagaaatacaccaataacaaacaactattagaagagcctaccaggagggaccaagatgatcaaataagaacaggtgctggtctgcagctccaagtgagggcaacgcagaagtgcatcatcctgataccacaacctagcagagacacaacaaataaaaggaaatttcagcccaacatccctgatgaacatcgatggaaaatcctcaataaaatactggcaaatggaatccagcaacacatcaaaaagcttatccaccacaatcaagttggtttcatagctgcaatgaaagaacaaataaatacagaaattggcaccaagcaatggggcattgctgtaaagatacttgaaaatgtggaagtgattttggaactgggtaatgggcagaaactagaaaagtttggagagctcagaagaagacaggaagaaaaggaaaaatttggaacttcatag

SEQ ID NO: 129801 - DNA, 1639 bp, Homo sapiens
aactgtctctcagaccacagtgcaatcaaactagaactcaggattaagaaactcactcaaaactgctcaactacatggaaactgaacaacctgctcctgaatgactactgggtacataacgaaatgaaggcagaaataaagatattctttgaaaccaacgagaacaaagacacaacataccagaatctctgggacacattcaaagcagtgtgtagagggaaatttacagcactaaatgcccacaagagaaagcaggaaagatctaaaattgacaccctaacatcacaattaaaagaactagagaagcaagagcaaacacattcaaaagctagcagaaggcaagaaataactaagatcagagcagaactgaaggagatagagacacaaaaaacccttcaaaacatcaatgaatccaggagcttgttttttgaaaagatcaacaaaattgatagaccgctagcaagactaataaagaagaaaagagagaaggatcaaatagaagcaataaaaaatgataaaggggatatcaccaccgatcccacagaaatacaaactaccatcagagaatacctataaacaccctctacgcaaataaattagaatatcctagaagaaatgggataaattccctggacacatacactcttccaagactaaccccaggaagaagttgaatccctgaatagacctacaacaggctctgaaattgaggcaataatcaatagcttaccaacgaaaaaaaagtccaggaccagatggattcacagccgaattctaccagaggtacaaggaggagctggtaccattccttctgaaactattccaatcaatagaaaaagagggaatcctccctaactcattttatgaggccagcatcatcctgataccaaagcctggcagagacacaaccaaaaaagagaattttagaccaatatccttgatgaacattgatgcaaaaatcctcaataaaatactggcaaaccgaatccagcagcacatcaaaaagcttatccaccatgatcaagtgggcttcatccctgggatgcaaggctggttcaatatacgcaaatcaataaatgtaatccagcatataaacagagccaaagacaaaaaccacatgattatctcaatagatgcaggaaaagcctttgacaaaattcaacaatccttcatgctaaaagctctcaataaattagatattgatgggacggcaattaggcaggagaaggaaataaagggtattcaattaggaaaagaggaagtcaaattgtccctgtttgcagacgacatgattgtatatctagaaaaccccattgtctcagcccaaaatctccttaagctgataagcaacttcagcaaagtctcaggatacaaaatcaatgtgcaaaaatcacaagcattcttatacaccaacaacagacaaacagagagccaaatcatgagtgaactcccattcacaattgcttcaaagagaataaaatacttaggaatccaacttacaagggatgtgaaggacctcttcaaggagaactacaaaccactgctcaaggaaataaaagaggatataaacaaatggaagaacattccatgctcatgggtaggaagaatcaatatcgtgaaaatggccatactgcccaag

SEQ ID NO: 129802 - DNA, 1563 bp, Homo sapiens
atgactacttccatgctcaacgcaaaactactaccatctgcgccatccgccgcagtggtcgtcgtgcgtgtggtggtggtcgtcggcaatgcgcccacctcccggaaagtcggcccagaagaaaaggactggagcatggcaagttcgggcacaacatcgacgcgtaagcgctttaccggcgcagaatttatcgttcatttcctggaacagcagggcattaagattgtgacaggcattccgggcggttctatcctgcctgtttacgatgccttaagccaaagcacgcaaatccgccatattctggcccgtcatgaacagggcgcgggctttatcgctcagggaatggcgcgcaccgacggtaaaccggcggtctgtatggcctgtagcggaccgggtgcgactaacctggtgaccgccattgccgatgcgcggctggactccatcccgctgatttgcatcactggtcaggttcccgcctcgatgatcggcaccgacgccttccaggaagtggacacctacggcatctctatccccatcaccaaacacaactatctggtcagacatatcgaagaactcccgcaggtcatgagcgatgccttccgcattgcgcaatcaggccgcccaggcccggtgtggatagacattcctaaggatgtgcaaacggcagtttttgagattgaaacacaggccggtatggcagaaaaagccgccgcccccgcctttaccgaagaaagcattcgtgacgcagcggcgatgattaacgctgccaaacgcccggtgctttatctgggcggcggtgtgatcatgcgcccgcacggcagcttcagcgtttgcaccttgggtaaatacggctacgcgaacggaacggccagtaccgtgcggcagtacagttgcaccacgtacgttctggtcagatttacgagcgtcgatgccgaggttaacagctacgtccacgctttctacgaatttagcagtcgccagctctttcagcagtgcgatagcttcgttgatgtcgtactgtttggttgcatcaactttctcgcggataacacgcatgcgcttggtcagtttagccatttcttagtcctccactaccaggcccatggaacgtgcagtaccttcgatggagcgagtcatcgcttcaatgtcggcaccagtcatgtcggcagctttggtctgcgcgatttcctgcagctgagcgcgggaaattttacccactttgtctttgttcggcttaccggaaccagacttgataccagccgcttttttcagcagaactgctgccggcggggtcttggtaacgaaagtgaaagaacggtcagcgtaaacggtgattactaccggaatcggcagacctttttcgatggaatcagtttttgcgttgaacgctttgcagaattccatgatgtttacgccctgctgacccagagccggacctactggcggactcgggttagccataccagctgcaacctgcagcttgacataggcttgtactttcttagccattataaattcctcaagttgggtaataacgcctctgagaggctccccgtgatataa

SEQ ID NO: 129803 - DNA, 4335 bp, Homo sapiens
atggttgtcctgagtaacagaaaagatagaaaagggaaaggagaaaaagagaaaagcattgcttgcggcgagttggggaaggcaaggagctcagagtggccagagaaaggcccatccattacagcaacactgaatcaaaagttcaggcggctccttatcagttgtgaagggatcttttctagcagtcctattagcctgcaagtttccctttccgaggaaaaaaaagtcagatgtaataggcctctaactggatccaaaccagttaattatcagatccaatccgatcccggacccagtccagtttctgtcatgacttccaaacccagtttggatcagaaatttgctcaaactcagctccaaacacaaatctgtggagctttggaaccggagagagaacttaccatgatatccagctgctccaagagagaaacggcacaatgggtctggcagaaaatcttatttgtggatatttccatcaactttgttcataattgcctaactggaaagaatccaaatgtccttcaactggtaaacagcggcattcctgtggaaactgatgtctatgcacggtgcgaaagatacatctataccgtcattggtggcttatgcttttgcatgtatgctttcaaggtgaaatggcaagtagtcgagtgcaagtgcgggcagcagacccggaagtgcgcatgcagagacgtgaagcccgggccacgacgacgacccctcaggtaccgatgttttcagaaaccctcaaacagattgggtagcgcttccctgggggcaggtttctgggcaggccgcagagacgcgaagtccggccacgacgacgacccctcaggggccctgttttctgttacaatggatcgagatttagaacaggctctggatcgcgcagagaatatcattgaaattgcccaacagagacctcctagaaggagatactcacctagggcgggaaaaactctgcaggaaaaactttatgacatttatgttgaagaatgtggaaaagagcctgaggatcctcaggaattgagaagcaatgtaaacttgttagaaaagcttgttaggagagagtccttgccatgtttactggtcaatctatacccaggcaatcaggggtattctgtgatgctccagagagaagatgggtcctttgcagagaccattcggctgccttatgaagaaagggcattgctggactacttggatgcagaagaattaccccctgctttgggtgatgtcctggataaagcttcggttaacatttttcatagtgggtgtgtcatagtagaagttcgtgactacaggcagtccagtaatatgcaacctcctggttaccaaagcaggcatattcttctacgtccaacgatgcagactttagcccatgatgtgaagatgatgacaagagatggccagaaatggagccaggaagacaagcttcagcttgagagccagctgatcttagcgacagctgaaccactgtgtcttgatccttctgtagcagttgcctgcactgcaaacaggctgctgtacaacaagcaaaagatgaataccgacccgatgaaacggtgcctccagaggtattcgtggccctctgtaaagccacagcaggagcagtctgactgtccacctcctcctgagctgagagtgtcgacttctggccaaaaagaagaaagaaaagtaggtcagccttgtgagctgaacattgctaaagcaggaagttgtgtagacacgtggaaaggcagaccctgtgatttggccgtgccttcagaagtggatgtggagaaacttgctaaagggtatcagtccgtcacagctgctgacccacagctcccagtctggccagcccaggaggtagaagacccttttggatttgcgttggaagctggctgtcaggcctgggacaccaagccaagcatcatgcagtcgtttaatgatccgcttctctgtggtaaaatacggccacgtaaaaaagccaggcagaagagccagaagtctccctggcagcccttcccagatgaccattcagcttgtctcaggcctgggtcagagactgatgctgggagggcagtgagtcaggcccaggaatcggtgcagagcaaagtcaaaggtccaggcaagatgtcacacagctccagtggcccagccagtgtcagtcagctctcttcatggaaaacaccagaacagcctgatcctgtgtgggtccagtcttcagtatcggggaagggagagaaacatccacctccccgcacccaacttccctcaagctcaggaaagatttcctcaggtaacagttttcccccacaacaggcaggcagccctcttaagcgtccattttctgctgctgctgctattgctgctgctgctgctgctgctgctgctgctgctgctgctgctgctgctgctgctcctgctcctgctctagctgctgctgctgctcctgctctagctgctgctgctgctcctgctctagctgctgctgctgctcctgctcctgctcctgccgctgctcctgctgtagctgctgctcctgctgctgctgcttctgcggcaccaagtcattctcagaagccctctgtgcctctcattcaagctagcaggccctgtccagctgcccagccccccaccaaattcataaaaatagcgccagccattcagttgaggacaggctccactggcctaaaggccatcaatgtggagggcccagtccagggagcccaggctttggggagcagtttcaagcctgtgcaggcccctggctcgggtgcccccgctcctgcaggaatcagtggcagtgaccttcagtcctcaggaggtccactaccagatgcaaggcccggtgcagtgcaggcatcttctccagcaccccttcagtttttcctaaatactccggaaggtctcaggcctctgacactcctccaggttccgcagggctcggcggttctgaccggcccgcagcagcagtcccatcagctggtttccctgcagcagctccagcagcccacagctgctcatcctcctcagccagggccacagggttccgcactaggtttgagcacgcaagggcaggccttccctgctcagcaacttcttaaggtgaaccccactagagccagaagtggtctgcagccccagccccagcctgctgtgttgagtctgcttggctctgcccaggttcctcagcagggtgtccagctcccctctgtcttgaggcagcagcagccacagccacagccgccgaagctgcaactgcaaccgcagtggcagccaaagccacggcaggagcagccacagtcgcagcagcagcagccgcagcatatccagctccagactcagcagttgagagtcttgcagcagccgcagcatatccagctccagactcagcagttgagagtcctgcagcagccagtgtttttggcaacaggcgctgttcagatagtgcagccacatccagtgcttaatagccatgtatggctagtggctattgtgtgggtcagcgcagttctagagggacaggagcaaagcagattatggggacagagcatcaggcatgacctgggtttggggcacacaggtggagtgagatttatgatgctgattgcatgtagtgggctggagcttcttgagatcctcatggcctatggtcatctgggccaggacctgcaggatcaagtcgccccagccatggagcgaggagggtggaaaaggatctttgcaggagaggaggtcaaggagttgaaggcccaggctactggaaggattatctatgtggataccaaaatcatcaagaattcatactgctggcatagtgttgaagaggatgataatgagtcaggccctagaatcttcaagaatactcaggtaactgtaactgaagtcaaccaagtaggtctgggtgggtgggccctgagaattagcatttccaagtttccaggtgttgctgctgctgctgctggatcagggaccatccacattttgagaacctgtctggatgcaaatcacatggtggccctccaggatccagtctggagagtagctgcttctggtttggtccagacaatggaggacaccagtagatctgagataggaagagagaggcaggcgtacttattcctgcagcccactccctgccaggctatgctggtcagcagcttttttcctctgtgtgtccgtggaaatcgactttgggttaagagtagtctggttatccatccgtggtgtttgcggaggtttcacaaatgcatacacatcccttatcaaggacttgctggccagtcaaatagtagacctttgtgggggtcagactggcatctgacatcagatggcatcaccatctga

SEQ ID NO: 129804 - DNA, 2322 bp, Homo sapiens
atgcgcatagacggggcccaggagctgaccctggccctcccgttcgcttccggtgtagcatgcagagacgtgaagcccgggccacgacgacgacccctcaggtaccgatgttttcagaaaccctcaaacagattgggtagcgcttccctgggggcaggtttctgggcaggccgcagagacgcgaagtccggccacgacgacgacccctcaggggccctgttttctgttacaatggatcgagatttagaacaggctctggatcgcgcagagaatatcattgaaattgcccaacagagacctcctagaaggagatactcacctagggcgggaaaaactctgcaggaaaaactttatgacatttatgttgaagaatgtggaaaagagcctgaggatcctcaggaattgagaagcaatgtaaacttgttagaaaagcttgttaggagagagtccttgccatgtttactggtcaatctatacccaggcaatcaggggtattctgtgatgctccagagagaagatgggtcctttgcagagaccattcggctgccttatgaagaaagggcattgctggactacttggatgcagaagaattaccccctgctttgggtgatgtcctggataaagcttcggttaacatttttcatagtgggtgtgtcatagtagaagttcgtgactacaggcagtccagtaatatgcaacctcctggttaccaaagcaggcatattcttctacgtccaaccatgcagactttagcccctgaggtgaagacgatgacaagagatggcgagaaatggagccaggaagacaaatttcctcttgagagtcaactgatcttagcgacagctgaaccactgtgtcttgatccttctgtagcagttgcctgcactgcaaacaggctgctgtacaacaagcaaaagatgaataccgacccgatggaacagtgcctccagaggtattcgtggccctctgtaaagccacagcaggagcagtctgactgtccacctcctcctgagctgagagtgtcgacttctggccaaaaagaagagaggaaagtaggtcagccttgtgagctgaacattactaaagcgggaagttgtgtagacacgtggaaaggcagaccctgtgatttggccgtgccttcagaagtggatgtggagaaacttgctaaagggtatcagtccgtcacagctgctgacccacagctcccagtctggccagcccaggaggtagaagaccctttcagacatgcatgggaagctggctgtcaggcctgggacaccaagccaaacatcatgcagtcgtttaatgatccgcttctctgtggtaaaatacggccacgtaaaaaagccaggcagaagagccagaagtctccctggcagcccttcccagatgaccattcagcttgtctcaggcctgggtcagagactgatgctgggagggcagtgagtcaggcccaggaatcggtgcagagcaaagtcaaaggtccaggcaagatgtcacacagctccagtggcccagccagtgtcagtcagctctcttcatggaaaacaccagaacagcctgatcctgtgtgggtccagtcttcagtatccgggaagggagagaaacatccacctccccgcacccaacttccctcaagctcaggaaagatttcctcaggtaacagttttcccccacaacaggcaggcagccctcttaagcgtccatttcctgctgctgctcctgctgtagctgctgctgctcctgctcctgctcctgctcctgctgctgctcctgctttagctgctgctgctgtggcggcggcggccggtggggcggcaccaagccattctcagaagccctctgtgcctcttattaaagctagcaggcgccgtccagctgccgggcgccccaccagattcgtaaaaatagccccagccattcaggtccggacaggctccactggcctaaaggccaccaacgtggagggcccagtccggggagcccaggaatcagtggcagtggccttcagtcctcaggaggtccactaccagatgcaaggcccggttcctcagcagggtgtccagctcccctttgtcttggggcagcagccacagccgctgctgctgctgcagccacaaccacagccacagcagatccagctccagacacagcctttgagagtcctgcagcagccagtgtttttggcaacaggcgctgttcagatagtgcagccacatccagaacccccggcgatgacgcagcctaaaaccactgctacgttcagccgcaaccagatcttcatctgtccctggtccctcatctgtgccctagatccatga

SEQ ID NO: 129805 - DNA, 1876 bp, Homo sapiens
  misc_feature (1)...(1876): n = a,t,c or g
gtgtgtgagtgggtgcttcctatcagagggcccctcagatcagagctgcggggtaccgagctgaggtcgtaccaaaaggttgcagacgataaagctatcgtcggtggtatcgcccgtctcgatggtcgtccggtgatgatcattggtcatcaaaaaggtcgtgaaaccaaagaaaaaattcgccgtaactttggtatgccagcgccagaaggttaccgcaaagcatctctgcgttgggcgaagcgtagccgtgagcgttttgacagtctcggaaacaaaaatgcgctgtttggtatcatccagggcagcgtttacgaagatttacgtgatatttctgttaaaggtctggtagatatcggttttgatggctacgctgtcggcggtctggctgtggcgtcgtcgatgntgtacgactcatatatcgtcgtcatcgatgatgcggacattactagaggcgatgatgccgtacctcgtgatcatcattcatcgacatcgatggtggtgttcagacatatcagactcgacgtcatagtcgtcgacggagatgatcagcatcgtcgcatggttggacgacgatgtcgatccgcgtggttccgtcgaggctcgctggacgttgatcaggtgattggtgataccgccgcggggcgcctgaatgtgatgggcgatataacgcgcgatgccagacgcgacaaagtcaaaaatgagcgttacggcgtcgccccttctgtcgcttttggccttggtacagcgaatcgtttgtatcttaattatctgcatgtcacccagcacaacacgccagacggagggattccgaccatcggtttgccgggctattctgccccatctgcgggaacggcggccctgaatcattccggaaaagttgatactcataacttttacggcacggattccgattacgacgattcgaccaccgacaccgccaccatgcgttttgagcacgacatcaacgataacaccaccattcgcaatactacccgttggtcgcgccttgacctggtcacgcacggcgaataccaaagatgtgagtaataaaattctcaccaaccagaccaacctgacctcgacgttctataccggttctatcggtcatgatgtcagtaccggcgtggaatttacccgtgaaacgcagactaactacggcgttaatccggtgacgttacccgcggtaaatatttatcatcctgacagcagcattcatcccggcggcctgacgcgcaacggcgcaaacgccaatggtcagacggataccttcgcaatttacgcctttgatacgctgcaaatcacccgtgattttgagctgaacggcgggatccgtctggataattatcatactgaatatgacagtgccaccgcctgcggcggcagcggacgcggtgccatcacctgcccaactggtgtggcaaaaggttctccggtcaccaccgtcgacaccgccaagtcgggcaatctgatgaactggaaagccggggcgctgtatcacctgacggaaaacggcaatgtctatattaactatgccgtttcccagcagcctccgggcggcaacaacttcgcccttgcgcagtctggcagcggtaacagtgccaaccgcaccgattttaatccgcaaaaagccaacaccagcgagattggcaccaaatggcaggttcggggatcctctagagtcaacgtcatgcacgaagtcaacacaccacatcagtgcgttcggtttcgtccagcccggagtgcgcctgggtgctgtcaaagtccatgccaccgttctggcaagcatatgcaatacggtttgtcgaagtgccagcccggccagtacaacagtgtcaaaagtggcgaaagggtgaacggggttacgtttcagtga

SEQ ID NO: 129806 - DNA, 441 bp, Homo sapiens
ccccgcgttgtgcggcgccacatccggtatgctttctccaagcaaccgctccgggttgaggcccatcttgacgattccaagaccacccccttgagcaagaatgccatcccctctgggtcccccatgcctgcccgtcatggacccagagaccacccttgaggagcctgagactgcccgcctccgcttccgagggttctgctaccaggaggtggcaggtccccgagaagccctggcccggctgcgtgagctgtgttgccagtggctgcagcctgaggcacactccaaggagcagatgctggagatgctggtgctggagcagttcctgggcacactgcctaccgagatacatgcctgggtgcgcggtcagcggccaggcagtcctgaggaggccgctgccctaatcgaaggactgcagcatgaccctgggcaactgttgggctg

SEQ ID NO: 129807 - DNA, 530 bp, Homo sapiens
cccgccttcgggggctccgcgcccagcgagcgcttggagctgcacgtggacggaccccctcccaggcctcaagctccgggcgacgtggagtggggcggtcctggcgggccgagatgccgatcgtgcgctgcgagggaccaatccccgacgtcaccttcgcagctgctgcgcgagggcgagacgaaggccgtgaagacggtccgcacccccggggccgcgggcgaacctcgagctgatcttcgtggggccccagcacgccgggcaactacaggtgccgctaccgctcctgggtgccccacaccttcaaatcggagctcaacgaccctgtggagctcctggtggcataaagctgatgcagccgcacggcccagggtgctgttggtgtcctcaaaagtgccggggattttggactggctccctcccctcctgttgcagcacaaggccggggtctttggggggctggagaagcctccctcattcctcccccccattaataaatgtgaagagaggctctgaaaaaaaaaaaaaaa

SEQ ID NO: 129808 - DNA, 2094 bp, Homo sapiens
atgaagccggggctgaggcgcaggcgcgggcgcggcctggggtgtggcctggggcctcagctccgggcgacgtggagtggggcggtcctggcgggccgagatgccgtcctgcgctgcgagggacccatccccgacgtcaccttcgagctgctgcgcgagggcgagacgaaggccgtgaagacggtccgcacccccggggccggggcgaagctcgagctgatcttcgtggggccccagcacgccggcaactacaggtgccgctaccgctccttggttgcccacaccttcgaatcggagctcagcgaccctgtggagctcctggtggcagtcgcagctaccctcaacatccacctgcgacttgtgcacatgctgcacataccagcagctggcgagggctccttccgagagggcacccatttcctgaaaccatcccctgtgaaaatgccccttgttttcagagtaggaaggagaagagtgctgaatcaaggcccccaaggagtccccattccaatccccagaagctgtgaacatctcaattggcaaaagggactctgcggtgtgactaagtgtgcagcccctcttctcagaggtcccccttgtccagccgtacttcgaaaggaaatcccctttgtgtctctcaagccgggactgatgagttccaaggccagtgaggctgaacccctgggcccaagacttggcagccaccagtcaacagctgctgcactgggaccaaggtataatggctcagcagatgccatacgtcctcacactgcatgggctgtaattcaaaccacaatctcgcgatttacatggtctttgacccaagtcaacgttccgtctcggactgtttctttggccgtgaggcgggaccgttatatgacatcaaggaccacgaccaatccggaggaaggttgtagaggaaccttttgggctagacggaatgggtgcagcccaagcgcatgcgcagttgcagaagcggccctagaagcgtgcctggcggatgtccgctaccccgtagttgccctgtcttgtgggcgcctgcaaaagcgcagagatttccgtgagaccaacgcagccatgtctaataaagaaaaaagtctggccagcgctcgcttctttgtggaggtacaggtcactctaggtgccctgtgcacagtccaggccacggggcaaagcatgctggtgttcagcaccacccagatgtcctcgtactcagagaagttccttacttccaagcatgcctccttgagtcccaggctccagctggctgataggtggagagaccaaggcatgaagtggcagagcccacagtggggggagctcaggccagcagcctcccatacagcagagcaggaaccgggcctggctgcttcaaaggcctttcgtgacctgcagaacttgtccaactctgcatttttgtctttaaccagtttgagtgctggccatcaatgcatttctgccattgtggtcatgatgtccaagaaggaaataaccccccaggggcaactggcagcagcttcctttggagaactgcagccagtcgctctgaagtgtccttggctgaaaagtcaacatgtagagtcttggttaaatgcttctggctgcagccctgaggcacactccaaggagcagatgctggagatgctggtgctggagcagttcctgggcacactgcctcccgagatccaggcctgggtgcgcggtcagcggccaggcagtcctgaggaggccgctgccctagtcgaaggactgcagcatgaccctgggcaactgttgggctggatcacagcccatgtcctgaagcaggaggtgctccctgcagcccagaagacagaggaaccacttgggagcccccacccctcagggacagtggagtcccctggggaaggtccccaggacaccagaatagaggggtctgtccagctcagctgcagtgtgaaggaggagcccaatgtcgatggacaggaagtggcaccctccagccctccacttgcagcacagtcccctgaggggaaccatggacaccaagaaccagcctccacatccttccacccacccaggattcaggtgagcagccccaagtgggaagtatag

SEQ ID NO: 129809 - DNA, 208 bp, Homo sapiens
atgctgagactcaaatctgctaagattgcccagaatgaaaatcttatctcctgtaaagaaagagctgaaattgtggaaaaacagacacaagcttttatcatgcgagtggctgacctgcaactaaagaagacagatggatcttggaaaatgacagtggattatcataagcttaaccaagtggtgactacaattgcagctgctgtaccag

SEQ ID NO: 129810 - DNA, 373 bp, Homo sapiens
aggaagtggcacaaatgcccagggtctccacccctgccaccctgccttctctcccccagcctgcactgatggccccgtggacagttccctatgatcagttgatggaggaagagaaagctagggcacgatatgcaggcaccatccaaaagtggacagctgcagcactacagcccctttctaggacatccctgaaggacagtggtgaagggacttctaagtggggccgttctgtggacaccactcagcctctttccccagccatccctgtcatcttccaataggcccatgaacaaagtggccatagtggcatggatggaggttatgcatgggctctgcaacatggacttgcactcaccaacactgacctagccat

SEQ ID NO: 129811 - DNA, 266 bp, Homo sapiens; identical to SEQ ID NO: 117721

SEQ ID NO: 129812 - DNA, 1460 bp, Homo sapiens; identical to SEQ ID NO: 121826

SEQ ID NO: 129813 - DNA, 1569 bp, Homo sapiens; identical to SEQ ID NO: 119655

SEQ ID NO: 129814 - DNA, 981 bp, Homo sapiens
atggttgcaattgccaaggttcttattgcctataaagaagacagtgacagccacaaccaacctaacacgagaatgacggtttctaagggccccgtgtctgccgtggagggtgggagaaggggacaggacagtgatgattgcgtggaagaaaatgatgctgtgaggacctggccaccatcaaggatcctgagaactgagtctcaccccagcccacacacatgctcctggcgaagacacctgctgtcctcctgcccctacacagggatgagcttccccatccccagtagtggcaacatctcctcaacccatgctgtcatcagctttccacctttgtctgaggagatgaatcctatgctgcctaaggcaacagtgatgacctctcttgaggcagctgccaggcaaaacctaaagtcccggcaggcccctagatgtgaggttgagagtgtgactcacgaggaggtgtactacactcgaaaagaactgtttgagttctctaatttatatagaaagaaatctggagaacagatacgggaatggatattaaggaagacagatggatcttggagaataacagtggattatcgtaagcttaaccaaatggtgactccaattgcagctgctgtaccagatgtggggtttcattgcttgagcaaattaacacatctcctggtacctggtttgtgtcataatcttatttggagagaccttgattgctttttgcttccgcaaaatatcacactggtccattacactgatgacattatgcagattggatccagtgagcaagaagtagcaaacacactggacttattgcctgcactgatggcttcatggggaattccccatgatcaattgacagaggaagggaagactagagcctggttcacaaatggttctgcacgatatgcaggcaccacccaaaagtggacagctgcagcactacagcccctttctaggacatccccgaaggacagcagttaa

SEQ ID NO: 129815 - DNA, 1219 bp, Homo sapiens; identical to SEQ ID NO: 117723

SEQ ID NO: 129816 - DNA, 469 bp, Homo sapiens
atgcaacctgaactgcctgtcatgaactgggtgctttctgacccatctagccataaagtgggtcatgcacagcagcattccatcacaaatggatgtagtatatacataatcgggttcgagcagttcctgaagacacaagtaagccagaattcaaggtcgaggaatcaaggagtggaagtagaagtggcaccactcaccgtcacccctagtgatccattagcaaacgttttgcttcctgttcctgcaacattaccttctgctggcctagagatcttagttccagaggaaggaaggctgccaccaggagacacaacaatgatgccattaaactggaacctgagattgccacatggacactttgggctcctcctacctttaaatcaacaggctaagaagggagttgcagtgttgggtggggtgattgccctggactgtcaagatgaaatcagtctactactctacaagggag

SEQ ID NO: 129817 - DNA, 2715 bp, Homo sapiens; identical to SEQ ID NO: 120789

SEQ ID NO: 129818 - DNA, 578 bp, Homo sapiens
acctaaagtcccggcaggcccctagatgtgaggttgagagtgtgactcacgaggaggtgtactacactcgaaaagaactgtttgagttctctaatttatatagaaagaaatctggagaacagatacgggaatggatattaaggaagacagatggatcttggagaataacagtggattatcgtaagcttaaccaaatggtgactccaattgcagctgctgtaccagatgtggggtttcattgcttgagcaaattaacacatctcctggtacctggtttgtgtcataatcttatttggagagaccttgattgctttttgcttccgcaaaatatcacactggtccattacactgatgacattatgcagattggatccagtgagcaagaagtagcaaacacactggacttattgcctgcactgatggcttcatggggaattccccatgatcaattgacagaggaagggaagactagagcctggttcacaaatggttctgcacgatatgcaggcaccacccaaaagtggacagctgcagcactacagcccctttctaggacatccccgaaggacagcagttaa

SEQ ID NO: 129819 - DNA, 461 bp, Homo sapiens; identical to SEQ ID NO: 128797

SEQ ID NO: 129820 - DNA, 1374 bp, Homo sapiens; identical to SEQ ID NO: 117725

SEQ ID NO: 129821 - DNA, 905 bp, Homo sapiens
tttgtggtgataactgtgtgtttgaaagctggattggagacatcatattggacatggacaatgagtttagtgactctatacataatacctttggccatatgtggagaaccaaggaacataatgaagctggttggttgctcctaagttcagtggacaaagtaatgaaagaaaatgatgaactcagggattctatctcctggcttcagaagcagatactgagtctcaaatctgctaagattgccctgagtgagagtcttatctcctgcagggaaagagctgaaattgtggaaaaacagacacaagctgttatcatgcgaatggctgacccgcaaggaaaggtgcatgcgcagcctcaacaggtgtctactgttaaagggaggacattgattggaaaagaatgggaccccgcaacttggaatggggacgtgtgggaggaccctgatgaagctggggacactgagtttgtaaactctgatgaaccttttttgccagaagtaacagcttccccatccccaagagacctctggccttttaccagggtaactttgcactggggaaagggaaatgatcagacattttggggactactggacactggctctgagctggtgatgattccaggggacccaaaatgtcattgtggtcctccagttaaagtagggggcttatggagctcagctgctgtagcagatgtggtttcattgcttgagcaaattaacacatctcctggtacctggtatgcagccattgacttggcaaatgcctttttctctattcctgtccataaagcccaccagaagcaatttgccttcagctgccataaagtgggtcgtgcacagcagcatccatcatcaaatggaagtggtatatatgtgatcaggcttgagcaggtcctgaaggcacaa

SEQ ID NO: 129822 - DNA, 1150 bp, Homo sapiens
accacgtggtagaaataggaggagaaagacattccaagagagaagaatgacactgaatgaaagcccagagaaaataggcaaatggattgaatgctatgggcacccacctgcctctaagctggtggaaatttatattcatacagtctttgtggaagacaaattgtcaatatgtatcagaagctttaacaagaaggcagatggatcttggagaatgacagtggattattgtaagcttaaccaagtggtgactgcaattgcagctgctataccagatgtggtttcattgcttgagcaaattaatacatctcctgatacctggtatgcagccattgacttggcaaatgcccttttctccattcctgtccataaggggtatatcaactctctggctttgtgtcataatgttatttggagagaacttgattgcttttcacttccacgagataccacactggtccattacattgatgacattatgctgattggatccagtgtgcaagaagtagaaaacaaactggacttactgggaaagggcagagatttgtcctcactgaaagagacacttactcatgggtttacctatcctgcacacaatgcttctgccaagactaccatccatggatgcacagaatgccttacccaccctcatgttattccacacagcattgcctctgaacaagacactcactttacagctaaagaagtgtggcaatgggctcatggtaatggaattcactggtcttaccatgttccccatcatcctgaaatagctagattgatagaatggtggaatggccttttgaaatcacaagtacaatgccacctaggtgacaatactttgcagggctggggcaaagttctccagaaggccgtgtatgctctgaaccagtatccaatatatggtactgtttctcccatagccaggattcatgggtccaggaatcaaggggtagaagtggaagtggcaccactcaccatcacccctagtgatccactagcaaaatgtttgtttcctgttcccaagacattatgtgctgcttgcctagaggtcttacttccagggggaggaatgctgccaccaggagacacaacaacgattccattaaacaggaagttaagatttccactagaacactttgggctcctctaa

SEQ ID NO: 129823 - DNA, 2352 bp, Homo sapiens
atgcagaaacaggagggggctttagtgaggaaaaaggggagaaagaaagaaagaattactgcaagaggaagagtaagagcaaaaggagaaaattggaaaattttaaacatgtatagagtaaagttcatatggaaccaaaaaagagcccgcattgccaagtcaatcctaagccaaaagaacaaagctgcaggcatcaccctacctgacttcaaactatactacaaggctacagtaaccaaaatagcatggtactggtaccaaaacagagatatggaccaatggaacagaatagagccctcagaaataatgccacacatctacaactatctgatctttgacaatcctgacaaaagcaagaaatggggaaaggattccctatttaataaatggtgctgggaaaactggctagccatatggagaaagctgaaactggatcccttccttacaccttatacaaaaattaattcaagatggattaaagacttaaatgttagacctaaaaccataaaaaccctagaagaaaacctaggcaataccattcagaacataggcatgggccaggactacatgtctaaaacaccaaaagcaatggcaacaaaagccaaaattgacaaatgggatctaattaaactaaagagcttctgcacagcaaaagaaactaccatcagagtgaacaggcaacctacagaatgggagaaaatttttgcaatctactcatctgacaaagggctaatatccagaatttacaatgaaccccaacaaatttacaagaaaaaaacaagcaaccccatcaacaagtgggcgaaggatatgaacagacacttctcaaaagaagacatgtatgcagccaaaagacacgtgaaaaaatgctcatcatcactagccatcagagaaatgcaaatcaaaaccacaatgagataccatctcacaccagttagaatggcgatcattaaaaagtcaggaaacaacagggattgcggagatcagtgccactatcaaggacttgaaaggtgcaggggtggtgattcccaccacatccctgttcaactcttccgtttggcctgtgcagaagacagataaatcttggagaatgacagtggattattgtaagcttaaccaagtgttgactccaaatgcagctgctgtaccagatgtggttccattgcttgagcaaattaacacatctcctggtacctggtatgcagccattgatttggcaaatgccattttctccattcctgtccataaggcccaacagaagcaatttgccttcagctggcaaggccagcaatatacctttactgtcctacctcaggggtatatcagctctctggctttgtgtcataatcttattcgaagagaccttgatggctttttgcttctgcaaaatatcacactgctggtccattatgttgatgacattatgctgattggatccagtgagcaagaagtagcaaatgcactggacttattggtgagacatttgtgtgtcagaggatgggaaataagtccgactaaaattcagggaccttctaccttagtaaaatttctaggggtccagtggtgtggggcctgtagagatattctttctaaggtaaaggataagttgctgcatttggcccctcctacaaccaagaaagaggcacaacgcctagtgggtctatttggattttggaggcaacacattcctcatttgggtgggctactccagcccctttatctagtgattcaaaaggctgccatttttgagtggaatccagaaccggagaaggttctgcaaaaggtccaggctgctgtgcaagctgctcttccacttgggccatatgacccaacagatccaatcatgcttgaggtgttagtggcagatagagatgctgtttggagcctttggcaggccctcataggtgaatcacagcagaggcctgtaggattttggagcatggccctgccatcttctgcagataactactctccttttgagagacagctctttgcctgttcctgggccttggtggaaactgaatgtttgactatgggtcatcaagtcaccatgcaacctgaattgcctatcatgaactggatgctttctgacccatctagccataaagtggttcaggcacagcagcattcaggaagtggcacaaatgcccagggtctccacccctgccaccctgccttctctcccccagcctgcactgatggccccgtggacagttccctatgatcagttgatggaggaagagaaagctagggcacgatatgcaggcaccatccaaaagtggacagctgcagcactacagcccctttctaggacatccctgaaggacagtggtgaagggacttctaagtggg

SEQ ID NO: 129824 - DNA, 864 bp, Homo sapiens; identical to SEQ ID NO: 115468

SEQ ID NO: 129825 - DNA, 140 bp, Homo sapiens; identical to SEQ ID NO: 124298

SEQ ID NO: 129826 - DNA, 536 bp, Homo sapiens
atggtccaggaggcttctgaggtgatcgggcagcttcagtcttcagctgctaagctgagaagatctgggaaggagtcagtcagagagtcttgggccagagttccaggggctctgggagtggttgccagtcccaaccccaagcgttgctttcaatcttccttttctaccgacccatctgacctctcccttcatcccaagattgctcctcctcagttagcatttaggctctttttcgtcaaatatgaaaacccagcccagtgcatggctcatttggcaacaaccctgagacgctttacagccctagaccctaaaaggtcaaaaggccgtcttattctcaaaatacgttttattacccaatctgctcctgacatcaaataaaactccaaaaattaaattccggccctcaaaccccacaacaggatttaattagcctcaccttcaaggtgtacaataatagaaaacagttgcaattccttgcctccactgtgagacaaaccccagccacatctccagcacacaagaacttccaaacacct

SEQ ID NO: 129827 - DNA, 726 bp, Homo sapiens
atgagcaccctcctcaataaaaccttgacagccctgcccaaggagcttaaccctcagttgcctgacccaagtcaagacggtactgcagggacaccagcaatatcaacgacgacaacgggggaaatccgcaaaagcagggttatgacaactgagatcacctctaaagtggaaaaaagcccaacgacagccactggcaatagctcatgtccttctactgagaccgaggaagaaaaggcaaaacggcttctttactgttcgctatgcaaggttgctgtcaactctgcctcgcagctggaggcgcacaacagtggtactaagcacaaaaccatgttagaagcccggaatggaagtggcactatcaaagcctttcctagggcaggagtgaaaggcaaaggacctgttaataaaggaaacacaggcctccaaaataaaacatttcactgtgaaatctgtgatgtgcacgtcaactcggaaacgcaacttaaacaggcttccgaggtgatcgggcagtgtcagtcttcagctgctaagctgagaagatctgggaaggagtcagtcagtgagcctcgggccagagttccaggagctctgggagtggctgccagtaatactgtgtctggaattggtgggttcttggtctcactgacttcaagaatgaagccacggaccctcgtggtgagtgtcacagttcttaaaggcggcgtgtccagagttcgttccttctga

SEQ ID NO: 129828 - DNA, 552 bp, Homo sapiens
caggcaaggggcagtgcaaaaatttaaaaataaaaaataacgtttttaagctattattatatgacatgtgttaattcatttaaatctcctaacaatcctatgatgtggtaaatactattattttcattcctgtttcattgatgaggaaagaccttgtctaggagaggtaaggcaatttgcctggggtcacagaaataagaaatgaaagagctggcattgaagctaagcagcctgactctagggctcatagtcagaaatgcgatctctctggaaatgatataattatagcactgcatttattcccaccaccaacaccatcattggtcatctccgctgccgtcaccaaccttgtctacagtttaggctagaggggcggctaggtccatgaagcacaccagtggtgatgagacaaagagacaaaaacttgactaagtaagactgacaggaataagggcttcaagggaagaagtcaccaaggaagctggtccccggaagagaataatgtgcagcggaatggatgaactaaatggaggcctgcaactgtgaacgtga

SEQ ID NO: 129829 - DNA, 1056 bp, Homo sapiens
atgctggctgctccttgtgctggctgccctgtgttggagaagctgcctgagctgccagtacctggtgtgggagaggctgcccacagtgcaggagtgtctgtgatggtccagaaggcttccaaggtgattgggcagcgtcagtcttcagctattaagctgagaagatctgggaaggagtcagtcagagagccttgggccagagttccaggggctctgggagtggctgccaggcaagttggacagtctgatttccagtggggtcccgtacagatagaacatggcttaggaggaatcccgggctgcaggcattccttggcccagtggccagatttccagcacttgaagcaagatcctggggcgggcagtcctggaggaacccctggctgctgcggttcaggcgttatgaagttcttgtgtgctggagatgtggctgaggtttctctcacagtggaggcaaggaattgcaactcagaaatacgttgctacttggctgcctctgttctattattgtacaccttgaaggacagtgaagaaagttacaaaacttacctaagagtaaaatgggtcaaaagcatggttggagaattcaggggaggagtacctagccgcccctctagcctaactgtagacaaggttggtgacggcagcggagatgacaatgatggtgttggtgatcaaaccagccacaacactcccttaagccaaagactaatccagagcaaggccctaactctcttcaatcctctgaaggctgagagagatgaaaaagctgcagaagaaaagtttgaagctaacagaggttggttcatgaggtttaaggaaagaagctgtctctataacataaaagtgcaagaggaagcagcaagtgctgatggagaagctacagcaagttatccagaagatctagataagactattgatgaaggcagctacactaaacaacatattttcaatgtggacaaaatagccttcagttggaggaaggtgctatctaggattttcacagctagagagaagtcaatgcctagcttcaaagagcttcaaaggacaggctga

SEQ ID NO: 129830 - DNA, 534 bp, Homo sapiens
ccaggagtaagaggagcccagggtggtccctctatccccaggcagtgtgaagagtctgctattggtcctaaatttgcttggatcatctcttcctttcactggaagcaaggcatgttcaacatggaggctccttcttcccttttctttgtcaacatgtgtgcagtaaagaagcagacaacctggggccggccagacagaggattcatctggcagccacttccagagcccctggaactctggcccaaggctctccgactgactccttcccagatcttctcggcttagcagctgaagactgacgctgcccgatcgcctcggaagcctgacacttatactttctgctcccccggctccttcagttgtacccactctttgttgagtcccacaattaccattgttctcggcccggacttcaatccggtctcccacattattccagataccacacctgaccctcatgactgcatctctctgatccacctgacgttcaccccatttccccacatttccttcttccctgtttctcaccctcat

SEQ ID NO: 129831 - DNA, 990 bp, Homo sapiens
ttttggacgctcgaaggcactgggaaggaactcccgggtttacgcacacgtccccggacgcgtgggcggacgcgtggggcaagatggcgggtgaaaaagttgagaagccagatactaaagagaagaaacccgaagccaagaagagttgatgctggtggcaaggtgaaaaagggtaacctcaaagctaaaaagcccaagaaggggaagcccccattgcagccgcaaccctgtccttctcagaggaattggcaggtattcccgatctgccatgtattccagaaaggccatgtacaaaaaggaagtactcagccgctaaatccaaggttgaaaagaaaaagaaggagaaggttctcgcaactgttacaaaaccagttggtggtgacaagaacggcggtacccgggtggttaaacttcgcaaaatgcctagatattatcctactgaagatgtgcctcgaaagctgttgagccacggcaaaaaaacccttcagtcagcacgtgagaaaactgcgagccagcattacccccgggaccattctgatcatcctcactggacgccacaggggcaagagggtggttttcctgaagcagctggctagtggcttattacttgtgactggacctctggtcctcaatcgaggttcctctacgaagaacacaccagaaatttgtcatttgccactttcaccaaaatcgatatcagcaattgtaaaaatcccaaaacatcttactgatgcttacttcaagaagaagaagctgcggaagcccagacaccaggaaggtgagatcttcgacacagaaaaagagaaatatgagattacggagcagcgcaagattgatcagaaagctgtggactcacaaattttaccaaaaatcaaagctattcctcagctccagggctacctgcgatctgtgtttgctctgacgaatggaatttatcctcacaaattggtgttctaaatgtcttaagaacctaattaaatagctgactac

SEQ ID NO: 129832 - DNA, 1403 bp, Homo sapiens
  misc_feature (1)...(1403): n = a,t,c or g
tgtttccaaataagtttatttctaaaagacattttaattacattgatttattagaagcatttgtagtccttcatggtttcagaaaatcaattgttcagacctttttgaacatatctgattgtgatattcatactgtgtaactctgaatttaaatcaagttcagtggaaattaagatatgatgtattattttttagtgtatgtttcgtatctgaatttttgatgcagttaaaaaagccttaagaaaacgacaaaaaagctagagtgcagacaacctaaaatctctattttaaaacatcattttcctgaggccatgcagactcatatctaagtttttttcatttaaatagacttaattctaacaaatacttactttcataatgaaaaacttttttaagggtgggacagacatactagttacgaaatgaaagttttcaatcacagatcaggaagtataatgagattacatcaaatgtgaatttgtgtgcctaaagaattctcttcacttaagtcttattacttgcctgtcgaagaggcaagggcagaagacatcagtaccttgttgaaaccccggccgtgtagaacaggcctggccctctgccagggtaatatgggagacagacgtcctcggtgagcttggttgtaaaggcatctgctgcagctcaggaagcaatgaagagccgagacccaaggcatcatccacttccagaagggctccctttatgggctcttggcgacctgtaacactgttttagcacagaaattttgaacagtggtaacaggtacaataggtaaaccaaagtatataagcttatttggtgaatcttcatccctcattacggttttctggacagccgcacacggattcggtatggcacattccttcgaatacagataactttagcaccttattcctttggcccagacagctttgttgagcctggtgtcaatgcgcacatctggagttcccatctccttcatggcaaatttccgaatctctttgagtgcccgaggtgcacgcttcttgaagcccactccatggatgctgcttgtgaatggttgagggtggaattctccgggttaacacttcggttgaatgcaaaacgggcccttttttcttctcgccacacattctttggcgggagccattctgcagcgtccaagttggaaagaaaaagaaggagaaggttctcgcaactgttacaaaaccagttggtggtgacaagaacggcggtacccgggtggttaaacttcgcaaaatgcctagatattatcctactgaagatgtgcctcgaaagctgttgagccacggcaaaaaacccttcagtcagcacgtgagaaaactgcganccagcattacccccggggaccattctgatcatcctcactgggacgccacaggggc

SEQ ID NO: 129833 - DNA, 388 bp, Homo sapiens
cctccgctggtgatacccaggcaaacagggtctggagtggacctccagcaaactccaacagacctgcagctgagggacctgactgtcagaaggaaaactaacaaacagaaaggaacagcatcaacatcaagaaaaaggacatccacaccaaaaccccattgtgtatctgaaagtgacggggagaatggaaccaagttggaaaacactctgcaggatattatccaggagaactcccccaacctagtaaggcaggccaacattgaaattcaggaaataaagagaacaccacaaagatactcctcaagaagagcaaccccaagacacataattgtcagattcaccaaggttcaaatgaaggaaaaaatgttaagggcagccagagagaaag

SEQ ID NO: 129834 - DNA, 456 bp, Homo sapiens; identical to SEQ ID NO: 115056

SEQ ID NO: 129835 - DNA, 507 bp, Homo sapiens
atgcatttccagttccagagagaaattcacactggaaatataaatttaggaattttaaagttagtggtcacatttaaagctgcagaatacaaagagatcacctgtgtgagagaactgagtcctgaaacatacccgtgtttaaagatctgggagcctccgctggtagtacccaggcaaacagggtctggagtggacctccagcaaactccaacagacctgcagctgagggacctgactattagaagtaaaactaacaaacagaaaggaatagtatcaacatcaacagaaaggacatccacaccaaaactccaactaataaacagtgtagagaagagcttaaatgacctgctggagctgaaaaccatggcacgagaactacgtgacacatgcacaaacttcagtagccgattcgatcaagtggaagaaagagtatcagtgactgaagatcaaattaatgaaatgaagcaagaagagaagtttagagaaaaaagagtaaaaaagaaatga

SEQ ID NO: 129836 - DNA, 1839 bp, Homo sapiens
atgggccagcctctcaggcctcaggcaaattatagtcaaatacatcacccccctcaggcatctgtggcaaggcatccctctagagaacaactaattgattacttgatgctgaaagtggcccaccagcctccatatacacagccccattgttctcctagacaaggccatgaactggcaaaacaagagattcgagtgagggttgaaaaggatccagaacttggatttagcatatcaggtggtgtcgggggtagaggaaacccattcagacctgatgatgatggtatatttgtaacaagggtacaacctgaaggaccagcatcaaaattactgcagccaggtgataaaattattcagacctcagaaagtactactacagtaaaaagcaaagttgatgaaagagaaaaatatatgataggaaactctgtacagaagatcagtgaacctgaagctgagattagtcctgggagtttaccagtgactgcaaatatgaaagcctctgagaacttgaagcatattgttaaccatgatgatgtttttgagcctctgctggtgatacccagtcaaacagggtctggagtggacctccagcgaactccaacagacctgcagcagagggacctgactgttggaaggaaaactaacaaacacaaaggaatagcatcaacatcaacaaaaaggacatccacaccaaaaccccatcttttcccttttcataaggacaccagtcatattggatatgggaccaacctaactccagtctttagagcacaggacgatgaatctatggcgatcattctaactatgtcagttagtgatttcaattattcacggactagtctttcaaaaagaccaaatgcaagggttggttctgagcattctttattagatcctccaggaaaaagtaaagttcctcgtgactggagagaacaagtacttcgacatattgaagccaaaaagttagaaaagctggtgattgaaattactgccctggaacaagggagagggaataacccgcaacttcctcattacgctgggtggaaaattagcggcagggcccccgatcgtattgtccttaaaggtgtggaacgtttaggcggcggtgtctatcgcgttctgccggatcgtatcgaaaccggtactttcctggtggcggcggcgatttctcgcggcaaaattatctgccgtaacgcgcagccagatactctcgacgccgtgctggcgaaactgcgtgacgctggagcggacatcgaagtcggcgaagactggattagcctggatatgcatggcaaacgtccgaaggctgttaacgtacgtaccgcgccgcatccggcattcccgaccgatatgcaggcccagttcacgctgttgaacctggtggcagaagggaccgggtttatcaccgaaacggtctttgaaaaccgctttatgcatgtgccagagctgagccgtatgggcgcgcacgccgaaatcgaaagcaataccgttatttgtcacggtgttgaaaaactttctggcgcacaggttatggcaaccgatctgcgtgcatcagcaagcctggtgctggctggctgtattgcggaagggacgacggtggttgatcgtatttatcacatcgatcgtggctacgaacgcattgaagacaaactgcgcgctttaggtgcaaatattgagcgtgtgaaaggcgcatattctagagcgcttctcaagcgcatccaaaatatccgtaaggcccggcagttcgacgtctacgtcaatgaccagaaagttggatcgtttaaccctgatgttcggaatgcacaaaaggtcctgccaacattagcggactgcactaacgactga

SEQ ID NO: 129837 - DNA, 1951 bp, Homo sapiens
gctattctgtacctcatttccgatttttgtcagtttcctttttttttatctataaatttgttccgaccacgaggcatccctggtgtctctctaaatctgctgtgattctgggggctgccggattcggcaaattgtttgttgctcaatcaaaactcctttaaatttaattcaactgaagtttcttttaacaagtacaagatcatcattattttttgccaacccttataattgatccctctatctttagtccttttatttattttcttactcaattactgaaataaagaggagaaatgaactctagaggcagaaataatctcagcatcataaataaaaccgatttcccttttatagcactaaatgcccacaagagaaagcacgaaagatctaaaattgacaccctaacatcacaattaaaagaactagagaagcaagagcaaacaaattcaaaagctagcagaagtcatgaaataactaagatcagagcagaactaaaggagatagagacacacaacaaacccttcaaaaaaatcagtgaatccagggagctggttttttattttttatttttgaaaggatcaacaaaattgatagaccgctagccagactaataaagaaaaaaagagagaagaatcaaatagacacaataaaaaatgataaaggggatatcaccaccgatcccacagaaatacaaactaccatcagagaatactataaacacctctacgcaaataaactagaaaatctagaagaaatggataaattcctggacacatacaccctcccaagactaaatcaggaagaagttgaatctctgaatagaccaataacaggctctgaaattgaggcaataattaatagcttaccaaccaaaagaagtccaggaccagatggattcacagccgaattctaccagaggctaaaacagtgccgaaaagcacatctagacccagtgtctctcacacaccggagcggccccggagcgcgggaggaccggctgagtgacagcggagacgcgtcccgaggttgttggaacctgtcacagcacgccgccgtcacgtcgcccgagtctgaggagcggcgcatcaggaccctcagctgcaggtctgttggagtttgccggaggtccactccagaccctgtttgcctgggtatcagcagtggaggctgcagaacagtgaatattggtgaacagcaaatgttgctgcccgatcgttcctctggaagttttgtctcagaggggtaccgtccgtgtgaggtgtctgcccctactggggggtgccctccagttaggtgtctgatgatcaacactgtgtccttaataggtgtcaagtttactgaagtgtttgattcaataaacatatctgaacatctagagcttgcatgcctgcaggatcacaactccttgctagcaagggaacaaaactggacagaggatgagtttgacgaattaacagaagtaggcttcagaaggtgggtaataacaaactcctctgagctaaaggaggaagttcaaacccattgcaaagaagttaaaaaccttgaaacaagattagacgaatggctaactagaataaccaatgcagagaagtccttaaaggacctgatggagctgaaaaccatggcaggagaactacgtgatgcgtgcacaagattcagtagccgattcaatcaactggaagaaagggtaacagagattgaagatcaaatgaatgaaatgaagcaagaagagaagtttagagaaaaaagaataaaaagaaatgaacaaagcctccaagaaatatgggactatgtgaaaagaccaaatctacattggcttggtgtacctgaaagtgacagggagaatggaaccaagttggaaaacactctgcaggatattatccaggagaacttccccaacctagcaaggcagaccaacattcaaattcaggaaatgcagagaatgccataa

SEQ ID NO: 129838 - DNA, 1414 bp, Homo sapiens
aatcaggactacaggccctactgctcaatggatccttacctaaagatgaacaggagaggcccttggccctctgtgaaccaggtgtcaatcccgaggaacaactgattataatccaaagtcgtctggatcagagtatggaggagaatcaggacttaaagaaggaactgctgaaatgtaaacaagaagccagaaacttacaggggataaaggatgccttgcagcagagattgactcagcaggacacatgctgttcttcagctcaaacaagagctactgagggcaaatatggacaaagatgagctgcacaaccagaatgtggatctgcagaggaagctagatgaaaggaaccggctcttgggagaaatataaaaaagagctggggcgagaaggatcgccttcttcagcagcaccaggccaagttagaagaagcactccggaaactctctgatgtcagttaccaccaggtggatctagagcgagagctagaacacaaagatgtcctcttggctcactgtatgaaaagagaggcagatgaggcgaccaactacaacagtcacaactctcaaagcaatggttttctccttccaacgggcagggaaaaggagctactttcagttcaggcaacagagggaccagcgacctgcagcttgttcgagatgctctccgcagcctgcgcaacagcttcagtggccacgatcctcagcaccacactattgacagcttggagcagggcatttctagcctcatggagcgcctgcatgttatggagacgcagaagaaacaagaaagaaagcctccactggtgatacccaggcaaacagggtctggagtggacctccagcaaactccaacagacctgcagctgagggacctgactgttagaaggaaaactaacgaacagaaaggaatagcatcagcatccacaaaaaggacatctacaccaaaaccccatcgtaggtcaccaacatcaaagaccaaagcaccacattgcacttattctaaaatttaccacataattggaagtaaaacactcttcagcaaatgtaaaagaaaagaaatcacaacaaacagcctctcagaccacggggcaatcaaattagaactcaggattaagaaactcactcaaaatggcacaactacctggaaactggacaacctgctcctgaatgactgctggttaaataacgaaatgaaggcagaaataaagatgttctttgaaaccaatgagatcaaagacacaatgtacaagaatccctgggacacatttaaagcagtgtgtacaggggaatttatatcactaaatgcccacaagagaaagcaagaaagatctaaaattgacatccgaacatcacaattaaaagaactagagaagcaagagcaaacaaattcaaaactagtagaaggcaagaaataa

SEQ ID NO: 129839 - DNA, 3289 bp, Homo sapiens
  misc_feature (1)...(3289): n = a,t,c or g
atggcctgtgaccgactgagccaatcagaagaccacagctacccacctccagttgaccacggctatcatagattgcaaaaatggccagaaagtcttcccatccctgaatacataccctttttgcaatgtgcctttgcaactccttatatcaagagactccacctctgggggaagggcatagctgaacaaaagacagcagagagcttctgcagatttaaaacatcactgtctgacagctctgaaaagagcagtggttctctcagcaaggcatttgaaaaaaaaggggnncccnctttgnaagaaatggacagactgcctcctcaagcgggtccctgacccctgtgtagcctaactgggagacaccttcccagtaggggccaacagacaccctcatataggcagggtgcccctctgggatgaagcttccagaggaaggatcaggcagcaacatctgctgttttgctgttctacagtatttgctgtgctgcagcatttgctgtgctgcagcctccgctggtgataaccaggcaaacagggtctggagtggacctccagcaaactccaacagacctgcagctgagcgaacctgactgttacaaggaaaactaacaaacagaaaggaatagcatcaacatcaacagaaatggacatcaacaccaaaaccccatctgtaggtcaccatcatcaaagaccaaaggtagtataaaaccacaaagatcggggagaaaccagagcagaaaagctgaaaattctaaagaccagaggacctcttctcctacaaaggattgcagctcctcaccagcaacagaacaacgctggatggagaatgactttgatgagctgacagaagtaggcttcagaagcctggcagagacacaacaacaacaaaaagagaaatttagaccaatatccctgatgaacatcgatgtgaaaatcctcaataaaatactggcaaaccgaatccagcagcacatcaaaaagcttatccaccatgatcaagttggcttcatctctgggatgcaaggctggttcaacatatgcaaatcaataaacgtaatccatcacataaacagaaccaatgacaaaaaccacatgattatctcaatagatgcagaaaaggcctttgacaaaattcaacagcccttcatgctaaaaactctcaaaaaactaggtattgatgggacgtatctcaaaataataagagctatttatgacaaatccacagccagtatcatactgaatgggcaaaaactggaagcattccctttaaaagacaggacaagacaaggatgtcctctctcaccactcctattcaacatagcattggaagttctggccagggcaatcaggcaagagaaagacataaagtgtattcaattaggaaaagagaaagtcagattgtccctgtttgcagaggacatgattgtatatttagaaaaccccatcgtctcagccccaaatctctttaagctgataagcaacttcagcaaagtctcaggatacaaaatcaatgtgcaaaaatcacaagtattcctatacatcaataacagacaaagagagagccaaatcatgaatgaattcccattcacaattgccagaaggagaataaaatacctaggaatccaacttacaagggatgtgaaggacctcttcaaggagaactacaaaccactgctcaaggaaataaaagaggatacaaacaaatggaagaatatgccatgctcatggataggaagaatcaatatcatgaaaatggccatactggccaaggtaatttatagattcaatgccatccccatcaagctaccaatgactttcttcacagaattggaaaaaaactactttaaagtgtatatagaaccaaaaaagagcccatattgcaaagccaatcctaagccaaaagaacaaagctggaggcatcacactacctgacttcaaactacactacaaggctgcagtaaccaaaacagcatggtactggtaccaaaacagagatatagaccaacggaacagaacagagcccacagaaataatgctgcatatctacaaccatctgatctttgacaaacctgacaaaaacaagaaatggggaaatgattccctatttaataaatggtgctgggaaaactggctagccatatgtagaaagctgaaacgggatcccttccttacaccttatacaaaaattaattcaagatggattgaagacttaaatattagacctgaaaccataaaaaccctagaagaaaacctaggcaataccattcaggacatagccatgggcaaggacttcatgtctaaaacaccaaaagcaatggcaacaaaagccaaaattgacaaatgggatctaattaaactaaagaacttctgcacagcaaaagaaactaccatcagagtgaacaggcaacctacagaatgggagaaaatttttgcaatctactcatctgacaaagggataatatccagaatctacaatgaactcaaacaaatttacaagaaaaaaaaacaaccctatcaaaaagtgggcaaaggatataaacagacacttctcaaaagaagacatacaagcagccagcaagcacgtgaaaaaacattcaacatcgcgaatcttcatgcaaattaaaaccacactggggtaccatctcacaccagtcagaatggctactattaaaaagtcaaaaaacaacagatgttggtgtggatgtggagaaaagggaacgcttatacattgttggaggtcaggcccctctgctgcaggtctggtggagtttgctggaggtccactccagaccctgtctgcctgggtatcaccagcagaggctgcagaacagcaaagattgctgcctgttccttcccctggaagggaagcttcatcccagaggggtacctgccagatgccagccagagctctgctgtatgaggtgtctgttgacccctgctgggaggtgtctccaaatcaggaggcatgggggtcagggaccaacttgaggaggcagtctgtgtcttagcagagctagagcgctgtgctgggatatctgctgctctcttcagagccggcagacaggaatgtttaagtttgctgaagctgcgcccatagccaccccttcccccagttgctccatcctagggtgatgggggttttatctatggaacaggtatgcactctgggcctgagatgagaaggtgtgttgtgccctggggaaatggtgtcttgaacaagctaaacagtaacatatcatagggtgaactgatgtagtactccatgtctcagggaaatagaaaagtggtg

SEQ ID NO: 129840 - DNA, 909 bp, Homo sapiens
atggtaaatcaaaaacgatatcacatccctggagggactgcagagattagtggcaccatcaagaagttgaaaaatgcaggggtggtgattcccactacatccccactcaactctcccatttggcctgtgcagaagacagatggatcttggagaatgaccatggattatcataagcttaaccaagtggtgactccaattgcagttgctgtaccatatgtggttgcattgcttgagcaaattaacacattttcttgtacctggtatgcagccatcgacttggcaaatacctttttctccttttctgttcataaggcccaaagaagtaatttgccttcagcaggcaaggccagcaatatacctttactgtccacccttagtgataactactctccttttgagagacagctcttggcctgttactgggcttcggtggaaactgaacatttgactatgggttatcaagtcaccatacaacttgaactgcctatcatgaactgggtgctttctgacccatctagccataaactgggtcatgcaaagcagcattccatcatcaaatggaagtggtatatacgtgatcgggctcgagcaggtcctgaaggcacagccaggattcacaggtccaggaatcaaggggtggaagtggaagtggcaccactcaccatcaccccaagtgatccactagcaagatttttgcttcccgttcccacaatattacattctgccggcctagaggtcttagttccagaaggaggaacactgccactgggagacacaacaacaattccatttaactggaagctaagattgccacctggacactttaggctcctcctacctttaaatcaacaggctaagaagggtgttacggtgtttgctggggtgattgaggctattaagatgaaataa

SEQ ID NO: 129841 - DNA, 912 bp, Homo sapiens
atggtgcttgaggtgtcagtgtcagatagggatgctgtttggcgcctttggcgggcacccataggtgaatcacaacagagatctctaggattttggagcaaggttctgccatattctgcagataactactttccttttgagagacagctcttggcctgttactgggctttgttggaaactgaccgtttgactgtgggtcatcaagtcaccttgcaacctgaactgcctatcatgaactgggtactttctgacccatctagccataaagtgggtcatgtacaccagcattccatcatcaaatggaagtggtatatacgtgatcagactcgagcaggtcctgaaggcacaaccacccctgtcatcacccaatggatgcccatgaacaaagtggccttagtggcagggatggagaaagggcagaggtttgtactcactggagtagatacttactctggatattggtttgcctatcctgcacacaatgcttctgccaagactagcatctatggattcacagaatgccttatccattgtcatggtattccacacagcattgcctctgaccaaggcactctctttacggctaaagaagtgtggcagtgggctcatgctcatggaattcactggtcttaccatattccccatcatcctatagcagctggattgatagaatggtggaatggccttttgaagtcacaattacaatgccaactaggtgacaatactttgcagggctggggcaaagatctccagaaggccatgtattctctgaatcagcgtctgatatatagtactgtttctcccatatccaggattcatgggtccaggaatcaaagggtggaagtggaagtggcaccactcaccatcacccttagtgatccactagcaaaatttttcttcctgttgccatga

SEQ ID NO: 129842 - DNA, 754 bp, Homo sapiens
atgcaaaataatgttgattcttttcaggagccacccccaacacccctgttttcttctagacctatagctagactaaagtccaagcaggcccctagaggtgaggctgagagtgtgacccatgaggagttagaatctataaggttacgagcaaaaacttctgacaaaataagctcactcacattcaggaggggctggggcaaagttctccagaaggccatgtatgctctgaatcagcatccgatatatggtactgtttttcccatacccaggattgatgggtccaggaatcaaggggtggaagtgaaagtggcaccactcaccatcacccttagtgatccactagcaaaatttttgcttcctgttctctcagcattacattctgctggcctagaggtcttagttccagagggaggaatactgccaccaggagcaggagacatgagaatgattcaattaaactggaagttaagcttgccacctggatactttgggctcctcctacctttaagtcaacagactaagaagggagttacagatttgggtggggtgattgacctggactatcaagatgaaatcagtctactattccatatcagaggtcaatgggaaactacaacagcccaatccagacaggactacaagtggtccagacccctcaggaatgaaggtttgggtcactccaccaggaaaaaaccacaacctgctgaggggcttgctgaaggcaaagggaatacagaatgggtagtagaagaag

SEQ ID NO: 129843 - DNA, 1509 bp, Homo sapiens
atgacagctgacactggcggtaagctggaagatcaactggaccgtcaacaggaacatctacctgatgctttccagtatggcaatctcagagtaactgaaattccaacaagaaagtttgccgacctctggtataaacaagtggaggaagaaaacagccagaaaatctcaaaaagtaagccaaccggccagagaaaagaaaatcagacaaatgatgtgctctcatttattcttcactttaatcctaaaatgttggtgcccacagcagaagtcacctgcagtacatctggtacagctgcagccttgcatggagttggcacctgtgccagcacctggagctgcctgtccatcacagctggcatgcctggctgtgcacagtggccaggccccacgcttacctgctcacacacccctcactgcttcatgcctagctcacacttggcagatggcctattgtgggaccttgtgatcatcggcaaggagtttggtgagtctatgcataatacctttgaccatatgtggaaaaagaaggaacatgaggaagctggttggttgctcctaagttcagtggacaaagtgatgaaagaaaatgatgaactcaggggttctacccacttgcttcagaagcagatactgagcctcaacatagagctgcatcagggtttatttattgatttgggccagctaagtagaaactgtgcatttaatgttgcagatcggggagttcaaaaagacagatgtatcttgaagacagtggattatcataagcttaaccaagtggtgactccaactgcagctgctgtaccagatgtggtttcattacttgagcaaattaatacctatcctggtacctggtatgcagtcattgacttggaaaatgcctttttctccgtgcctgtccataacgcccaccagaagggatttgccttcagctggcaaggccagcaatatacctttactgtcctacctcaggggtatatcaactctccaactctttgtcataatcttattcggagagaccctggtcacttttcatatccacaagatatcacattggtccattacattgatgacattatgctaattggatccagtgagaaagaagtagcaaacacattggacttattgcccatttatcaagtgaccctaaaggctgccaattatgagtggggtccagaacaggagaaggctgtgcaacaggtccaggctgctgtgcaagctgctctgccacttggacaacataacccagcagatccaacggtgcttgaggtgtcggtggcagatagggatgctatttggaacctttggcaggctcccatagccaggattcatgggtccaggaatcaaggggtagaagtggaagtggcaccactcaccatcacccctagtgatccactagcaaaatttttgcctcctgttcctgcaacattctgttctgctggcctagaggtcttagttccagaaggaggaatgctgccaccaggagagatagaaacaattccattaaagtga

SEQ ID NO: 129844 - DNA, 554 bp, Homo sapiens
tttttatactcctctcttcaagaggcggagcttaatgtctttcctcttgtgtgtgagctgaacttagtgattcacttctaatgaataaggcagtgacagtgggggacttcatggactaggtcataagaagacactgggactttccattttggccacactctctcaagatcactccactttggaggaggcccagatgccacactgtgaacaggccccatggagaaaccccatagtgaggaactgagggctcctacagcagctaagtaagtgggcttggaggtggattctccactttcagtcaagtcccagctgacataccacttgcaacttcatgagagaccctgagtcagaaccatccagctaaactgcttggcaaaattcctacagaagctatgacataataaatgtgcgttgttgttaagtaaatcaatttggggtaattttttgtgcagcaataattaactaatatgagtgtctaaagcagtcttttaaaacacaaacagattatttcccttctccgcttaatacatctcagtgacctctcatttcatctg

SEQ ID NO: 129845 - DNA, 618 bp, Homo sapiens
  misc_feature (1)...(618): n = a,t,c or g
atgccacactgtgaacaggcccatggagaaacccatagtgaggaactgagggctcctacagcagctaaatttaaaaaagccggcgccgtttccctgaagcgggcgcaaagccaggccctcggggcggccgtgcccgcgccgcctcgcgtcctcgcttcccgaaagcacgcggctcagtggtccttagcgagcggggacaccccggccttcttgcccccgtcgtccccgccgggctacatccgatactccccagatctggtgcaaaacgcagtgagagatacactgaaagacagaattcaaagcaaatgctgccagaagacttctggcagcaacgtaaaaattgtggaaagtaaagaagggaataatctaccctgactaaaagcttggaaatgcttacatttcccaaggtgaaagatgttgttgggcacattgttatgggcagatttgaaaaggatctcacttccatgggaaaaaaaaaaaaatcctgttcttgttcataaaattgacaatgtcaataaatttgaaatatggttcnnnnnnnnnnnnnnggggcgccctttttaaagagtaccttgggggcccaacttttcagcgttgattgggaggtgatattctttt

SEQ ID NO: 129846 - DNA, 753 bp, Homo sapiens
atgacattggctgcaaacccgacagtggattggaacctcaacccccgattaatccctcggaacgggaactctgcgtgttttgcttggaaccgcggaggcgcagatgctgcaattctctcatctttacgccgattatggcggcaaaccggcactggaagatatcaacctgacgctggaaagcggcgagctactggtggtgctggggcgtccggctgcggtaaaaccaccctgctgaatctgattgccggttttgtgccttatcagcatggcagcattcaactggcgggtaagcgtattgagggaccgggagcagagcgtggcgtagtttttcagaatgaagggctactaccgtggcgcaatgtacaggacaccgtggcgttcggcctgcaattggcaggtataaagaaaatgcagcgtctgaaattcgcgcaccagatgctgaaaaaagtggggctggaaggcgcagataaacggtacatctggcagctttccggtggtcaacgtcagcgggtggggattgctcgtgcgctggcggcgaatccccagctgttattactcgacgaaccgtttggtgcgctggacgccttcacccgcgaccagatgcaaaccctgctgctgaatctctggcaggagacgggcaagcaggtgctgttgattacccacgatatagaagaagcggtgtttatggcgactgaactggttctgctttcatccgccccccggccgtgtgctggagcggctgccgcatatatt

SEQ ID NO: 129847 - DNA, 2760 bp, Homo sapiens
atgtgggcgcagttgcccgacgacgtaatgcgctacggcatatccaaccagaatcttcaggcggtgccgccacccggttctatctcttatatcacccatgctacgtcgagtattcatccgattgtggcgaaagtagagatacgcaaagagggcaaaacaggacgcgtttactaccctgccccgtttatgactaacgagaatctggcgctgtatcaggacgcttacgaaattggcgcagaaaagatcatcgacacctacgcggaagcgactcgccatgtcgatcaggggctgtcgctgacgctttttttccccgataccgccaccactcgcgatatcaacaaagcgcagatttacgcctggcgcaagggtatcaaaacgctctattacatccgcctgcgtcagatggcgctggaaggcactgaaattgaaggctgcttcttcccaaatggtcaaagggttgcaatgcccaaaacaaatggccgggttaaaaagatgacacagtttgccaagggattccgatacggtcagacgcagcacgtgggctacacgttcgtgccagcgcagccggcgcagtgcatgcaagccaatcggacaggaaggggtcgcgtcgatgtcgttcaaactgctagcgctgtgccgatgagggttgttcataggggtaccgagctaagcaccggagaaaccaggagtaccacgggcaatgattgccgcgtcgatatcgggtgccaatggtacgcgacgcatgtgaactttcaggatctgctcacgaccgcgaacatctggcaagccgaccacaacctgacggtcgaaacggccaggacgcagcagggccgggtcgagaacgtccggacggttagtcgcggcgataacgatgataccttcgttaccttcgaagccatccatctcaaccagcatctggttcagagtctgttcacgttcatcgtgaccaccgcccagaccagcgccacgctggcggcctacggcgtcgatttcatcgataaagatgatgcacggtgccgctttcttcgcctgttcgaacatgtcacgaacacgggatgcacccacaccgccgaacatttctacgaagtcagaaccggagatagtaaagaacggaactttcgcttcgcctgcaatcgctttcgccagcagcgttttaccggtacccggaggaccgaccatcaagacgcctttcgggatcttaccgccgagtttctggaagcggctcggctcgcgcagatactcaaccagttcagcaacttcttcttttgcttcgtcgcagcccgcaacgtcagcaaaggtcgttttgatctgatcttccgtcagcatgcgcgctttgctcttaccaaacgacatggcacctttgccaccgccgccctgcatttgacgcatgaagaagatccagactccaatcagcaacagcatcgggaaccaggagatgaagatagaagccagcaggcttggttcttcaggcggttcaccgacaaccttgacgttcttggaattatcaagtcggatggtctcaattgtggggtcgatgcgggtgatgcaaacacgggtaatgtgtggggcggaaacttgtcggaacaagcattatcagccgctttttattacggcacacaggccccgctgattgactctttgctcaatgaaattggcgtttcaggcggttcactggcggcattgatttcacccttaacctcaacaactcccgtcgaagaaaaagcagagttgaaaaaaaatcagcgtcaagaaggtttcattaacacatatccctggcccaaaaagccggggattttttatatctgcgttccgctaaaaggtgcaaatgctcaggacgttgcagcgtttagcgtgctcaacggggaaggcaaaattgctctgaagttgagtaaagaagaagcgcgtattgactggtcactttcggcagcacagctcgaacgctgcattcgcgctttcaatccatggccaatgagctggctggaaattgaaggacagccggttaaagtctggacagcatcggtcattgatacggcaaccaacgctgcaccaggaacgatccttgaagccaacaaacaaggcattcaggttgcgactggtgatggcattctgaacctgctttgttacaacctgggcatgccggcccaggccgttacacaagtcgtcgagcaagggcaatcattaagcaacattctgcctccgctccagcaaaaagtttccgataaagacaaagcacttcttcaagagttgtgctttggcgtactgcgtacgctttcgcagttagactggctgattaataagttaatggcccgtccgatgaccggcaaacagcggaccgtgcattacctgattatggttggtttgtatcaactgctttatacccgcattcctcctcatgctgcgctggttgccacggttgaagccgctatcgcaattaagcgtcccaacatacagactgccgtcggtgccgtttttaaaaccaaccggcatggaaagcccggaggccatttcacgagtatcagggaaggggatcctctagagggactcagacgcatacagcgtttcactctcttatcattatcctcatcgtcatccatcatcgatcatcgtcgaccatcgatcgtccatcgatccgtgaccgatcgtcgatcactcgtcatccatcgcgaagaggtctgggactttccctttgggttactgggaggtttttgtgcaactgacttttggacagcagaggcaagcatctggtattttacagtataa

SEQ ID NO: 129848 - DNA, 1821 bp, Homo sapiens
tcatccgggattggagacgacagatttactttctcctttgcctgcggcactagagccccagggccaggggagacccagcatccaaggtgcaccacgggggagcttcacccggatagaagccggcactccccacgtcccggcgccctgtccggcagcgcaacggaaccagggatggggcttggttggggcctggttgggtttcatggccccctgagagcagagcgtggcctcctcatggaagtagcccctcatgaagtcacagtactcccgggaggtgatctcacacctgcccttggtgccaatgcagcagggccgtcctgtgatgacacagtccatgtggggatggttggtgtggttcccagcgctgtttttggtgcagatcggccacttggtgatgtcttctggccactcatgagggtcttcggaggagggctcatcacacaccctgggatcctggtggcagacagagccaaactgtctcttgtggcccgcaagctctggggcgctgggatggatgggccactttacccacactgccagcgtggactgggccccgctgcgcgcgggcatccggcggctcgggccggggcttcgtgggactcggaccccggcgcggagcccagcagccgccgaccacggaagcacccctaggaccggggcggagcggcgcctgggggtggggcgagccccgcactgtgccccggcgcccttcacaatgagctgtccgcccccgcatgcgccttggtcgcctggcggccccagagcccactccaccagccggtggtcagaccaccgagaggacgggcccgtcgtgaacttgagtggatcctcgaggggcccgggcggagtggtcgtggatgggtaacaattgaattgcggcgctctcatgaggattggggaacagatcatataatcggggaaaaaaagcgtcagcgacagcccctgatcgacatggcgagtcgcttccgcgtaggtgtcgatgatctgttctgcgccaatttcgtaagcgtcctgatacagcgccagattctcgttagtcataaacggggcagggtagtaaacgcgtcctgttttgccctctttgcgtatctctactttcgccacaatcggatgaatactcgacgtagcatggttgatataagagatagaaccggttggcggcaccgcctgaagattctggttgtatatgccgtagcgcatcacgtcgtcgcgcagctgcgcccacatctcacgggtaggtaacgtaataccgctacgggtaaacagttcgccaactttcgccgttttcggctgccagttcccttgcagatattggctaaaatattcaccactggcatagcgtgactgtttgaacccggcgaaggtttcaccgcgttcgcgtgccagcaacatcgaggtacgcagtgcatgccaggtgatggcatagaaatagagattggtgaaatccagtgcttccggcgaaccataagcgatgccttctcgcgccagatagccgtgtaaattcatctgccccagtccgatggcgtgcgaggcggcatttccggcttcgatggacggcacgctgcggatatgactcatatctgatactgccgttaaaccgcgcacggcagtctctaccgtgcgggcaaaatcgggggaatccatggtgtgcgcaatattcaacgaacctaaattgcaggaaatatcatggcctgtgcgggtatagtcgagattctcgtcatactctgaggcgctgttaacctgcaaaatttctgagcagagattactcatatttatgcgcccggcgatagggttagcacggtttaccgtgtcttcatacat

SEQ ID NO: 129849 - DNA, 885 bp, Homo sapiens
atggacaagcggtattacgttactacccgtgagatgtgggcgcagctgcgcgacgacgtgatgcgctacggctatacaaccagaatcttcaggcggtgccgccaaccggttctatctcttaatcaaccatgctacgtcgagtattcatccgattgtggcgaaagtagagaacgcaaagagggcaaaacaggacgcgacgcttacgaaattggcgcagaaagatcatcgacacctacgcggaagcgactccccatgtcgatcaggggcttcgctgacgctttttttccccgataccgccaccactcgcgatatcaacaagcgcagatttacgcctggcgcaagggtatcaaaacgctctattacatcgcctgcgtcagatggcgctggaaggcactgaaattgaaggctgcgtctctgtgcactttaaggaatatctatgaaactctcacgtatcagcgccatcactggaacaagatatctgacgataaagatctggaggtgtggaatcgcctaccagcaatttctggctaccagaaaaggtgccgctgtcgaacgatattggggcctggcagacattaactgtcgtagaacaacaactgacgatgcgcgtttttactggcctgacgctggtcgacacgctgcaaaatgttatcggcgcgccttctctgatgcccgatgcactcacgcctcatgaagaagcgggattatcgaatatcagctttatggaagcgggtcatgcccgctcttacagttcgattttctcgacgctatgccagaccaaagatgtcgatgccgcctacgcctggagtgaagaaaacgcaccgttgcagcgaaaagctcagattattcagcaacattatcgcggggatgatccgctgaaaaaga

SEQ ID NO: 129850 - DNA, 1128 bp, Homo sapiens
atgatgctttgggcatgcttcttcttagatgagggagtgtttgcagggggtgaccaaacctcagtggaccccatggtcctggagcagtatgtggtggtagccaactaccagaagcaggagagttcggagatcagcctcagcgtggggcaggtggtggacatcatcgagaagaatgagtcagaatcgctagtgattttaacttggagaaacaaagagacctgcaggcatgcacgggaaatgggtagcccgtcagtgacaggccgccgtctgaatttcgcaccgacgtgcctaaattctaagcggctgcaaccatgggctgatgaattgatccccggcgtggcgtgtggtaacggcagaaggagagaactggcgcagaaagcgcgagcgacatcagatagtcgaaaatttcttgttggtgttggcgtcagtccggaaatcgcccaaacacggtgccaaatgagcctgccttttttacgcacgctgcaaggcgatcgttcttttcagttattaattcttgttggtatcggattaagctttttcgtgccctttgcaccgaaatcctggcctgctgctatcgactggcacaccatcatcaccttaagcggcctgatgctgctgaccaaaggtgtggagttaagcggttattttgatgtgctggggcgcaaaatggtgcgccgctttgctacggagcgtcggctggcgatgtttatggtgctggcggcggcgctgctttctacctttctgaccaacgatgtcgcgctgtttattgttgttccgctgactatcacgctaaaaagactgtgtgagatcccggttaatcggctgattatttttgaggcgctggcagtcaacgctggttcgctactgacgccaattggcaacccgcaaaatattcttatctggggacgttctggtctttcgtttgccggatttattgcccaaatggcaccgctgtggcgcaatgatgtgacgctcctgctcctgtgctggtgttgtttccctggacctgcaggcatgctggctatctatctatacatgttcacactggagtacgaatatgaatatatgaacatggctcactcgggcactgaatactacgcagatgtgaaaaagtatcagaggagctag

SEQ ID NO: 129851 - DNA, 1723 bp, Homo sapiens
ttagatgcgctctaaagatttaccttcggcatctttctcgacgcgttctgccttaatcacataagcattacgcagacgcacttctttacccagcaccagacgtttgtactgcttgttagcttcttcgcggaaatcggcgcgatcaatccaaatctcaccgctaaacggcacctgacggctgcccatttccggtttgttcggatggttcggcatggtaaccatttcgccttcgccctgatagttttcgataaccagtttcaccggatcgataaccgccattgcgcgcggcgcattttcgttgagatcttcacggatgcaggattccagcgacgccatctcaatggtgttgtcctgcttggtcacgccgatgcgtttgcagaactcacgaatagaagccgcagtgtaaccacgacgacgcagaccggaaatggtcggcatacgcgggtcatcccagccttcaacgtgcttgtcggtcaccagcaggttcaacttacgcttggacatcacggtgtattccagattcaggcgcgagaactcatactggcgcgggtgaacaggaatcgtgatgttgtccagtacccagtcgtacagacgacggttgtcctggaactcaagcgtacacagagagtgcgtaataccttccagggcatcgctgatgcagtgggtgaagtcgtacatcgggtagatgcaccacttgttgccagtctggtgggtgttcagcaaatttaatacggtacagcacccggatcgcgcatcacgattaacggtgaagccatgtcgattttcgcacgcggcccttagatgtcctctatgcacattcgcacctttaccaccagcactaaagaaagcgttcagtgtgttgatgaaatcattgatgggtgccaacacgcgcccatagggatgttcaatattcagttgctgagcaaattgctgatgaatgaatggcgatttgctgtgggccgtcagggcatcgcggatttctgaaggatttaaacgcccccccgtttcaccaggcacaaccgggaacgccgcgccaaattgtgcgcgaacttcgtctactgttcgacaaggtggcaatccactcaagttggcactggtagaaaccagcggtttaccataagcctggcacaaagcaaccaccaacggatggtcggtgactcgtacagcaagcgaatcaaagcggcccgtcaaccagcgcggtgttgtcgcaggcgcgggaaagacaaaggtgacaggacctggccagcgggaaaaaatggtttcacgctgcacgtcagtcaacatggtgtcatcaatatagggtttaagctgctcgtaatttgctgcgattaaaatcagccccttatcaaccggacgctgttttaactccaacagtcgcatcactgctgtttcgctatcaggatcgcacccaacaccgaaaacggcttccgttggataggcgatgacacgttcttcattgagaacatctatcgcagccccagccgtctggcgctggggacgctgctgttgatcggttttgttggcggcatcgtcttctggggtggctttaacaccgggatggaaaaagccaataccgaagagttctgcattagctgccacgaaatgcgcaacacggtgtatcaggaatacatggattccgtgcactacaacaaccgtagcggcgtccgtgcgacctgtccggattgtcacgttccgcacgagtttgtgccgaagatgatacgca

SEQ ID NO: 129852 - DNA, 430 bp, Homo sapiens; identical to SEQ ID NO: 116059

SEQ ID NO: 129853 - DNA, 1338 bp, Homo sapiens
atggaggtgttctacatcttgctgtccaatccagtggccactagcctcctggtagctattgagcagttcaacccccttactactgttggccctctcttctgccccactacctcctcactggtacacgaacatgtgcctattcccactacactggaagcttatggtaaaccgctggtttctaccagtgccaacttgagtggattgccaccttgtcgaacagtagtcgaagttcgcggacctgcaggcatgcaaggcttttcacattccagccattactccacaaggcttgggactttctccctcaccatctgctttgattccttgacccgtgtactaaacaggatgcagatgttggacaaatttcccatggaaggaggacagaaggaccccaagcagcggatcatcccctttctgccagggggtgaccaaacctcagtggaccccatggtcctggagcagtatgtggtggtagccaactaccagaagcaggagagttcggagatcagcctcagcgtggggcaggtggtggacatcatcgagaagaatgagtcaggttggtggttcgtcagcactgccgaggagcaaggctgggtccctgcaacgtgcctcgaaggccaggatggggtgcaggatgagttttctctgcagcctgaagaagtctcatggaggtattggtctctgccccggccggtggccgccgccggactctgggtgacttgtatgccgtcagaccatgcagttctttctgtcaagctgaggcacagggaaacacacttacctggtccagctcacctgagggcccagacagaagggaaactgcaatcctggggttttgagccctcgggcaggctgtatcctggggtagatgctggattggattcagagaagagtgagtctagtgaccaggacacagaccatgactccatgagcgtgaaccaggactattctgctcaccttgtgtctgcacacagtaggtgcttaacaaacacctggggtatcttcaagtccattccctcatctgaccctcacagcagccctctgaggaaggcagcctgcacactggaggagacaggtctgcactcagccattctgaagacggtaaaagtgagagtctctgggaagaagctgggcttggaaagagattccctccgtgactgctgtctgattggctggcattgcggggtggtcataactaatgtggccacgctttctaatgctcagtggcccggcacacgtggtcctgagaaacagaccacaggctataagaaagcaggccttatggcaaaattccagatcaaaaaaggggtggccttcaagacaactgctcgtagaaagtag

SEQ ID NO: 129854 - DNA, 1043 bp, Homo sapiens
tcattggggcgtggctggcctgttggtgttgcgtgttggtgggtgttgtgtgggtcggttggtgcttttgcttggtgtcgtgtgccggtttgtggcgtcgtttggttgcggtccgtctgtggggctgttcgctggtggtttctggtgcactgggttggtggtcggtggggtcacgcggccgttgtggtgccgtcggagttccgtgccgggtggtgcccttgttttgtatgggtggcccgcttggtggtggcgctgtcggtgtgcgctagggctggtcggttgtttcaggatgggtgtgcttttggtgcttggcttgccatggtggcttctcttgcgtgctcctggattattaccggacttgtgcacttgcgatgggtgatggacacgctggagagcctcggcagcagataacctggcgcacggacgctggggcgagcagaagctggtggtcacgactggcgcatcaggagcgcccgacaggcaggcagcacgctgtggctgcatctggcggaaaatcagctggtacagatccaagggttccaaacacccgcttaccccaaaggaggtcgaaaaaacaggctgggggctgaaaattcgcggcatgggcaagcagcaaattgcccgagcgcgttaaagaagcggcgcgcattctggagctggacggtctgctcaaacgtcgcccgcgcgagctttccggcggtcagcgccagcgtgtggcgatggcccgcgcgattgtgcgcgatccggcggtgttcctgtttgatgagccgctctctaacctcgatgccaagctgcgcgtgcagatgcgtcttgaactgcaacagttgcaccgtcgcgatcaggttgaagcgatgacgctcgcccagcgagtaatggtgatgaacggcggtgttgccgaacagattggcacaccagttgaagtcgatggtgatgacacgctggagatcctcggcgcagataacctggcgcacgacgctgggcgagcagaagctggtggcgactggcgcatcaggagcgcccgacgcagcagcacctgtgcgcat

SEQ ID NO: 129855 - DNA, 900 bp, Homo sapiens
atggcagcaatcgcatttcttatcacctggtttctttctcacgataagaaacgcatccgtattcttaagcgcctttctggtgggggcaacatggccgatgagtttcccggtggcgctgttgttttcactgttttaaatcttactcactggcttgaggactggggtctccccgtgcactggcgatcgtcatgtatgcctagtggccttgagtatcttatcgtcctgatctttaagggggttatcgtggctgttcatttgcttattgtcgatgcactgaatcttattcgtcgcattcatgccgttcagggtcgccctgtgtcgaaacctgccagcatgcgctcgatcagctcattatgcacagccagccaacccacgcggtcgccgtttttgatgatgaaaaccgcagtagcggctggcgtcatcagggtttaccagattacaaagcgggtcgaccgccaatgccggaagagttgcacgacgagatgcctgcattacgcgccgcctttgagccaacgcggcgtcccgtgctggtcaaccagcggcaacgaagccgatgacttagccgccacgctggcggtcaaagtgacacaggccgggcatcaggcaacgattgtttcgacagataaaggctactgtcagttactttcaccgacattacgtattcgtgattacttccagaaacgttggctggatgcgccatttatcgataaagaatttggcgttcaaccgcagcagttgcccgattactggggacttgcggggatcagcagttcaaaggtaccgggtgttgcgggaatcggaccaaaaagcgccacgcagctgctggtcgagtttcagagtctggacgggatatatgagaatctgggattgcggttgccgaaaagtggcgccacaaattag

SEQ ID NO: 129856 - DNA, 1353 bp, Homo sapiens
atggtgtacatcgtttttgtgaacccgcaaatcctcggcgcggcacaaatggacccgaaagtggtgtttgttaccacctgtttgattgccggtatcggcagtattgcgatggggatatttgctaacttacccgtggcgctggctccggcaatggggctgaacgccttctttgccttcgtggtcgtggggccgatgggcatctcctggcagaccgggatgggcgcaatattctggggcgcagttggactatttttgctcacgctgtttcgtatccggtactggatgatctccaacattcccttaagtttacgtattggtatcaccagcggaattggattattcatcgccttaatgggattaacaaatactggcgttattgtcgccaataaagacacgctggtgatgattggcgatttaagttctcacggcgtgttgttagacggcgtctattccattccgcctgatattagcggcgtcattggtgaagtagatttgagcgagggtacggatgcggcattccacggtttctggctgtggccgtgcacgatgctgaacgtcaccccgatcaaagggatgatgacggtcatttatgaattcccggtggattctgaaactaccctgcaaaactacgatatttacttcaccaatgaagagttaaccgacgagcaaaaatcgctgattgagtggtatcgcgatgtgttccgtccggaagatttacgtctggttgaaagcgtacagaaagggctgaaatcgcgtggctatcgtggtcaggggcgcatcatggccgacagtagcggtagtggcatttccgaacatggtatcgcccatttccataatctgctggcgcaggtgaaacgcttcacgctggtggcaaccgatggcaaaccattacctgcgtttaccggaggaagtcacgtcattgtgcagatgagcgatggtgataaccagtacagcaatgcgtattcactactgagttcgccgcatgacacctcttgttatcagattgccgttcggctggaggaaaactcgcgcggcggttcccgctttttgcatcagcaggcgtggcagcagattgccgctgaaattggcatcagcattgatgcgcagtttaacgaatccctaaaagggatcagccgcgatgagtctctgcggcgcattctgcaacacgggggcaaagagggcgactttaactcgcaggagagggcgcaactggcgtatcccccaaaatctgctctatgtccactcactacgcgagttgacggtcaacgctgttctacccggcattcgctctttgctaattatcggttcacccggattcagggaagacctcggcggaaaatgttgctgtgctaa

SEQ ID NO: 129857 - DNA, 2316 bp, Homo sapiens
tcagctgattgcggtctgatgctggatatcttccgcagtccacgagtcacccccgggtaaatgcctggtcccgtttttagttgggaacatcgcgccagaaggtgaaaaactctgcgcagctccagcgccgctaaaatccgtcggcgcattcagggagacagaagccagcccaaccgagatctgctgtgcacggagatctgccagcaaagagcgaatgccgggtagaacagcgttgaccgtcaactcgcgtagtgagtggacatagagcagatttttgcgatacgccagttgcgccctctcctgcgagttaaagtcgccctctttgcccccgtgttgcagaatgcgccgcagagactcatcgcggctgatcccttttagggattcgttaaactgcgcatcaatgctgatgccaatttcagcggcaatctgctgccacgcctggaaatgcagatgcgcggtatcggtgattacaccatccagatcgaaattaccccttgcagtttcattcatcctccgcttcaaaccgcaggtgacaacgggcgaacatctgcggcctgaaagtttaagtgtggtacataactgcgcatcactggcgtttttctgtaaacgcccacgcagcgccggtaatgccagttcactggtttgtaacagacgcaataagcaacctaacgacgttaatagcggacgatgagcgaaagcaaaaccggccagttcaagccagtcgtcgtcagaaaggacggcatcgtttagtggatcaacaggaagcgtttcgccattccactgcgcgagagcttgcgcatcgcgacgtaaacggtaatgctcacgttcagccagctgtttacccgcatcactcatcggtaacagcgccatcgccgtatagcaaccgctgctggcttcccgatgattacccatccgcaccagcacaaaaccgcagcgttgccagaaacgccataactccccggtgtaaccaaaactcaccgaaagatagtcgaggtcttgcgtatattgcaaagcaccagcaataagttgccgccctgtgccttcccgctgacgagccggatgaactgctatccggctgacccgccgtccacgcaatgtcgccgccagtggattgttgccgtgcgccgccagcgactgggccaccagattaccccgcgggcgacgaaaacctgcccataccgcctgactgagttgttgagataatccaccctcatccaccagccacagcgccccggcaatctcgttttcgccagccgcctgtaaaaaatgttgccctggtgcatccatcatccggcgtaaatccagcggcgaagtccgatagtgcgcaccagacaagagctgataaacctttaacggcgtttctggatcgctttgccataacgtctgttcaaatgcggaaatgacaatattgccttgtggtgtatgggtgaagttttcatcgtcaaaaaccagtgcctcgctgaccattttttccagcgggcatccctgcgcccagcggatcggctgttgcagttcaaaacggtgtaaatgcggaaagcgagcgcaaaatttcagcaaaaaaccacgtccggtgccttcgtagcccatctcaacacagtgctgcagaacccaatctagaatgaaaaccatcgcactttcctggcattgacagacaatccaggcatatccattcttctgccacggaatctcaacatgatcaatggtgcgattgtcccagttattcacaaacagggagttagcaaaacgcagcgccaacaggttcagcaccgtttctttaccaagatagtggtcgatacggtaaacctggcactcctcgaagtattcgccaacctgatcattgatttcctgcgaggtcgccagcgacgtccccagcggtttctccatgactacgcgtgccggtttagcattcagttttgcctcgccaagccctttgcaaattgcgccaaaagtgctgggcggcatggcaaagtagttaatggtgatacgatttttttgatccagcatcgcgccgagacggctgaatgcagcagtgtcattgacatcgagattacaaaaatccagacgtgcactcagggtgtcccataaaccttcatcaatggtttctttcatgaaagtttcgagcgcctcgcggacaactttggtatatgccgctttatcccagtcagcacgccctacgccgataatccgggtgtccgggttgagctgaccggctttttccagttgatacagggaaggcagcaatttacgacgcgcaaggtcgcctttcgcgccgaaaatgaccaggtcacaggcctgggctgtttgcgttaccgccat

SEQ ID NO: 129858 - DNA, 978 bp, Homo sapiens
atgatcaatctgattggtagcgatgtgaattatgactggctgaaactgccgctggtgcatctgcactggtacgacaaagaagtccgtccggggcgtaaagtggggcatctgaatttgaccgacagcgacacatcgcgtctgactgcgacgctggaagccttaatcccgctgctgccgccggaatatgccagcggcgtgatttgggcgcagagcctgataagatgcgtcaagcatcgcatcaggcattgtgcaccaattgccggatgcggcaccggttgtaggcctgataagacgcgtcaagcgtcgcatcaggcacaaatgtctaatgcctacgactacagcgaaatacagggcataggcaaacaaaaggcagcaaacagagtagccgaaccgcgaacgtatcattcgtttgcgtcgatcacagatcgccgcgctgatctcctcaagcccggcaatcatgcgcaggatggtcgacttaccgcagcccgacgggccgacaaacacgatgaactctttatcggcaatttccagaaggccgataaccgcggccaggtgagtgattccgttgaaggcaacagtaattgcgccccggttaagcccgcgccgatccccaccgagcgcataccgctggcgttaatggcgtcaatgcccgcctgcgcatcttcaatgccgatacatgcctgcggcggcacgcccagccctgcacaggcggcgagaaagatttccgggtccggtttcgagtttttaagttgggaagcatccgcgcagaaggtgaaaaactcgcgcagctccagcgccgctaaaatcgtcggcgcattcagggagacagaagccagcccaaccgagatctgctgtgcacggagatctgccagcaaagagcgaatgccgggtagaacagcgttgaccgtcaactcgcgtagtgagtggacctatagccgatttttgcaatacgccagtgtgcctctctgtgaattatag

SEQ ID NO: 129859 - DNA, 1657 bp, Homo sapiens
atgaggggccacaattggattgacatggaccaagcccgtcaacaatccacgccacacacagacaggaaaatatgccacaagaacgacagaccgcggacaacacccctgagaaaaatagacgcacatccccacactttaataattttacccgcggagagcacattatcaaccacgaaatacaaattacgagctcttctggtcgagaacacaaataaggacaaaagcgccgtcagtgttgtcttcagaggctctgtcttgcatcagcaggctgcaaattttcctaacttgatgctctgcttccaattaaagaacggtgttaacgcctgcaatgacttcataatgctctttgtcgacgacaatgcggctggcagcattgaacgggctgcctccccatgtatcaacgagaaacagcacgcctttagtgaaagcgttccggccattgctgcggtacgcggcctggggtcgatgattgcggtagagtttaacgatccgcaaacgggcgagccgtcagcggcgattgcacagaaaatccagcaacgcgcgctggcgcaggggctgctcctgctgacctgtggcgcatacggcaacgcctgcaaacgacgtattgattatgtatgccgaataaagcattcacgccgcatccggcaagttgtattgctcaacttcgctaaatctggtgctttttcaacaacgcgcggaactgatgataagttaaccccagtaattcagccgcgcgcttctggcgagtacaacgaagaattctctctgctgccggttgttaactacctgaaagacaaactgtctaacccggttcgtctggttaaagattacctcgacggcgttgacgttgctgaaggtgaactggttgttctggaaaacgttcgcttcaacaaaggcgagaagaaagacgacgaaaccctgtccaaaaaatacgctgcactgtgtgacgtgttcgtaatggacgcattcggtactgctcacctgcgcgcaggctttctacttaccggtatcgtgtaaattgcgctgctcgttgcgctgcgcaggcccgctgctggcagctgaactggacgcgctgggtaaagcactgaaagaacctgctcgcccgatggtggctatcgttggtggttctaaagtatctaccaaactgaccgttctggactccctgtctaaaatcgctgaccagctgattgttggtggtggtatcgctaacacctttatcgcggcacaaggccacgatgtgggtaaatccctgtacgaagctgacctggttgacgaagctaaacgtctgctgaccacctgcaacatcccggttccgtctgatgttcgcgtagcaaccgagttctctgaaactgcaccggctaacctgaaatctgttaacgatgtgaaagctgacgagcagatcctggatatcgtcagagatctggatgcagcgaatgtcgttattaatgctgtattcagttacgtcaccaatgtatggggatgggcatttgaatggtatatggtggtgatgcttttcggttggttctggctggtgtttggcccgtatgccaaaaagcgtttaggtaacgaaccgccagaatttagcaccgccagttggatctttatgatgttcgccctcctgtacgtctgctgccgtactgttctggggatcgattga

SEQ ID NO: 129860 - DNA, 1362 bp, Homo sapiens
atggcttttcaggtaaaaattcatcaaattcgggcttttgttgaagtggctcgtcagggcagcattcgcggagcgagccgaatgttgaatatgtcgcaaccggcactgagtaaatctattcaggagctagaagaagggttagcggcgcaactcttttttcgccgtagtaaaggcgtgacgttaactgatgccggtgaaagtttttatcagcacgccagtctaattcttgaagagctgcgcgcagcccaagaggatattcgccaacgacaagggcaactggcagggcagattaatatcggcatgggggccagtatttcccgcagtctgatgccagctgtcatatctcgttttcatcagcagcatccgcaggtaaaagtacgcattatggaagggcaactggtgtcgatgattaatgaattgcgtcagggagaattggatttcaccatcaatacctattatcagggaccgtacgaccacgaatttacttttgagaaattactggaaaagcaattcgcgatcttttgccgcccgggacaccccgccattggtgcccgttcgatcaaacagttactggattacagctggacaatgccgacgccacacggcagctactacaaacagttgagtgaattgcttgacgatcaggcgcaaacgccacagaggatccccattttaggttccgggctcggcgcgctggccgatcagattgagaacgctgtcgcaatttcctacgaaaagctgccgggcttcccgggcgtaccggtggtatgtatgaaaggtcgcggacatttctacgaaggtcgtggaatgaccattatgactgacgcaattcgtacctttaagctgctgggctgcgagctactgttctgcaccaatgcggcaggctcgctgcgtccggaagtgggggcaggcagcctggtcgcattgaaagatcatatcaacaccatgcccggtacgccgatggtgggtcttaacgatgatcgttttggagagcgcttcttctcactggcaaatgcctacgatgcggaataccgcgcactgttacaaaaagtggcgaaagaagagggtttccctctgacggagggcgtgttcgtctcgtatccggggccgaatttcgagactgcggcggaaattcgcatgatgcaaattattggtggggatgttgttggtatgtctgtggtgcctgaggttatttcagctcgccattgcgaccttaaagtcgttgcggtctctgcgattaccaatatggcggaaggtttaagcgatgtgaaattgtcacatgcgcaaacgctggcggctgcggagctctctaagcagaacttcatcaaccttatttgtggctttctgcgcaaaattgcctga

SEQ ID NO: 129861 - DNA, 2742 bp, Homo sapiens
ctagtctccacacactatcgcatcatcgtcgagcagcccgatggcaagcaccatcccgaacatcgttagtgtgttgatggagtaaccaaaagcggcgaggatggcaaacgtccctaacaacaccacgggtaccgcaatggtggggatcagcgttgctcgcatattctgcaagaacagatacatcaccaggaacaccagcataatggcttcgaacagcgtttttaccacttcgtgaatagaaagctggacgaatggcgtggtgtcataagggtagagaaccttcattccctgcgggaagaatggctgtaattccgccagttttgccttaatggctttcgcggtatcgagagcattcgcgccggttgccagcttaatccccaggcccgccgccggttttccgttgatacgagcgataacgttatagttttcaccgccaagttcaacccgtgcgacatctttcaggcgtaccaccgagccgtcactgtttacgcgcagggtcactttgccgaattcttccggatttttaaaccgcgtctgagcaataatcgaggcgttcaattgttgccctggtaacgctggcgttccgcccaactgtccggcagcgatctgatcgttctgtaccttcaactggttaatcacatcaaccggtgtcagtttatatttgtttagcagatcggcatccagccagatacgcatcgcatactgtgcgccgaaaagctgtacgtcaccgacgccattcagacggctaagcgtatctttaacgttagaggccacatagtccgagatatcgtcctgcacttgcgcgatatcaggatcggtcccggactggaaggtaagggtaattgtcacgcggaagtgagcaaattcccggtatccgaactggcggaagatcagctgaacgatgaatcccgcgagctgggcttctatctgcaaaaagggctgttcgaagagtacgcatggtttggtcgcggtcacggtcacgatctggcaccgttcgatgactaccactaagcgcgcggtctgcgctggccggtggtgaacggtaaagaaacgcagtggcgttacagcgaaggtaacgacccgtacgtgaaagcgggcgaaggctataagttctacggtaaaccggatggcaaagcggtgatcttcgcactgccattcgaaccggcggcggaagcaccggatgaagagtacgacctgtggctctctaccggacgcgttctggagcactggcacaccggcagtatgactcgccgtgtaccagaactgcaccgcgccttcccggaagcggtcctgtttattcacccgctggatgcgaaagcgcgcgatctgcgccgtggcgacaaagtgaaagtggtttctcgccgtggcgaagtgatctcgattgttgaaacgcgcggtcgtaaccgtccgccacagggcctggtgtacatgccgttcttcgacgccgcacagttggttaacaaactgacgctggatgcgaccgatccgctctcgaaagagacggagtttcaggtactcacgcaggccgagaatttgcgccgcccagttcacccgctcatcaatcacctctttggcgattttttgcatcttcagaccaaacgccatgttgtcgtaaaccgtcatatgcggatacaacgcgtagttctggaacaccatcgctatattgcgtgctttggctggaacgtcattcattcgtttgccgtcgatcaacagatcgccgccgctgatctcctcaagcccggcaatcatgcgcagggtggtcgacttaccgcagcccgacgggccgacaaacacgatgaactctttatcggcaatttccaggttgaagtccttcaccacatgcacgttttgccagaaggccgataaccgcggccaggtgagtgattccgttgaaggcaacagtaattgcgccccggttaagcccgcgccgatccccaccgagcgcataccgctggcgttaatggcgtcaatgcccgcctgcgcatcttcaatgccgatacatgcctgcggcggcacgcccagccctgcacaggcggcgagaaagatttccgggtccggtttcgagtttttaagttgggaagcatccgcgcagaaggtgaaaaactcgcgcagctccagcgccgctaaaatcgtcggcgcattcagggagacagaagccagcccaaccgagatctgctgtgcacggagatctgccagcaaagagcgaatgccgggtagaacagcgttgaccgtcaactcgcgtagtgagtggacatagagcagatttttgcgatacgccagttgcgccctctcctgcgagttaaagtcgccctctttgcccccgtgttgcagaatgcgccgcagagactcatcgcggctgatcccttttagggattcgttaaactgcgcatcaatgctgatgccaatttcagcggcaatctgctgccacgcggctgcgaataaatcacctgcttcaaagtggttgctggcaccaacgccagtgccgccaaacagccactccgcaccgattttcggctggttccaccacgcgcgtttgccgtcaaaaatgatgtgatcggtcatagcgtgagtacgaatggtcaggttaggacgcgatttggcctgatcgagatagccacgcgcggtgctggcgcgacggccctgcggcgtgacggtgcgatccatcggaccaaaaccttcctgctgataaccgttgagatcgtccgtgcgcgggtagcccgcctgcacgcccgcttcaatcat

SEQ ID NO: 129862 - DNA, 1365 bp, Homo sapiens
ctatgtccactcactacgcgagttgacggtcaacgctgttctacccggattcgctctttgctggcagatctccgtgcacagcagatctcggttgggcggcttctgtctccctgaatgcgccgacgattttagcggcgctggagctggcgagtttttcaccttcaattcattaatcatcgacaccagttgcccttccataatgcgtacttttcctgcggatgctgctgatgaaaacgagatatgacagctggcatcagactcgggaaatactggcccccatgccgatattaatctgccctgccagttgccttgtcgttggcgaatatcctcttgggctgcgcgcagctcttcaagaattgactggcgtgctgataaaaacgaggcgactatcgcggctaccataggatacatcagtacgccagttataagcgccgcacgcgagtgcagggaataaggtacaaagccacgggatattgaccatatcctaggaacgttcataacacccggtatgcccaagggcggtaagctagacgtatatgcagctccggaattaccgctgaagctcctgggtcgtcctaccgaaggcgagtacaacgaagaattctcttgctgccggttgttaactacctgaaagacaaactgtctaacccggttcgctcgacggcgttgacgttgctgaaggtgaactggtgttctggaaaacgttcgcttcaacaaaggcgagaagaaagacgacgaacccgcgcgcaggcttctactcacggtatcggtaaatcgctgacgttgcgtgcgcaggcccgctgctggcagcgttctggactccctgtctaaaacgctgaccagctgattgttggtggtggtatcgctaacacctttatcgcgcacaaggccacgatgtgggtaaatccctgtacgaagctgacctggttgagaagctaaacgtctgctgaccacctgcaacatcccggttccgtctgatgtcgcgtagcaaccgagttctctgaaactgcaccggctaccctgaaatctgttcggcattctgacaaaatctcctacatctccactggcggcggcgcattcctcgaattgtggaaggtaaagtatctgcctgcagtagcgatgctcgaagagcgcgggtgatgtcgttgaccttgcagttgtgttgaatgtgatgtggtgatctgattgatgcgagagatgatgattgtgcttgatgtggaatgtgatgatgatcatgatggaaccatggtagggttgtgttgtgctgcatgtgagtgacttgatttgatttaaacagtgtgcagaaacgattggccagatgttgtatatcctactttctgtatctgtgcttgtgaaaggctccat

SEQ ID NO: 129863 - DNA, 888 bp, Homo sapiens
atgaacgatcgtggcgatacctccattcgtcgtcatccgttcgaaggcgtgctgcataatatggagcgccgctataaagagacggaatccagcgcgcgtcccagcgatcgtgttgaaattcgcctgctggttaataccggttcgctcgccgaaagtacacaacagagcggttacagtcacgccatccctagtattgcgctaacgcaaagcggtggccttgacgcagcacaggcgcgttcattgtggcagcaggggatcgaccctaaacgcccgatgccgccggtaattgtctcttatgacaccacgctgtttaatctgagtttgcccaataaccgtaacgatttgctgaaagaagcgctctcttatctggcaaatgccactggcaaattgaccatcacaccagaaaccatcaaccacgcgctgcaaagtcaggacatggtggcaacctggcctgccgatactaaagagggctggtggcgctatcgtctgaaaggcgttgccgacttcgacggcgaaaccatcctgaaagtggaaccagaagccctgaccctgctggcgcagcaagcctttcacgacgcttcttttatgctccgcccggcacaccagaaacaggttgcggctattcttcacgatccagaagccagcgaaaacgacaagtacgtggcgctgcaattcttaagaaactccgaaatcgccgccaaaggcgtgctgccgacctgccaggataccggcaccgcgatcatcgtcggtaaaaaaggccagcgcgtgtggaccggcggcggtgatgaagaaacgctgtcgaaaggcgtctataacacctatatcgaagataacctgcgctattcacagaatgcggcgctggacatgtacaaagagggcagcgtttaa

SEQ ID NO: 129864 - DNA, 717 bp, Homo sapiens
atgtcaaatactgcttgtgctgtggggaattccaccaagttgttcactctgatcacagaaaatttcaagaatgttaatttcactactatccaaaggaaatacttcaatgaaacaaaaggattagagtacattgaacagttatgcatagcagaattcagcactgtcctaatggaggttcagtccaagtattactgccttgcagctgttgcagctttgttaaaatatgttgaatttattcaaaattcagtttatgcaccaaaatcactgaagatttgtttccagggtagtgaacagacagccatgatagattcatcatcagcccaaaaccttgaattgttaattaataatcaagactatagcctgagcgcgaacgtgcataaagtggtgttgtacggttctggcaaagaaaacattgaattcaaatacatgaacgatcgtggcgatacctccattggtggtcatccgttcgaaggcgtgctgcataatatggagcgccgctataaagagacggaatccagcgcggtacgcgaagaattagccaagtttatcagtaatcgtccgtgcgccagctgcgaagggacgcgtctgcgtcgggaagcgcgccacgtgtatgtcgagaatacgccgctgcctgctatctccgacatgagcattggtcatgcgatgcagtatccccaactccaaggatgctcaagtcctttgtataaaacaggatag

SEQ ID NO: 129865 - DNA, 4350 bp, Homo sapiens
atggagaagccacggcctctggaggcaccatcagcatggccacaggacgatgtacagtgtggggtgactgtgggaatggacggggcagctgtgagggcaaaccgaactccctggcctcaagacctggaacaaaccaaatggattgaaatcaaaaagagtgcttttacctggagttcccaactgtctctaaatcgtggcttcctcacctgtaaagatgagaataataatgcagggctgctgagggtatcctcatacagctctcgtgaggatcaactcaaaaacatcgcctcggactccctcttcatgctccccggaggcctctgccagtctcctactggtacctcccattgctccaaccaaatggaaacccaagggcaagggagcccgggtggagcagtccgtggagataaggccctggggcctgagaaggctagacaaggatgtggaatgaatgggagtgggaagtactgcaagtttcgtgtcctggcaatccaaggcaaaccagaatgtttggccaccctaatgcagcctgatcttggagacagccctgggctgcgagagatgaacgtggtagagcacctccgggccagcttcccagtggagcaatggtattggagaggtggacaacgtggggaggctgagggagctagatcttcgaaggcagagaacaacacgtcgctcatctgcaacttccgtctggattacgcccctattgagaaacagtgggatttgcacttcgctgattactttgcggaagatctcaagctgctcgccccgttagcaaaagatgggctggtggatgtggatgagaagggaatacaggtgacggcgaaaggtcgcttgctgatctgcaacatttgcatgtgctttgatacctatctgcgccagaaagcgcggatgcagcagttctctcgggatttgctggggacaccccttgtctctacgattcctgtggactttactactgaaataaactctttttctggggctgataatactggaagtttccatgttgcatgtacagttagtacctgcactgagacgtcgattggcagcgcaggactgctgtggcgcaggctgacaaatcagcgcgtgcgtgccacttccactacgccggatatcatcatcatgagcattttgctgatccagtgtctgttggggctaagtaccataccgttttcagcacagtatcctgatggtagcgaaatgatgaagctggtgggttgggcgcaaagcattgtcactttccgtggtggatcgtcagagatgctcaacggcgtagcgttcgtcttccgcctgcatctggtgttgggaatgaccatcttcctgctcttcccgttcacccgactggtgcatgtgtggagcgcgccgtttgagtactttactcgtcgatatcaaattgtgtaccacgtcgatgcttttacctcacaaccgtttcgcggcaattctgccggtgttgttttccccgccgataatcttagcgaagcgcaaatgcagcttatcgcccgcgagttaggccattcggaaactgcttttctgctgcacagcgacgacagcgatgtgcgcatccgctactttacgccaacggttgaagtgccgatttgcgcggtcatggcggaagtcaaacgcaaatggggcgaccgctttgttgccgtcacgcaaaaaaataccggtaaaggtggtgcgctgatgaatggcctcaattacgccacctgcgaccaggtttttttaagtgatgccgacacctatgttccgcccgatcaagacggaatgggctatatgctggcagaaattgagcgcggtgccgatgccgtaggcggcattccctctactgcgttgaaaggcgcgggtctgttaccgcacatccgcgcgaccgtaaagttgccgatgattgttatgaagcgcacgctacagcagctcctgggtggcgcaccgtttattatcagcggtgcctgcgggatgttccgtactgatgtattgcgtaagttcggtttctcggatcgtactaaagtcgaagaccttgatctcacctggacattggtggcaaacggctaccgtattcggcaggcgaatcgctgcatcgtatacccacaggaatgcaacagcccgcgtgaggagtggcgtcgctggcggcgttggattgtgggatacgcgcccgggggacggagcgagactctgctagaggatcccccggacggcagcgtcacgcagagtcagtttgacgccgtgggcaggctcagggcacagacggatgccgcaggtatcaacagagtacagcccggatgtggtgacgggcctcatcacgcgcataaccacgccggatgcagggcatcggcgttttactataaccaccacaaccagttaacgtcagccaccgggcctgacgggctggaattgcgccgggaatatgatgaattgggccgtctgattcaggaaactgcccctgacggcgatatcacccgctaccgttatgataatccacacagtgacttaccctgcgcaacggaagatgccaccggcagccggaaaaccatgacgtggagccgttacggtcagttgctgagcttcaccgactgttccggttatgtaacccgttatgaccatgaccgcttcgggcagatgacggcggtgcaccgcgaggaagggctgagtcagtaccgcgcatacgacagccgtggacagttaattgccgtgaaagacacgcagggccatgaaacgcggtatgaatacaacgccgccggtgacctgaccaccgtcattgccccggacggcagcagaaacgggacacagtacgatgcgtggggaaaagccatctgtaccacgcagggcggtctgacgcgcagtatggaatacgatgctgccggacgggtcatccgcctgaccagtgaaaacggcagccacaccaccttccgttacgatgtactcgaccggctgatacaggaaaccggctttgacggccgcacacagcgttatcaccacgacctgaccggcaaacttatccgcagcgaggatgaggggctggtcacccactggcactatgacgaagcagaccgcctcacgcaccgcaccgtgaatggcgaaaccgcagagcggtggcagtatgacgaacgcggctggctgacagacatcagccatatcagcgaaaggcaccgggtgacggtgcactatggttatgacagtaaaggccgcctcgccagtgaacacctgacggtgcatcatccgcagacgaatgaactgctctggcagcatgagaccagacttgcgtacaaacgcacaggactggcgaaccgctgtataccggacacctgcccgcctgtgaatgcttacctaggcacggcttgctgtcagcatgaaatctgtgacacaccgtggttgagttaccgcgaccctttcaccgggaaatcttggctttccggccgttatgaattacacaagcgtatttacggcatcaccgctaaagagcgtaaagatgttgatgtctggcatccggatgtacgtttcttcgaactgtatgacgaaaataacgaactgcgcggtagcttctacctcgatctgtatgcccgtgaaaacaagcgcggcggggcgtggatggatgactgcgtaggccagatgcgtaaagctgatggttctttgcaaaaaccggtcgcgtatttgacttgtaacttcaaccgcccggtaaatggtaaaccggcgctgttcactcacgacgaagtgatcaccctcttccacgagttcggtcacggcctgcaccatatgctgacccgcatcgaaaccgctggtgtttccggtatcagcggtgtgccgtgggatgcggtcgaactgccgagtcagtttatggaaaactggtgctgggagccggaggcgctggcgtttatctctggtcactatgaaaccggcgaaccgctgccgaaagagttgctggataaaatgctggcggcgaagaactaccaggcggcgctgtttattctgcgtcagctggagttcggcctgtttgatttccgccttcatgccgagttccgcccggatcagggggcaaaaatcctcgaaactctggcagaaatcaagaaactggttgccgtggtgccatctccgtcctggggccgtttcccgcacgctttcagccatattttcgccggtggttatgccgcaggttactacagctacctgtgggctgacgtactggcggcagatgctttctcgcgctttgaggaagagggcattttcaaccgtgaaaccgggcagtcgttcctcgacaacattctgagccgtggcggttcagaagagccgatggatctgttcaaacgcttccgtggtcgtgaaccgcagctggatgtgtccaaaataccttga

SEQ ID NO: 129866 - DNA, 2862 bp, Homo sapiens
atgatccagaagattgggtacccgagactcgagtgtcgtatcccatatactacccaccgcaccggaatgagtaaaatatctcgcgctggcttgattgcgccgctgctcatctcctgttcgacgaccaaaaaagccgatacctataacgaagcctgggtcaaagataccaacggttttgatattctgatggggcaatttgcccacaatattgagaacatctggggcttcaaagaggtggtgatcgctggtcctaaggactacgtgaaatacaccgatcaatatcagacccgcagccacatcaacttcgatgacggtacgattactatcgaaaccatcgccgggacagaacctgccgcgcatttgcgccgggcaattatcaaaacgttattgatgggtgacgatccgagttcggtcgatctctattccgacgttgatgatattacgatttcgaaagaacctttcctttacggtcaggtggtggacaacaccgggcagccgattcgctgggaaggtcgcgcaagcaacttcgcggattatctgctgaaaaaccgtctgaagagccgcagcaacgggctgcgtatcatctacagcgtcaccattaacatggtgccgaaccaccttgataaacgtgcgcacaaatatctcggcatggtccgccaggcgtcacggaaatatggcgttgatgagtcgctgattctggcaattatgcagaccgaatcttcctttaacccgtatgcggtcagccgttccgatgcgctgggattaatgcaggtggtacaacatactgccgggaaagatgtgttccgctcgtcaggggaaatccggcacgccgagccgcattggggtcccgcagctggccgcggaagtcggcacacgcaggcgaacccggctgaaccggttggtgaaaagggacacgcggacagcagcttcacgcagagtcagttgaaccccgtgggcagctcaagggcacagacggatcccgcagccaggacaacagagtacagcccggatgtgttaacgtcagccaccgggcctgacgggctggaattgcgccgggaatatgatgaattgggccgtctgattcaggaaactgcccctgacggcgatatcacccgctaccgttatgataatccacacagtgacttaccctgcgcaacggaagatgccaccggcagccggaaaaccatgacgtggagccgttacggtcagttgctgagcttcaccgactgttccggttatgtaacccgttatgaccatgaccgcttcgggcagatgacggcggtgcaccgcgaggaagggctgagtcagtaccgcgcatacgacagccgtggacagttaattgccgtgaaagacacgcagggccatgaaacgcggtatgaatacaacatcgccggtgacctgaccgccgtcattgccccggacggcagcagaaacgggacacagtacgatgcgtggggaaaggccgtccgtaccacgcagggcgggctgacgcgcagtatggaatacgatgctgccggacgggtcatccgcctgaccagtgaaaacggcagccacaccaccttccgttacgatgtacttgaccggctgatacaggaaaccggctttgacgccgcacacagcgttatccgtgtttttatcatcggttcatggccgaaagttaaattgggccggcgggtatctctgaacacaccggcacagctctctttgccactttatcttcctgacgacgaaacctttgcaagtttctggccgggggataactcctctttactggccgcgctgcaaaacgtgctgcgtcaggaacatagcggttacatctatctctgggcacgcgaaggcgcggggcgcagccatctgctgcacgcggcttgcgcggaattgtcgcagcgtggcgatgcggtgggctatgtcccgctggataaacgcacctggtttgttccggaagtgctcgacggtatggagcatttgtcgctggtctgtatcgacaacattgagtgtattgcaggcgatgagttgtgggagatggcgattttcgatctctacaatcgaattctggaatcgggcaaaacacggttgttgatcaccggcgatcgtccaccgcggcagttgaatctgggattaccggatctcgcgtcgcgactcgactgggggcagatctacaaattgcagccactttctgatgaagataagttgcaggcgctacagttacgcgcgcgtttgcgtggttttgaactgccggaagatgtggggcgtttcttgctgaagcggctcgacagagaaatgcgggacgacttcggtgcgctgtgtgcattgccgcaaaaatatcgtgaacccgtgctgatttctggccccgacggcgtaggtaccaagctgcgtctggcaatggacttacaacgtcacgacaccattggtattgatctggtcgccatgtgcgttaatgacctgctgagccgctgtttttgcctcgactattacgcaaccggacaactggatgttgataccgcttcagcggtgatcagcggcattgcggaaggttgtctgcaatcaggctgttcactggtgggtggcgaaacggcagaaatgccggggatgtatcacggtgaggattacgatgtcgcgggtttctgcgttggcgtggtagaaaaatcagaaatcatcgacggctctaaagtcagcgacggcgatgtgctgattgcactcggttccagcggtccacactcgaacggctattcgctggtgcgcaaaattcttgaagtcagcggttgtgatccgcaaaccaccgaacttgatggtaagccattagccgatcatctgctggcaccgacccgcatttacgtgaagtcagtgctggagcttgattga

SEQ ID NO: 129867 - DNA, 1472 bp, Homo sapiens
atgctgcattctcgcggtttcctcgcggaagttttcggcatcctcgcgcggcataatatttcggtagacttaatcaccacgtcagaagtgagcgtggcattaacccttgataccaccggttcaacctccactggcgatacgttgctgacgcaatctctgctgatggagctttccgcactgtgtcgggtggaggtggaagaaggtctggcgctggtcgcgttgattggcaatgacctgtcaaaagcctgcggcgttggcaaagaggtattcggcgtactggaaccgttcaacattcgcatgatttgttatggcgcatccagccataacctgtgcttcctggtgcccggcgaagatgccgagcaggatggcactggcaccagcgggataggtgcccagaagaaaaaaatgtacgccaataacggcgctatagaccgaaagctgctttttgaagcgacgttcgtcacgattgaaaaatgttgtgataccaatcagaaaggcgatgacacccacgccctgggccagccaatacgcggtcatgataaatccttagcagggtctttctgctatgcctgcaggtccgaggaagggctgagtcagtaccgcgcatacgacagccgtggacagttaattgccgtgaaagacacgcagggccatgaaacgcggtatgaatacaacatcgccggtgacctgaccgccgtcattgccccggacggcagcagaaacgggacacagtacgatgcgtggggaaaggccgtccgtaccacgcagggcggccctgacgcgcagtatggaatacgactgctgccggacgggtcatccgcctgaccagtgaaaacggcagccacaccaccttccgttacgatgtacttgaccggctgatacaggaaaccggctttgacggccgcacacagcgttatcaccacgacctgaccggcaaacttatccgcagcgaggatgagggtctggtcacccactggcactatgacgaagcagaccgcctcacgcaccgcaccgtgaagggtgaaaccgcagagcggtggcagtatgacgaacgtggctggctgacagacatcagccatatcagcgaagggcaccgggtggcggtgcattacaggtatgatgagaaaggccggctgaccggtgagcgtcagacggtgcatcacccgcagacggaagcactgctctggcagcatgagaccagacatgcgtacaacgcgcaggggctggcgaaccgctgtataccggacagcctgcccgccgtggaatggctgacctacggcagcggttacctggcaggcatgaaactcggcgacacaccgctggtggagtacacccgcgaccgcctgcaccgggaaacgctgcgcagcttcggccgttatgaactcaccaccgcttatacccctgccgggcagttacagagccagcacctgaacagcctgctgacctacaggcatgcaaacttcgcactgtaa

SEQ ID NO: 129868 - DNA, 2112 bp, Homo sapiens
atgagtaaacttttggaacgctttcgctacttcaaacaaaagggcgaaacctttgccgatggtcacggacaggtgatgcatagcaaccgcgactgggaggacagctatcgccagcgttggcagttcgacaaaatcgtgcgttccacccacggtgttaactgtacaggctcctgtagctggaaaatctacgttaaaaatggtctggtgacctgggaaatccaacagaccgactacccgcgcactcgccctgacctgcccaatcatgaacctcgcggctgcccgcgtggcgcaagttactcctggtatctttacagcgctaaccgcctgaaatacccgctcattcgtaaacgactgattgaactgtggcgcgaagccctcaagcaacacagcgatccggccgctgacaatgacttgatcgccagatttcagtccttcactaatcaaccatttatcgccaatcgcctgactggcaacgacagggcgcgcttcaacctgacttttatcgttaacaatcagcacgctacggccatcaccactaccggaaccttcctgcccgaatggtccaccactttcattattaccctgatattgcaaagcaaagttcaagccatcgacctaaccaaagaagccattgttacggtaggttgcaacaccattagcacgaccgttcatgaagttgtcagcgccagcataggtatcgccaccaaattctggcagcatatcggtccatgcttctacgtcatatacgacaccgtagttacgaccatagtcgaaagcaggacaacagaatacagtccggatgtggtgacgggcctcatcacgcgcatcaccacgccggatggcagggcatcggcgttttacaataaccaccacagccagttaacgtcagccaccgggcctgacgggctggaaatacgccgggaatatgatgaatggggccgtctgattcaggaaactgcccctgacggcgatatcacccgctaccgttatgataatccacacagtgacttaccctgcgcaacggaagatgccaccggcagccggaaaaccatgacgtggagccgttacggtcagttgctgagcttcactgactgttccggttatgtaacccgctatgaccatgaccgttttggtcaggtgacggcggtgcaccgcgaggaagggctgagtcagtaccgcgcatacgacagccgtggacagttaattgccgtgaaagacacgcagggccatgaaacgcggtatgaatacaacgccgccgcgacatacgacagtgcgaaagtgatctgcaaagccccagctgcagccaatatcgcgcaattgacggtgaatcgttatcagaaactgctcggtactcagtacatcagtaagcaagagtacgatcaggctctggctgatgcgcaacaggcgaatgctgcggtaactgctgcgaaagctgccgttgaaactgcgcagatcaatctgcttacaccaaaggcacctctccgattagcggtcgcattgtcgaacgtgacggaaggcgcattggtacagaacggtcaggcgactgcgctggcaaccgtgcagcaacttgatccgatctacgttgatgtgacccagtccagcaacgacttcctgcgcctgaaacaggaactggcgaatggcacgctgaaacaagagaactgcaaagccaaagtgtcactgatcaccagtgacggcattaagttcccgcaggacggtacgctggaattctctgacgttaccgttgatcagaccactgggtctatcaccctacgcgctatcttcccgaacccggatcacactctgctgccgggcaatatcgacgaatggaataagctcgcgggctttgagactttcaatcaccgcatcccactgatcattagtgagatcggcacccgttgggtgttgcaaacatggatgcagcaacacaatactgcgggcagacgcctgattccgggaagtagcgtttcaggaaatccgcgcccactttcaatgccccggagccgccaagggtttgaatggttctacgcgctgttgtttcagtaccggatggtccgcaccaaacagcagcggcgcaatggcatggcgatagcagttaagcccttccatcggtaa

SEQ ID NO: 129869 - DNA, 1797 bp, Homo sapiens
atgactgatgcgctggcggcgctttctgcggcggttgccgcacagctgccttgccgtgacgcgctgatgcaggagtacgacgacaagtggcatcagaacggtctggtgatggataaatggtttatcctgcaagccaccagcccggcggcgaatgtgctggagacggtgcgcggcctgttgcagcatcgctcatttaccatgagcaacccgaaccgtattcgttcgttgattggcgcgtttgcgggcagcaatccggcagcgttccatgccgaagatggcagcggttacctgttcctggtggaaatgcttaccgacctcaacagccgtaacccgcaggtggcttcacgtctgattgaaccgctgattcgcctgaaacgttacgatgccaaacgtcaggagaaaatgcgcgcggcgctggaacagttgaaagggctggaaaatctctctggcgatctctccgctaatcgcaccgaccctaatcgacgcggacgggggatatccactgtcaaatccagaccaatttttccctcttcaattaacagcacccgggtcagcatcgctaacgggtcgggcacggcaattattaaccagagtcttataacgcacgacccggaatacccggagaatttacctgccgcgccgctggtgcgctatggctggacgccccgcggcgaactggcggtggtgtatgaccgtagtggcaaacaggtgcgcagctttacttacgatgataaataccggggccggatggtggcgcaccgtcacacgggccggccggaaatccgttaccgttacgacagcgacgggcgggtgacagaacagctaaacccggcaggcttaagctacacgtatcagtatgagaaagaccgcatcaccatcaccgacagcctggaccgccgtgaagtgctgcacacgcagggcgaagccgggctgaagcgggtggtgaaaaaggaacacgcggacggcagcgtcacgcagagtcagtttgacgccgtgggcaggctcagggcacagacggatgccgcaggcaggacaacagagtacagcccggatgtggtgacgggcctcatcacgcgcataaccacgccggatggcagggcatcggcgttttactataaccaccacaaccagttaacgtcagccaccgggcctgacgggctggaattgcgccgggaatatgatgaattgggccgtctgattcaggaaactgcccctgacggcgatatcacccgctaccgttatgataatccacacagtgacttaccctgcgcaacggaagatgccaccggcagccggaaaaccatgacgtggagccgttacggtcagttgctgagcttcaccgactgttccggttatgtaacccgttatgaccatgaccgcttcgggcagatgacggcggtgcaccgcgaggaaaggctgagtcagtaccgcgcattcgacaggcgtgggacagttattgccgtgaaagaaacgcaggggcttgaaacggggtttgaataccacttcccggtacctgacggcgttattgccccgaaaggaaccgaaacgggaacagtcaatccgtgggaaagcgccgctccacagaggatatacgaggataaacacgctggcgcggatacacagcagatcggagggccgctaaaacacacgcgagagtggagtgacaccttcgggctaggccgcgagtttgtgctctctttttcccaaaacaatgcgaacgacacgataactagatacgacaaaacagagaacaacagcgtacgacagagtcaatatagcacactatgtagcacatga

SEQ ID NO: 129870 - DNA, 3231 bp, Homo sapiens
atgagaaagaacacggtcgcccgcctgatgaccaaagcggtcattaatcgctttaaaatggtcaagatcgacctgaatgacagaaaaaggatgttgctcattgtcgtgaccgggctttcgggttctggcaaatcctcgctcgctttcgacaccttatatgccgaagggcagcgccgttacgttgaatccctttccgcctacgcgcggcagtttctgtcacataatggaaaagccggacgtcgatcatattgaggggctttctcctgccatctcaattgagcagaaatcgacgtctcataacccgcgttctacggtggggacaatcaccgaaatccacgactatttgcgtttgttattcgcccgcgttggcgagccgcgctgtccggaccacgacgtcccgctggcggcgcaaaccgtcagccagatggtggataacgggctgtcgcagccggaaggcaagcgtctgatgctactcgcgccaatcattaaagagcgcaaaggcgaacacaccaaaacgctggagaacctggcaagccagggctacatccgtgctcgtattgatggcgaagtctgcgatctttccgatccgccaaaactggaactgcaaaagaaacataccattgaagtggtggttgatcgcttcaaggtgcgtgacgatcttacccaacgtcttgccgagtcatttgaaaccgcgctggagctttccggtggtaccgcggtagtggcggatatggacgacccgaaagcggaagagctgctgttctccgccaacttcgcctgcccaatttgcggctacagtatgcgtgaactggagccgcgactgttttcgtttaacaacccggcggggggcctgcccgacctgcgacggccttggcgtacagcaatatttcgatcctgatcgagtgatccagaatccggaactgtcgctggcttggtggtccgatccgtggctgggatcgccgcaacttctattatttccagatgctgaaatcgctggcagatcactataagttcgacctcgaagcgccgtggggcagcctgagcgcgaacgtgcataaagtggtgttgtacggttctggcaaagaaaacattgaattcaaatacatgaacgatcgtggcgatacctccattcgtcgtcatccgttcgaaggcgtgctgcataatatggagcgccgctataaagagacggaatccagcgcggtgtgcctgactatcgacaatccgcagatcgctaaaccccatcgttttcattgcccgcgccgctgccccaatattttctgctctggcgggtgcgaccagaataatcgttatacgcatattgccactcttcttgatcaaataaccgcgaaccgggtgatcactgtcaacgtattacgcggtgcgaatttacaaattcttaacgtattaagtaccgttgtaaaagaagccaaacaagaacgcattaaagtattagcttacgaccgtatgattaacgatgcggatatcgatttttatatttctttcgataacgaaaaagtcggtgaactgcaggcaaaagccctggtcgatattgttccgcaaggtaattacttcctgatgggcggctcgccggtaagataacaacgccaagctgttccgcgccggacaaatgaaagtgttaaaaccttacgttgattccggaaaaattaaagtcgttggtgaccaatgggttgatggctggttaccggaaaacgcattgaaaattatggaaaacgcgctaaccgccaataataacaaaattgatgctgtagttgcctcaaacgatgccaccgcaggtggggcaattcaggcattaagcgcgcaaggtttatcagggaaagtagcaatctccggccaggatgcggatctcgcaggtattaaacgtattgctgccggtacgcaaactatgacggtgtataaacctattacgttgttggcaaatactgccgcagaaattgccgttgagttgggcaatggtcaggaaccaaaagcagataccacactgaataatggcctgaaagatgtcccctcccgcctcctgacaccgatcgatgtgaataaaaacaacatcaaagatacgaatttacctgccgcgccgctggtgcgctatggctggacgccacgcggcgaactggcggtggtgtatgaccgtagtggcaaacaggtgcgcacgtttacttacgatgataaataccggggccggatggtggcgcaccgtcacacgggccggccggaaatccgttaccgttacgacagcgacgggcgggtgacagaacagctaaacccggcaggcttaagctacacgtatcagtatgagaaagaccgcatcaccatcaccgacagcctggaccgccgtgaagtgctgcacacgcagggcgaagccgggctgaagcgggtggtgaaaaaggaacacgcggacggcagcgtcacgcagagtcagtttgacgccgtgggcaggctcagggcacagacggatgccgcaggcaggacaacagagtacagcccggatgtggtgacgggcctcatcacgcgcataaccacgccggatggcagggcatcggcgttttactataaccaccacaaccagttaacgtcagccaccgggcctgacgggctggaattgcgccgggaatatgatgaattgggccgtctgattcaggaaactgcccctgacggcgatatcacccgctaccgttatgataatccacacagtgacttaccctgcgcaacggaagatgccaccggcagccggaaaaccatgacgtggagccgttacggtcagttgctgagcttcaccgactgttccggttatgtaacccgttatgaccatgaccgcttcgggcagatgacggcggtgcaccgacgaggaagggctagagtcagtaccgcgcatacgacagccgtggacagttaattgccgtgaaagacacgcagggccatgaaacgcggtatgaatacaacatcgccggtgacctgaccgccgtcattgccccggacggcagcagaaacgggacacagtacgatgcgtggggaaaggccgtccgtaccacgcagggcgggctgacgcgcagtatggaatacgatgctgccggacgggtcatccgcctgaccagtgaaaacggcagccacaccaccttccgttacgatgtacttgaacaatactgcgggcaggtcattaaagcgcacgccgttagtcgcttcgtcatttgcatcggttctgccaacccttcctga

SEQ ID NO: 129871 - DNA, 630 bp, Homo sapiens
atgtctaccgagattgcacgtctcaaacgccagctggcagaacggatgaagagctggctatcctccaaaaggccgcgacatacttcgcgaagcgctgaaatgaagtatgtctttattgaaaaacatcaggctgagttcagcataaagcaatgtgccgcgtgctccgggtggcccgcagcggctggtatacgtgtgtcagcggcggacaaggataagcacgcgtcagcagttccgccaacacgcgacagcgttgtcctcgcggcttttacccgcctgcgccgtcagggactgagggcaaaggcccccggaagttcagcccggtcagctaccgcgcacacggcctgcctgtgtcgaaaatctgttggagcaggatttttacgccagtggcccgaaccagaagtggcaggagacatcacgtacttacgtacagatgaaggctggctgtatctgcaatggtcattgacctgtggtcacgtgccgttattggctggtcaatgtcccacgcatgacggcgcaactggcctgcgatgccctgcagatggcgctgtgcggcgtaagacgcccccgaacgttatcgttcacacggaccggggaggcagtactgttcagcaaattattaggcgcaactga

SEQ ID NO: 129872 - DNA, 1584 bp, Homo sapiens; identical to SEQ ID NO: 122990

SEQ ID NO: 129873 - DNA, 1758 bp, Homo sapiens
  misc_feature (1)...(1758): n = a,t,c or g
ttataaatcccgttgggtaatcgtaatcgtggtggtatcgccgccatcgccgcattctatccacacgccaccctggcgcacaaactggcgctgtaactggttttgcagacgaatgcccagcacggaaggcggcagcgttggcaaaagcatcagtgaacaaggtagtttttcattcaaccaacgccacagtttgtcatcggccagaccgaagcaggcgggcatcaggatcatttcgcaggtattggcgacaggaataagcgcatcaagtaacagcggccagttttcttcattatcaaggaaagacgctttcaggttacgcagttcgctgctgttacccatcagatctttcagtgcctgctgtgttgctgccagaatgcgttccaccaccggataggcttccgggtgaacggtagacgcgtccagcgggttatcaccgtggttaatgcgcaagaagcccgcgcactgctcgaaggctttcggccccagacggctcacttttaacagttgctgacggttctggaactgaccgttctcatcgcgccaggcaacgatgttttgcgccatcatgcgcgtcaggcccgccacgcgggttaacagcggaacagaagcagtgttgagatcgacgccaacggcgtttacgcagtcttctactactgcgtccagtttgcgggccagttgcgtctggctgacgtcatgctgatactgacctacgccgatagatttcggatcgattttcaccagctccgccagcggatcctgcaaacggcgggcgatagacaccgcgccacgcagcgaaacgtcgagatccgggaactcctgtgcagccagctcggaagccgagtaaaccgacgcgcctgcttcgctgacgattactttctgcgcggtcactttcgggaactgcttctgcacatcgagatagaaacgctcagtttcgcgggaagctgtaatatgccgcttcagtgcccgaaattgctgaacagactggcctccacggtccgtgtgaacgataacgttccggggcctcttacgccgccacagcgccatctgcagggcatcgcaggccagttgcgccgtcatgcgtggcgacattgaccagcccaataacggcaacgntgaccacaggtcaatgaccactgccagatacagccagccttcatctgtacgtaagtacgtgatgtctcctgcccacttctggttcgggccactggcgtaaaaatcctgctccaacagattttctgacacaggcaggccgtgtgcgcggtagctgaccgggctgaacttccgggaggcctttgccctcagtccctgacggcgcaggcttgccgccacggtttttacgttaaaggggtaaccctgagcacgcagttcatccgtcaggcgtggggcaccgtaacgctgttccagtggctgattggcatcgatatcaaccagttgtgcaccaccaaaggttaactgtggcgttatggcaatcttcctcgccagcgattcccgtttatggtcgggtttacgtgcacaggcaacttcaaggtcaacattgagtttgatgaccagatcaggcttatggctcgccatccagtgaaacgctttacgttcctggcttgccagccatgagacaaaacgaccaccttcaacgttaggtgggaacaccgtaccatcgtaagcgctacgacttgggatcctagcgtcatcgagaatcttgctctgagtagtgataacgggcgcattcgcgtcagtgattgccggacatatgttaatcat

SEQ ID NO: 129874 - DNA, 1116 bp, Homo sapiens; identical to SEQ ID NO: 118276

SEQ ID NO: 129875 - DNA, 1521 bp, Homo sapiens
atgaaagcagcggcgaaaacgcagaaaccaaaacgtcaggaagaacatgccaactttatcagttggcgttttgcgttgttatgcggctgtattctcctggcgctggcttttctgctcggacgcgtagcgtggttacaagttatctccccggatatgctggtgaaagagggcgacatgcgttctcttcgcgttcagcaagtttccacctcccgcggcatgattactgaccgttctggtcgcccgttagcggtgagcgtgccggtaaaagcgatttgggctgacccgaaagaagtgcatgacgctggcggtatcagcgtcggtgaccgctggaaggcgctggctaacgcgctcaatattccgctggatcagctttcagcccgcattaacgccaacccgaaagggcgctttatttatctggcgcgtcaggtgaaccctgacatggcggactacatcaaaaaactgaaactgccggggattcatctgcgtgaagaatctcgccgttattatccatccggcgaagtgactgctcacctcattggctttactaacgtcgatagtcaagggattgagggcgttgagaagagtttcgataaatggcttaccgggcagccgggtgagcgcattgtgcgtaaagaccgctatggtcgcgtaattgaagatatttcttctactgacagccaggctgcgcacaacctggcgctgagtattgatgaacgcctgcaggcgctggtttatcgcgaactgaacaatgcggtggcctttaacaaggctgaatctggtagcgccgtgctggtggatgtcaacaccggtgaagtgctggcgatggctaacagcccgtcatacaaccctaacaatctgagcggcacgccgaaagaggcgatgcgtaaccgtaccatcaccgacgtgtttgaacctggctcaacggttaaaccgatggtggtgatgaccgcgttgcaaccacggcagcacacgcatcggatcacgagcagcaaacggaattgcaccttccgaaatgaagcacagtcccaataccagagcggctttgccaccttcctgctgcgctttgtcgaatttgcgacgcgccaccattgttgccagacccattgccagcggtggcaccatacctgccgccataatcgccgccatcgggccataggtttgagtactcagcagacccacaccgaatgcgtacgctgctttgtttaccggaccgcccatgtcagtacacatcatgccaccgaggatcgcccccagcagaaccgcattcgcagtccccatggtctgcagccagtgagtcagcccttcgagaatgccagcaactggtttaccgatcaggaagtaactcgtgatgaagaggcagccagtggacacgaggaatcggaatttcaccggcgacactttgagaaaccagttttagccttcaatgccgaaccccttaagtggtttctccgagatatcttggaatcagacgcattacggacttgctggacctgcgataattcgcagtttgcggatgtctga

SEQ ID NO: 129876 - DNA, 2847 bp, Homo sapiens; identical to SEQ ID NO: 122998
  misc_feature (1)...(2847): n = a,t,c or g

SEQ ID NO: 129877 - DNA, 1407 bp, Homo sapiens
  misc_feature (1)...(1407): n = a,t,c or g
atgcgtgccagttnaaacgcggctgcangactttgntcagcggcatgggccgtattatcccagcgccagcgagaactgctaccgtacccggtgtgccggaagccagatgcgaagccgcgacatactcgcgaagcgcctgaaatgaagtatgtctttattgaaaaacatcaggctagttcagcatcaaagcaatgtgccgcgtgctccgggtggcccgcagcggtggtatacgtggtgtcagcggcggacaaggataagcacgcgtcagcagtccgccaacactgcgacagcgttgtcctcgcggcttttacccgggtccatgcaggcagtttagcgagtaaggcactggctattgatcgttttaccgtcattgaccagatccgatttaccgctgattccatgccttccagcagtgccagttctttgccttccactgaaatggtcatttttccagtgacagtttttgatttcctacacgctcaccaaaacttgccgcgtgctggaaccgtcggttttcagattattaaagataaacagttggttgagttcttcatgcgcatttcggcggctttcgggctgggcgatgtttcgtacgccaggattcataatccatgccatggatcagatcacgcaccgcggcaatggctcccgctccgccagacgctggatttctgccaaccaaaatgcgctgtcatcgtccgggttagtcagcacgcgcagataaccagcaagtccttgatttcaggacgagagaaaaacgacgtaccaccagaattttaccgcgcggttaaaatgtcggtgaagaccgcggtaaagagaaagtcggcgtgctggatattccgggcttctatgtgggttgacagacgatgtcaaagtgcaactgcagaaactggaaaaacagaatgtagcagcgtcatcatcgacctgcgtagcaatggcgtccgcgataacaacggcaaggttcgtgaagatagcgataccgacggacagttttctataaaggcccgctggtggtgctggttgaccgcttcagtgcttggcttcagaaatctttgccgcggcaatgcaggattacggtcgtgcgctgttgtgggtgaaccgacgtttgctggttttgagctgctggacggtggcaaaagcggaactcgcggtagcaggacgctgccagcgaactcgcagtttgcaagtgacggtattaaccgaaaagtgactgagcgtacatgtatacgaagattattggtactgcagctatctgcccgaacaagtgcggacaaacgccgatttggaaaaaatgtggacacctctgacgagtggattgtcactcgtaccggtatccgcgaacgcacattgccgcgccaaacgaaaccgtttcaaccatgggctttgaagcgggacacgcgcaattga

SEQ ID NO: 129878 - DNA, 3255 bp, Homo sapiens
atgtgcaaccaggtaatcccccaagttcacaagggcgcaaacgccggttccgttgaaatttgcaccgaagaaacagtctcaaacaccaaaccggttacattgcacactacaaacctggggcaaggtataaacaagctttcccctgttcctcaaaacccaactagagttacgcgacgagtcctgatcccccccttcacaagcaacaacgagttcaacacatacgcggccaggggggcaaccacagcaacaaggtcttctggccagagctcctgttctcggtgggtgacgcagttctatgggaacccctacaacaattcgacgaactcaatggaggacgagtcctactacggcggacaacattctgcgggcgatgagagggcgccacaagctgcggttcctgcggcaataaccaatcttgatgtctggctgcggacgcgcttcaccttcgatgtcttatcaatgcccgccataatgcgcagcaggaggatgcgcttgtggaaaaagccaaacaagtacctggcggctgttggctgccggtgtctgtctgctgacggtcagcagcgggcgcgagccgactcactggatgagcagcgtagtcgttacgcgcaaatcagcaggcctgggataatcgacaaatggatgtggctttattcacgccatgccgacaaacaccgccagaccaacggcgtccagcaccggcaacatccatttggtaagcgtcttggctggcgcaccagcacgatggtcagcatgctgggaccattgcaacgaccagatcgcgccatgtcgcgaattgtcccgccgcctactgcggttacacgcccagtaccagaacaccaaaagggtccatacgcaattttccggctacaaaacgccggagatggcaaataccgctgtgccgactatatccagccaaagacgagcattgttcaatccccactgagcccctggaaagtacggcacggattgatcggcaacaccggctgcggaccagctgcccatcacgtcagtttactgtccgccagtggcccaaccaccgcaatggtggccgattttttagcggtaacgtttcgagacggtttttcagcaacaccaagctttcgcgcgcacttcacgcgcttctttacggtgcaggcggctttcggcattggtatccccggcgaaggtaacggcgaatgggtggtgaccatccgctggcgaagctgcgggaaaatcaggtgcgtctgtttgccggagcggggattggcctgcgtcgtcaccgttggaacattcctccattcgcgtggtgcactgctcaacgacagcggtgagcataacttgcaggatgcgattaaccatcggctgaggattttactgccacgccatcacctgctgatgaagtggcctattccagctttccggtggcaccaccggcacaccgaaactgatcccgcgcaccataacgactactactacagcgtgcgtcgtagcgtcgagatttgtcagtcacacaacagacacgctacctgtgcgcgatcccggcggctcataactacccatgagttcgccaggatcgctgggcgtctttcttgccggaggaacggtgttctggcggccgatcccagcgccacgctctgtttcccattgattgaaaacatcagtcagcctgtggttgcggcgctgatcgaagggaaagccgggcccgacatagccccactgttcgtccatttccgcgcagacgatgacgtcatgcccggctgccaatggcctgctgggctttctctttggttgagatatcgggatctggatttcatgggtgatgcctttggtcgccagcaggcgcgccgtttggtgcgtgcatccgccgctttatccatcgccgtaccgagcatccgaaaccttcttccgcttccgtcgcgcctgcatccagcgctgctttcgcttcgaagtgagctgaaccagttgatcttcaaccttgattttcaggtcggttatcgactggtacgtcccgggaacacttttgcagggcgccttgttccggtgctgaacgtgctggaaggcgaagatgctgaaaccaacgcgctggcgcaaaacgtcgttgcccgaaatgcggcacggcgatggacagctatctatcgatccgaaaccacgccaaggccgttgatcatggtggtgtgcgagcagtaccaacgagtgtatccggataagcaatccattcaccgtcctgcaatcactccacactgctttgccgagatattcgaggttaacctgatggcaaagcctgtgcctggcggcacgacgctaaaccgactgaacgcttgctttcccatttcaggaacacataacgttcgtggttgcgctccatttccaggcgtacttttcttcaaatgcctcatcatcaccaaaacgatcgacggtcaccgagtgtcaatgaccaggtcgaccgatcaacaacggcggtacgccggtaaagtcctgcatcagcacccttgccgggcgggttgcgaagccctgattctcttcagggtgaatattaaagataacaaaacatcgcgtaacgatttgataacaacccaaattgataaaagaggagaaccttgtggcaaagcaaatgacaaccccgccgcagcggggtcaaggatcgcatttggtgccattgaagaatcactcttatggtcagcagaacaacggcggcttcgctggcggcgacgctggcttgtcgacctgatgagggaccggttggatcttcggctatggatcgttgatgtggaatccggcactggagtttacgaatcgtgcaccgtcttattccgaatatcgcagccggactacatgaccagcggttgtaatgattatgccgatgcattttgccacgacgctagcggcgcggtttcgccgattactgcggtggtggtcgttacgtcaggaattgcggcgtttcgccttttgcggtgcgtaatgccggtcgaccaccgcgtggtggctgcggaggttcatcgtcagatgagtgtcatcatcgtgatctggcttgtcgccatcaataaccgacatacggtttcgttgtctgccgatgcctcttcatcattcatgatgctggtatttcatcgtaggcagcttcaggctcaaacatcgtgcctgcgccattttcagggcgtagatagccagcacggcagccagcggcacagaaacctgacgcggatgccaccaaagcgcgcgttaaagcgcacctcatcattcgccagttccaattgccgacagcacgcggcgcaatgttga

SEQ ID NO: 129879 - DNA, 2412 bp, Homo sapiens
atggtgaatacgtgccagcagcgtttcaacaggcaccggacgcgggcggtcggtgccgtcaatggcgataatgtccgcgcccgcctgcgccagcgcatcaacatcttcaatataggccgtgatgcgtaccggagaatcctccagatcgcgtgctgcatgctccgtcaagggattgagggcgttgagaagagtttcgataaatggcttaccgggcagccgggtgagcgcattgtgcgtaaagaccgctatggtcgcgtaattgaagatatttcttctactgacagccaggctgcgcacaacctggcgctgagtattgatgaacgcctgcaggcgctggtttatcgcgaactgaacaatgcggtggcctttaacaaggctgaatctggtagcgccgtgctggtggatgtcaacaccggtgaagtgctggcgatggctaacagcccgtcatacaaccctaacaatctgagcggcacgccgaaagaggcgatgcgtaaccgtaccatcaccgacgtgtttgaacctggctcaacggttaaaccgatggtggtgatgaccgcgttgcaacgtggcgtggtgcgggaaaactcggtactcaataccattccttatcgaattaacggccacgaaatcaaagacgtggcacgctacagcgaattaaccctgaccggggtattacagaagtcgacgtgggaaacagtaagcactctgacggatagtattatcgataaacgccggatgacacatcacctccagcgaacgatcaccccgatggcctgcgtcatccagcacttgcaggaacagcgactcactgatctcttcaccgtagaatgcactgctgaatccctgggtagtgcgcaggttgaccggcaaatcaaacgccatctgacgatccgcccgcaacgcaatgccctgctctgccgcaaacctggcaacaatcgggaaaatctgcgggaacatatgcacatgatgatggctatcaagatgcgtagtatgcgtccgaatataacttttactcttggcgccggtttattgtcgaagaaaaacacttcggcctgtcgcacgatgtcgaacgttccgttaccttacgatttccactcagcagcgctgcgcagcaaagcggaaattgacgccggttttgcccgtatctggcaagtgatgcatgacggtattgaacgtgggatgaacactgaaggcgtgctgcctggtccgctcaatgtgccgcgccgtgccgtagcgctgcgtcgtcagctggtttccagcgataacatctctaacgatccgatgaatgtcatcgactggatcaacatgtacgcgctggcggttagtgaagaaaacgcagctggcgggcgcgtggtaacggcaccgactaacggtgcgtgcggcattattccggcagtactggcttattacgataagttccgtcgtccggtaaacgagcggtcaattgcccgctattttctggccgcgggggctattggcgcgctgtataaaatgaacgcctccatctctggcgcggaagtcggctgtcagggggagattggcgtggcctgttcaatggcggcggcagggttaactgaactactgggcggcagtccggcgcagaacatggaaggcaagattgatcgcccggaagagtatgccgatattgccactaagtgtgtgaccaacttccgtgagaagaatcgcgatcgttgcctggtgattttgtcgcgtaatgatgaagcgcttaacagccagcggacatctgaagagttgcatcattattacgagattgtctgggacgaagagcagacgcacaaattcaagaatatctccccgcatttacagcgcattaaagcgttcaaaaccctcggtggaccacatggaaacatcaccgttgatatggttattagcgcacaggaattgttgcaggaagacatggcaacattcgacggacatatcgttgaagcgttgatgaaaatgccagaagttaacgccatgtatccggagcttaagttgcacgccattgggtgggttaagcataaatgtattcctggtgctaaatggcccgaaattcaggcagagatgcgcatctggaaaaaacgtcgcgaaggtgaacgcaaggaaaccggaaaatacacgtctgttgttgatctcgcccgcgccagagccaatcaacagtacactgaaaattcaacaggaaaaatcagcccggtcattgctgccattcatcgcgaatacaagcagacatggaaaacactggatgacgaactggcctatgggcgctgcttcgcagacaggcagaacttgatggtatgcctgcgatcaatgccaaacgtgtttaccggatcatgcgccagaatgcgctgttgcttgagcgaaaacctgctgtaccgccatcgaaacgggcacatacaggcagagtggccgtga

SEQ ID NO: 129880 - DNA, 2802 bp, Homo sapiens
atgcggtcgcgttttttacgtgtcgcgttttaccactattcagtcacttcccttcccgcactccccgcgcttcggtactaccgccttgggtctggggtcaatgtaagccataataccggctttctccgcagtcccaaacgttgcggccaggccctcacatgcccggtaacattattcggccaaagttctcagctggttcaccggcgagcagaaacagcgcgcgttcaggcgctgacccgcgttggcatggtgcattttgcccatcagcgcgtttcaccctctccggcggccagcagcaacgtgtggcgattgcccgtgcgctgtgcagcaggcgaaaaatcagcgcgcatcgtgatggacaccctgcgcgacatcaaccagacgacggcatcaccgtggtcgtcacgctgcatcaggtggattacgccctggctactgcgaacgcatcgtcgccctgcgccaggggcacgtcttctacgaggcagcagccaacagtttgataacgaacgttttgaccatctctaccgcacattaaccgcatatggagaagaagctgagcgtgagtcacgccttcttgtccccggactacgcgggtaccgagctgagttaggcatgaatacttttttcgctgagttcgcttcatgtttgacggaattcagacgcgtttacgcgaaagtctggctctgcgtcaaccaaatgaatcggggtcaggctgatgcagcagcaattgcagcagactgtgatgactcacggcggatttacaccgacgcccagctgttacgcgatgatattcaaacacttttacggcagaacgatattgaccaagaccggttcggtcggttaaacatagatcccccattagaattcgatgtaattttcagtgtagaccataattttctaactgaggttcatcgcggctttatggacttttctgaaagcgttgtgaagcgcaatcagatcacggtacaaccgtatggccatgcaattaagatgttcaccggaatcgctaccaatctgaataaaaagactgttcgaagctcattccggagaggaaaacttcaatacaatgttcacgacagaacagtaaacaaccatcgcgaaccacggcgctaccagattcaccttgttaaaggccaccgcattgttcagttcgcgataaaccagcgcctgaggcgttcatcaatactcagcgccaggttgtgcgcagcctggctgtcagagaagaaatatcttcaattacgcgaccatagcggtctttacgcacaatggctcacccggctgcccgccatttatcgaaactcttctcaacgcctcaatcccttgactatcgacgttagtaaagccaatgaggtgagcagtcagcgaaatcgaaagcgattcaccgccaccaatatccatgtgacctcgcacggtacggaatttaccctaaaaccccaaccggtagcgtcgatgttctgctgccgttgccggggcgtcaaatattgcgaatgcgctggcagccgctgcgctctccatgtccgtgggcgaacgcttgatgctatcaaagcggggctggcaaatctgaaagctgttccagccgtctgttccccatccaactggcagaaaaccagttgctgctcgacgatcctacaacgccaatgtcggttcaatgactgcagcagtccaggtactggtgaaatgccgggctaccgcgtgctggtggtgggcgatatggcggaactggcgctgaaagcgaagcctgccatgtacaggtggtgcgtaacgacggtcctgaatacacttcagcaagcgcggtacgccgaccatgggcgggattatgatcctgcggcgattgtgatctccgtactgctgtgggcttacccgtccatccgtactctggtgcgtgttggtggtgctgggtggcgccccgtggccggtcgttcaaataaatgttgccccccacccaacccaaccaacccgcccaatccaacccaacctccttatgcccatcacgcaacctttcgtagtcctgcacgccggcatttagctaatccccgaaaagaaaatgctcaacctggggatgaagtcggcaaagtgttcgattttttcgaggcgttagcggaagatgcggcgtggagttgcggtttgttggcgacaagtgtcaggtcgcgggcgaccgctgatgctgcgtcgggcgctaagcaacctgctttcgaacgccctgcttatacgccaaccggagagacaattgtagtgcgctgtcagacggtcgatacctggtgcaagttatcgtcgaaaaccccggtgacggaaatggacgtcaaaaggctcacttctgtttgcagatgcccattcgccgaattaaacaacgccagtccatatagaagcgaaggtgacggtaacgctcgagtgtcagcgttgcgggaagccgtttatcatcaggtctacacaacgtattgttttagtcctgtgcgttcagacgaaaggctgaagcactgccggaagcgtatgaaccgattgaggttaacgaattcaaccgtcggacgcaagttagtggcaacggctggagttccgcagtggccctttcggtacacataccgttcactcttgggcgctgtcttcgttcgttatttctccgtgcatacagggcgcacacagcttttagttttgcttgttcggcatgccggtgctacctttcctcctgtatccctcacggtgcttattaggggcccttgctgtaatgctggtagcagtcgtttctgtaacaaaagggtaccccttaaggccccgtatgcacgtaaactacgcgttaaagctatctaa

SEQ ID NO: 129881 - DNA, 1824 bp, Homo sapiens
atgaacgtgaactgggtgtctgcgcgtcgatatcggtggtggtacaatggatatcgccgtttataccggtgggcattgcgccacactaaggatatcgcttacgcctttggcacgccgccaagcgacgccgaagcgattaagttcgccacggttgtgcgctgggttccatcgttggaaaagatgagagctggaagtgccgagcgtaggtggtcgtccgccacggagtctgcaacgtcaacactggcagaggtgatcgagccgcgctataccgagctagcaaaatcagcagacgcttctgaacgtgaactggagatgtctaccgagattgcacgtctcaaacgcagctggcagaacgggatgaagagctggctatcctccaaaaggccgcgaatacttcgcgaagcgcctgaaatgaagtatgtctttattgaaaaacatcggctgagttcagcatcaaagcaatgtgccgcgtgctccgggtggcccgcgcggctggtatacgtggtgtcagcggcggacaaggataagcacgcgtcacagttccgccaacactgcgacagcgttgtcctcgcggcttttacccgaaaatctgttggagcaggatttttacgccagtgcccgaaccagaagtgggcaggagacatcacgtacttacgtacagatgaggctggctgtatctggcagtggtcattgacctgtggtcacgtgccgttatggctggtcaatgtcgccacgcatgacggcgcaactggcctgcgatgcctgcagatggcgctgtggcggcgtaagaggccccggaacgttatcgttcaacggaccgtggaggccattcacatccgcccggtaaccacgttctgctgcgaacagaaccagaactgctgcgcaacggacatcggcgcatactgtttctgtttcagcagttcgtcactttctgaccgtggtcaagctgcttacgtgttgcatcgtcaaggtggatgcaaactgagagaacgctgccagttcacgatactgtgccagagcgtacggataccaccggacagttttttcatgatcttggcttcaacgtattcggcgttaacacgtgcagcacgctccagcagacgaagtggaggtagaaaacgtcgcccgggaatgcttcacgtcctggcggacgcggagcagcagggagatctgacgagaagccgtcgtgatccagcggacctttaccgtcgattggtgcaccagagtgttaaccacacggcccagcaggccacggccaaccggaacttccggatacggccagtacacttaactttcatgccttcggcaaggactggcctgacattagccactgaattgataaacctcgcctatgagcggcacagcagcatctgtttatttataccaaaaccgaatacgaggcgctgttccgccaggcggtttttccacgctgaccagcgtacccggcgtgatgtacaaccaggaatgcgctactggctggaaacgccgactatctccgcaccgcccatcgaacggttgaaattgagcggctgcgttaccaggagatgccgatatccgcttccgggtacgtcaactgctggcgaaaaacgatctcacggctatcgcgccgctgtccctgcagtcacgctgcattatttgcagaacctgcttgagcactcccccaggacgcggcagctcgtcaaaagacccccgcatgagaaacaggcacccttgagtctggggattgatgatacgcatcgccccactcgatacgcaggatatcgacctgcaaataatagcagcgttgagaaacagttggcggtaccagctgatttgtttgtgtga

SEQ ID NO: 129882 - DNA, 720 bp, Homo sapiens
atgtacggaggctggcgggaacaggacgctggtgaaagacgtcagtcatacagcatgtaccagagctgctgggcataccgggacacgtattcacacagtcagcagacaagggaacctgtcagacctacaccgacaatccgcctgtaccctggtgtcaaacagtgcgccttttactccgaagaaggtgctgtctgcatgaatatgccacgtactcctggttacccctttaacgtaaaaaccgtggacggcaacctgcgctgtcagggactgagggcaaaggcctcccggaagttcagcccaaaatctgttggagcagatttttacgccagtggcccgaaccagaagtgggcaggagacatcacgtcttacgtacagatgaaggctggctgtatctggcagtggtcattgacctgggtcacgtgccgttattggctggtcaatgtcgccacgcatgacggcgcactggcctgcgatgccctgcagatggcgctgtggcggcgtgcgaacttatgctcccgaaccaaccggctgaaggcgctggttgcaaaactgcagcgcatgcagttcgtaatagctcagaaaaacttcgcgcaaaaatcgaacgacttgacgcacacctgcaaggtcttcctcggcccctcctctgatgctgaaacagcccttcacacgtcagtggccgctcaacaccccatggaaaccaccaaggctttcaccctctga

SEQ ID NO: 129883 - DNA, 1398 bp, Homo sapiens
  misc_feature (1)...(1398): n = a,t,c or g
ctagttgtgggaacctgcatatttctcaggcatgcagcatctggggctgaactgcccgtctgcgtctgtggcggctctatttttttttaaatccactttcttcatactttgcattttagtcaggaaatcactgctgcccacatactcctcgggatcctcagagtcgagccacaccgcgggaacaaagcctcggggaagcacccccgcggaagagggtgccaggccacaagcgggccccgggaaagagggcgttccccaaagcggcttanggcagcccgcagccagttgcgccgtcatgcgtggcgacattgaccagccaataacggcacgtgaccacaggtcaatgaccactgccagatacagccagccttcatctgtacgtaagtacgtgatgtctcctgcccacttctggttcgggccactggcgtaaaaatcctgctccaacagattttctgacacaggcaggccgtgtgcgcggtagctgaccgggctgaacttccgggaggcctttgccctcagtccctgacggcgcaggcttgccgccacggtttttacgttaaaggggtaaccctgagcacgcagttcatccgtcaggcgtggggcaccgtaacgctgttttgaccgggtaaaagccgcgaggacaacgctgtcgcagtgttggcggaactgctgacgcgtgcttatccttgtccgccgctgacaccacgtataccagccgctgcgggccacccggagcacgcggcacattgctttgatgctgaactcagcctgatgtttttcaataaagacatacttcatttcaggcgcttcgcgaagtatgtcgcggcgtgcaatctcggtagacatctccagttcacgttcagaagacgtctgctgattttgctgtttactgcgccagttgtagagttgtgattcatacaggctgagttcacgggctgcggcagtaacaccgatgcgttcagcaagcttcagggcttcagggtttttactggtgatactatttgtatgtagggtgtctgtggtcgggtgccgggtcttggcgtggtcgggggggtcggtgttccgcaggggggtgccgttagcctggactgtattgcgctgggttcgccgccggtgtgggtgcggcgtgggccggtgtcgcggtctttccgctgttgtgtatccgtctggcatcatcacggtggacagtgcgcgcagctggcggattatgggccgcagtggcagtccgctggcgcacggttggattggcgggttgctggtcgcagccacgcctttgaacggacgcttcatgttttcgatagcgtcgatgatgtcgtggtgaaccagctgttcgttctggatacctacacaacgaccgccgtaacctgccagcagcagatcgatagcgtaagcgcccat

SEQ ID NO: 129884 - DNA, 3208 bp, Homo sapiens
atggcggaagggatgcgtaccataggtcgcgccatgcttaaaaataagcatatgacgatcacggaatttgttgcccagcggatgcgtgatgcccagcaaaaaggcgagataagcccagacatcaacacggcaatgacttcacgtttactgctggatctgacctacggtgtactggccgatatcgaagcggaagacctggcgcgtaagcgtcgtttgctcaggattacgcgcgatgattggcggtatcttaaccgcatcctgattctctctctttttcggcgggctggtgataactgtgcccgcgtttcatatcaaaccccaacccgtgaaatcaaaaaactcgacggcctgtgggcattcagtctggatcgcgaaaactgtggaattgatcagcgttggtgggaaagcgcgttacaagaaagccgggcaattgctgtgccaggcagttttaacgatcagttcgccgatgcagatattcgtaattatgcgggcaacgtctggtatcagcgcgaagtctttataccgaaaggttgggcaggccagcgtatcgtgctgcgtttcgatgcggtcactcattacggcaaagtgtgggtcaataatcaggaagtgatggagcatcagggcggctatacgccatttgaagccgatgtcacgccgtatgttattgccgggaaaagtgtacgtatcaccgtttgtgtgaacaacgaactgaactggcagactatcccgccgggaatggtgattaccgacgaaaacggcaagaaaaagcagtcttacttccatgatttctttaactatgccgggatccatcgcagcgtaatgctctacaccacgccgaacacctgggtggacgatatcaccgtggtgacgcatgtcgcgccagactgtgaacacgccaacaacattgtctacagagctgttatccagttcagtaccgttgtctacgtcgccgttaccgttgatagtcaggtgaccatcagagttcatagcaacaataccgtaaccgtagttagacttggaagtatcccaggtacggtcgttcaccagatcagcgttcagaacgtaatcgctgctatggatatcgaacacaccagatactacgttaccgttatggtcagcgatgttgccgctggtcagttccagtttgtcagtacggaaagcttcagtatcgaactgatcaacgttcacatccaatacaccgccgttagttacggtgatagtattggcgtacagcattcgcctgaatttcgcagtgaagccctgaagcttgctgaacgcatcggtgttactgccgcagcccgtgaactcagcctgtatgaatcacaactctacaactggcgcagtaaacagcaaaatcagcagacgtcttctgaacgtgaactggagatgtctaccgagattgcacgccgcgacatacttcgcgaagcgcctgaaatgaagtatgtctttattgaaaaacatcaggctgagttcagcatcaaagcaatgtgccgcgtgctccgggtggcccgcagcggctggtatacgtggtgtcagcggcggacaaggataagcacgcgtcagcagttccgccaacactgcgacagcgttgtcctcgcggcttttacccggtcaaaacagcgttacggtgccccacgcctgacggatgaactgcgtgctcaggctgtaccctttaacgtaaaaacccgggcggcaagctgcgccgtcagggctgagggcaaggccccccgaattcagcccgtagttacgcgcaaagcctgctggtcgaaactgtgggcagaatttagcaggcaaaaatcagccagccagctgcatgcctgttttgtcagaatctcagcaggcatccccctcatggcagggattatggggccaagaaccaagtacccaacacaattgaacaaccaccgggaccataataattcccacaaagatttccagcggagcaacacaagcacaattgagatccaggtggtccccccagtgcagtgggcacaatttaaacagttggcacaacttaccgatgagccaccaacagcagcccgaccgcgcgcgcgccgcagcctgggcgtaagggccgccggagccgatagcaataagatcgttttctggctgcaccacgtcaccgttaccggtgatgataagcgatgcagtttcatccgcgactgccagcagtgcttcaagtttgcgcagcatgcgatcggtacgccagtcttttgccagctcaacggcggctttgaccagatggccctgatgcatttccagtttacgttcaaacagttcgaacagcgtaaaagcatccgcagtaccgcccgcaaagcccgcgatgactttgtcgttgtacagacggcggacctttttcacgttgcctttcattacggtattgcccaacgtggcctgaccatcaccagcgatgaccacatggccgttacggcgtacgcttactatagttgtcacgagctgaccccttggttacgaatacagagtacaaaccccgtacaaaaccttgaacgaacggatggaccatccaaggggtcggatattctccgacgtcggtttgggcgtaagggacgacatgggcaattgctgataaatggcattgttcgagttcgaatcggaagatgtaaaaccgtgtatgatggtgtttttgaggtgctccagtggcttctgtttctatcagctgtccctcctgttcagctactgacggggtggtgcgtaacggcaaaagcactgccggacatcagcgctatctctgctctcactgccgtaaaacatggcaactgcagttcacttacaccgcttctcaacccgaaaatctgttggagcaggatttttacgccagtggcccgaccagaagtgggcaggagacatcacgtacttacgtacagatgaaggctggtgtatctggcagtggtcattgacctgtggtcacgtgccgttattggctgtcaatgtcgccacgcatgacggcgcaactggcctgcgatgccctgcagaggcgctgtggcggcgtaagaggccccggaacgttatcgttcacacggacgtggcgacttatgcttccgaaaccaaccggctgaaggcgctgttgcaaaactgcagcgcatgcagttcggtaaaagctcagaaaaacttccgcaaaaatcgaacggtaaatacaggaagcacaggagcgaatcagcgcattcaggaggaaatggcagaaacactg

SEQ ID NO: 129885 - DNA, 3749 bp, Homo sapiens
atggaaaatactacggtaactgctgataataacgtggagaaaaatgtcgcgtcgtttgccgcaaatgccgggacatttttaagcagtcagccagatagcgatgcgacacgtaactttattaccggaatggccacagctaaagctaaccaggaaatacaggagtggctcgggaaatatggtactgcgcgcgtcaaactgaatgtcgataaagatttctcgctgaaggattcttcgctggaaatgctttatccgatttatgatacgccgacaaatatgttgttcactcagggggcaatacatcgtacagacgatcgtactcagtcaaatattggttttggctggcgtcatttttcaggaaatgactggatggcgggggtgaatacttttatcgatcatgatttatcccgtagtcatacccgcattggtgttggtgcggaatactggcgcgattatctgaaactgagcgccaatggttatattcgggcttctggctggaaaaaatcgccggatattgaggattatcaggaacgcccggcgaatggctgggatattcgtgctgagggctatttacccgcctggccgcagcttggcgcaagcctgatgtatgaacagtattatggcgatgaagtcgggctgtttggtaaagataagcgccagaaagacccgcatgctatttctgccgagcattcgcctgaatttcgcagtgaagccctgaagcttgctgaacgcatcggtgttactgccgcagcccgtgaactcagcctgtatgaatcacaactctacaactggcgcagtaaacagcaaaatcagcagacgtcttctgaacgtgaactggagatgtctaccgagattgcacgccgcgacatacttcgcgaagcgcctgaaatgaagtatgtctttattgaaaaacatcaggctgagttcagcatcaaagcaatgtgccgcgtgctccgggtggcccgcagcggctggtatacgtggtgtcagcggcggacaaggataagcacgcgtcagcagttccgccaacactgcgacagcgttgtcctcgcggcttttacccggtcaaaacagcgttacggtgccccacgcctgacggatgaactgcgtgctcagggttacccctttaacgtaaaaaccgtggcggcaagcctgcgccgtcagggactgagggcaaaggcctcccggaagttcagcccggtcagctaccgcgcacacggcctgcctgtgtcagaaaatctgttggagcaggatttttacgccagtggcccgaaccagaagtgggcaggagacatcacgtacttacgtacagatgaaggctggctgtatctggcagtggccccttctttggaaaagtttgaaagctcctgggatttagcacgggccttccagccaacaggcaaaagccacccgtataccgggaacccccgggaaggcccgacaaaggccaggaaggttacaaaaggttgggaagaccgacactttctgttatttttccgcgctgatatcaatggtaatcggatctttgtcgccgccttgttgaatggtgagtttactgtcgctggtggcgatcgccgttttcgtatcgtctctggtggtgcgcgtggtcagggtttgcgcctgcgccagatgggtgacgctgatggtgtatttcccggcgatggcgttacccgcagtggtggcactgaactgcgcgcgaaggatgacgcagcgggtcagtcgattgctaaccgtttcacctctaacattaaaggcctgactcaggcggcccgtaacgccaacgacggtatctccgttgcgcagaccaccgaaggcgcgctgtccgaaatcaacaacaacttacagcgtgtgcgtgaactgacggtacaggccactaccggtactaactctgagtctgatctgtctgctatccaggacgaaattaaatcccgtctggatgaaattgaccgcgtatctggtcagacccagttcaacggcgtgaacgtgctggcaaaaaatggctccatgaaaatccaggttggcgcaaatgataaccagactatcactatcgatctgaagcagattgatgctaaaactcttggccttgatggttttagcgttaaaactaacgatacagttaccactagtgctccagtaactgcttttggtgctaccaccacaaacaatattaaacttactggaattaccctttctacggaagcagccactgatactggcggaactaacccagcttcaattgagggtgtttatactgataatggtaatgattactatgcgaaaatcaccggtggtgataacgatgggaagtattacgcagtaacagttgctaatgatggtacagtgacaatggcgactggagcaacggcaaatgcaactgtaactgatgcaaatactactaaagctacaactatcacttcaggcggtacacctgttcagattgataatactgcaggttccgcaactgccaaccttggtgctgttagcttagtaaaactgcaggattccaagggtaatgataccgatacatatgcgcttaaagatacaaggcgcttcgcgaagtatgtcgcggccttttggaggatagccagctcttcatcccgttctgccagctggcgtttgagacgtgcaatctcggtagacatctccagttcacgttcagaagacgtctgctgattttgctgtttactgcgccagttgtagagttgtgattcatacaggctgagttcacgggctgcggcagtaacaccgatgcgttcagcaagcttcagggcttcagccagccccaggcagtccatgctgatcccttcgaacgccgcattttgccaggcatcctgaatcagttgttgcagtaatgaaaccatattagcgtgctgatcgatggtcacatggtccgctttagtggcagcaaacaatagcttatcgataaccggcgaaaacaaacgccggaacagggtacgctgcccgtagtgaaaactttgcatcagctgcgtcagtgccagacgcatatcattaaatgcctgtggcccactgttgagaggttgcaggcaatccaccagcacaatctggcggtcaaagcgcagaaaatgattcttatagaaccccttcaccaccttctcgcagtaataattaaagcgctcgcgcagcattccggcattggtatgcttatcggcctgcgccagtttggactcgccccaggtatcgacatccggccacgggaagaattgcagcgcgggcgcacctgccatatctcccggcaagacaaagcgcccaggctgaataaagtgcagcccctgctctttacagtggtggagataatcggtccacgcggcggcaatgtccgccagccggttttcgtcggcaggcgctagcgggtccagcccttcgctcatcattcgccatttcgccgaccattctccgcgctgaccattgagtaagcccgtcatctggcgcgaccagcttaaatagtcctgcgccagcatcggcaggtcgagcaaccattcgccgggataatccacaatttccagatacagcgtggaggtatccttaaagtggcgtagcagcgaatcattcgatttaaaacgtagcgccaggcggatttcactgacgccgcgcgttggcgttggccaggcgggtggatcgccatataactgcgccagcccttcgtcataggtgaagcgcggaatgccaaagtcacgcgcacttaacaacggcatacgtgctccggcgtgaatattaagcaactgattaaccat

SEQ ID NO: 129886 - DNA, 2011 bp, Homo sapiens
atgtctaccgagattgcacgtctcaaacgccagctggcagacgggatgaagagctggctatcctccaaaaggccgcgacatacttcgcgagcgcctgaaatgaagtatgtctttattgaaaaacatcaggctgagttcgcatcaaagcaatgtgccgcgtgctccgggtggcccgcaacggctggtaacgtggtgtcagcggcggacaaggataagcacgcgtcagcagttccgccacactgcgacagcgttgtcctcgcggcttttacccggtcaaaacagcggttaccccttaacgtaaaaaccgtggcggcaagcctgcgccgtcagggactgagggcaaggcctcccggaagttcagcccggtcagctaccgcgcacacggcctgccttgtcagaaaatctgttggagcaggatttttacgccagtggcccgaaccaaagtgggcaggagacatcacgtacttacgtacagatgaaggctggctgtatctggcagtggtcattgacctgtggtcacgtgccgttattggctggtcaatgtcgccacgcatgacggcgcaactggcctgcgatgccctgcagatggcgctgtggcggcgtaagaagccccggaacgttatcgttcacacggaccgtggaggccagttcggtgaccgctggaagggctggctaacgcgctcaatattccgctggatcagctttcagcccgcattagcgccaacccgaaaggcggctttatgttatctggcgcgtgaggtgaaccctgacatggcggactacatcaaaaaactgaaactgccggggattcatgtgcgtgaagaatctcgccgttattatccatccggcgaagtgactgctcacctcattggctttactaacgtcgatagtcaagggattgagggcgttgagaagagtttcgataaatggcttaccgggcagccgggtgagcgcattgtgcgtaaagaccgctatggtcgcgtaattgaagatatttcttctactgacagccaggctgcgcacaacctggcgctgagtattgatgaacgcctgcaggcgctggtttatcgcgaactgaacaatgcggtggcctttaacaaggctgaatctggtagcgccgtgctggtggatgtcaacaccggtgaagtgctggcgatggctaacagcccgtcatacaaccctaacaatctgagcggcacgccgaaagaggcgatgcgtaaccgtaccatcaccgacgtgtttgaacctggctcaacggttaaaccgatggtggtgatgaccgcgttgcaacgtggcgtggtgcgggaaaactcggtactcaataccattccttatcgaattaacggccacgaaatcaaagacgtggcacgcatcacgaccgaggaagactttaatcatgcgagtgcagctcgattcgtatgcgctgccgccgaaagagcgttgcaaaaccaccattaacctggtgccggaaaacgaagtgctgaacgtgctggaaggcgaaaatgctgaaaccaacgcgctgcgcgcaaaacgtagttgcccgaaatgcggcacggcgatggacagatatctcatcgatccgaaacgtatgttgcgtggatgaggcaataacccaacctgcgacggttaccagatcgaacagggcgaattccgcattaaaggttatgacggcccgatcgttgagtgtgaaaaatgtggctctgaaatgcacctgaaaatggggcgtttcggtaaatacatggcctgcaccaacgaagagtgtaaaaacacacgtaagattttacgtaacggcgaagtggcaccaccgaaagaagatccggtgccattacctgagctgccgtgcgaaaaatcagatgcttatttcgtgctgcgtgacggtgctgccgctcttttgcggccacccagctacccagcagcagagggcactgaaaggcagtgcaggttcactgtgccttttacctccgtcatccagagagacccagcaggctttgacaacagcctccagagctag

SEQ ID NO: 129887 - DNA, 929 bp, Homo sapiens
tgtgcaatctaaaaacttgtcacacttcacatggatctgtcatgcggaaacagcggttatcaatcacaagaaacgtaagaatagcccgcgaatcgtccagtcaaacgacctcactgaggcggcatatagtctctcccgggatcaaaaacgtatgctgtatctgttcgttgaccagatcagaaaatctgatggcaccctacaggaacatgacggtatctgcgagatccatgttgctaaatatgctgaaatattcggattgacctctgcggaagccagtaaggatatacggcaggcattgaagagtttcgcggggaaggaagtggttttttatcgccctgaagaggatgccggcgatgaaaaaggctatgaatcttttccttggtttatcaaacattgggtaacgatatcgccccaaacaagtgcttatgaacgtggtcagcgttatgcaagccgatgcaagaatgaatttgctggaaatatttctgcgctggctgatgcggaaaatatttcacgtaagattattacccgctgtatcaacaccgccaaattgcctaaatcagttgttgctcttttttctcaccccggtgaactatctgcccggtcaggtgatgcacttcaaaaagcctttacagataaagaggaattacttaagcagcaggcatctaaccttcatgagcagaaaaaagctggggtgatatttgaagctgaagaagttatcactcttttaacttctgtgcttaaaacgtcatctgcatcaagaactagtttaagctcacgacatcagtttgctcctggagcgacagtattgtataagggcgataaaatggtgcttaacctggacaggtctcgtgttccaactgagtgtaagagaaaattgaggccattcttaaggaacttgaaaagccaggggggtcctttagagtccacag

SEQ ID NO: 129888 - DNA, 472 bp, Homo sapiens
tgtgacaatctaaaaacttgtcacacttcacatggatctgtcatggcggaaacagcggttatcaatcacaagaaacgtaaaaatagcccgcgaatcgtccagtcaaacgacctcactgaggcggcatatagtctctcccgggatcaaaaacgtatgctgtatctgttcgttgaccagatcagaaaatctgatggcaccctacaggaacatgacggtatctgcgagatccatgttgctaaatatgctgaaatattcggattgacctctgcggaagccactgctgtacttaccgaaagtgattatcgtgttctggttggcgagctggatgatgagcagatggctgcattatccagattgggtaacgattatcgcccaacaagtgcttatgaacgtggtcagcgttatgcaagccgattgcagaatgaatttgctggaaatatttctgcgctggctgatgcggaaaatatttcac

SEQ ID NO: 129889 - DNA, 516 bp, Homo sapiens
atgctctcagtcaaaatgcctgtgtcatcatactcctttcatccgtcgcttggccagagtggggatcctctagagtcgacctgcaggcattgtgacaatctaaaaacttgtcacacttcacatggatctgtcatggcggaaacagcggttatcaatcacaagaaacgtaaaaatagcccgcgaatcgtccagtcaaacgacctcactgaggcggcatatagtctctcccgggatcaaaaacgtatgctgtatctgttcgttgaccagatcagaaaatctgatggcaccctacaggaacatgacggtatctgcgagatccatgttgctaaatatgctgaaatattcggattgacctctgcggaagccagtaaggatatacggcaggcattgaagagtttcgcggggaaggaagtggttttttatcgccctgaagaagatgccggcgatgaaaaaggaacctccagacacgaccagatatttcatgcagctgctgctattgaagcatgttatctataa

SEQ ID NO: 129890 - DNA, 300 bp, Homo sapiens
tgtgacaatctaaaaacttgtcacacttcacatggatctgtcatggcggaaacagcggttatcaatcacaagaaacgtaaaaatagcccgcgaatcgtccagtcaaacgacctcactggagcggcatatagtctctcccgggatcaaaaacgcgtccccgttacgaaccggtttcgcagtttcggcttagtgaaacacagaaacaccaatccgtatgccatgcgtttatacgaatccctgtgtcagtatcgtaagccggatggctcaggcatcgtctctctgaaaacgactggatcatag

SEQ ID NO: 129891 - DNA, 1932 bp, Homo sapiens; identical to SEQ ID NO: 119300
  misc_feature (1)...(1932): n = a,t,c or g

SEQ ID NO: 129892 - DNA, 1734 bp, Homo sapiens; identical to SEQ ID NO: 119302

SEQ ID NO: 129893 - DNA, 971 bp, Homo sapiens
aacgttcagcagtttatcgatgaaggcaattatacatccggcgacaaccatacgctgagagaccctcactacgttgaagacaaaggccataaataccttgtattcgaagccaacacgggaacagaaaacggataccaaggcgaagaatctttatttaacaaagcgtactacggcggcggcacgaacttcttccgtaaagaaagccagaagcttcagcagagcgctaaaaaacgcgatgctgagttagcgaacggcgccctcggtatcatagagttaaataatgattacacattgaaaaaagtaatgaagccgctgatcacttcaaacacgtgtgacaatctaaaaacttgtcacacttcacatggatctgtcatggcggaaacagcggttatcaatcacaagaaacgtaaaaatagcccgcgaatcgtccagtcaaacgacctcactgaggcggcatatagtctctcccgggatcaaaaacgtatgctgtatctgttcgttgaccagatcagaaaatctgatggcaccctacaggaacatgacggtatctgcgagatccatgttgctaaatatgctgaaatattcggattgacctctgcggaagccagtaaggatatacggcaggcattgaagagtttcgcggggaaggaagtggttttttatcgccctgaagaggatgccggcgatgaaaaaggctatgaatcttttccttggtttatcaaacgtgcgcacagtccatccagagggctttacagtgtacatatcaacccatatctcattcccttctttatcgggttacagaaccggtttacgcagtttcggcttagtgaaacaaaagaaatcaccaatccgtatgccatgcgtttatacgaatccctgtgtcagtatcaaggaggaggagaagaagaggaagaagaagaagaagaaggaggaggaggagaaagaggaggagaaggaggaggagaaaaaaa

SEQ ID NO: 129894 - DNA, 1146 bp, Homo sapiens
gattctgagtatgtctttgtggtggttgatttcctaattggagtgttaatttttgctaccatcgttggtaacataggttctatgatttccaacatgaatgcagccagagcagaatttcaagcaagaattgatgctatcaagcaatatgtgcgtggtcgaaatcaagatttgatgctatcaagcaatatatgcacttttcgaaatgtaagcaaagatatggaaaagagggttattaaatggtttgactacctgtggaccaacaaaaaaacagttgatgagaaagaagtcttaaagtatctacctgataaactaagagcagaaattgccatcaacgttcacttagacacagtggggaaagtctacagtcctggagattatatttgcaagaaaggggatatcggacgagagatgtacattatcaaggaaggcaaactcgctgtggtggcagatgatggagtcactcagtttgtggtattgagcgatggcagctacttcggtgagatcagcattcttaacattaaagggagcaaagctggcaatcgaagaacggccaatattaaaagtattggctactcagacctgtgtgacaatctaaaaacttgtcacacttcacatggatctgtcatggcggaaacagcggttatcaatcacaagaaacgtaaaaatagcccgcgaatcgtccagtcaaacgacctcactgaggcggcatatagtctctcccgggatcaaaaacgtatgctgtatctgttcgttgaccagatcagaaaatctgatggcaccctacaggaacatgacggtatctgcgagatccatgttgctaaatatgctgaaatattcggattgacctctgcggaagccagtaaggatatacggcaggcattgaagagtttcgcggggaaggaagtggttttttatcgccctgaagaggatgccggcgatgaaaaaggctatgaatcttttccttggtttatcaaacgtgcgcacagtccatccagagggctttacagtgtacatatcaacccatatctcattcccttctttatcgggttacagaaccggtttacgcagtttccgcttagtgaaacaaaagaaatcaccaattcctatgccatgcgtttatacgaatccctgtgtcaagaatcgtaa

SEQ ID NO: 129895 - DNA, 556 bp, Homo sapiens
tgtgacaatctaaaaacttgtcacacttcacatggatctgtcttggcggaaacagcggttatcaatcacaagaaacgtaaaaatagcccgcgaatcgtccagtcaaacgacctcactgaggcggcatatagtctctcccgggatcaaaaacgtatgctgtatctgttcgttgaccagatcagaaaatctgatggcaccctacaggaacatgacggtatctgcgagatccatgttgctaaatatgctgaaatattcggattgacctctgcggaagccagtaaggatatacggcaggcattgaagagtttcgcggggaaagaagtggttttttatcgccctgaagaggatgcccgcgatgaaaaaagctatgaatcttttccttgggttatcaaacgaacaagtaaatggaccgcttgtcgacgagtcagaggcgggttatttttgccgattttaacccatcgaaacgaccgtggtcggtggcttcagatgactctaacaacagctggaatccggcatacaattgctttggggtaccgagctcgaattcgtaatcatg

SEQ ID NO: 129896 - DNA, 1000 bp, Homo sapiens
  misc_feature (1)...(1000): n = a,t,c or g
ccacctgatgctccgactggccattgaaactgttgctcatgactatgatgtcatagttattgacagcgcgcctaacctgggtatcggcacgattaatgtcttatgtgctgctgatgtgctgattgtgggcacgcctgctgagttgtttgactacacctccgcactgcagtttttcgatatgcttcgtgatctgctcaagaacgttgatcttaaagggttcgagcctgatgtacgtattttgcttaccaaatacagcaatagtaatggctctcagtccccgtggatggaggagcaaattccggatgcctggggaagcatgggtctaaaaaatgttgtacgtgaaaccgatgaagttggtaaaggtcagatccggatgagaactggttttgaacaggccattgatcaacgcttttcaactgnagcccggctttaccggcataaccaagcctatgcctccagcatccagggtgacggtgccgaggatgaggatgagcgcattgttagatttcatacacgntgtgacaatctaaaaacttgtcacacttcacatggatctgtcatggcggaaacagcggttatcaatcacaagaaacgtaaaaatagcccgcgaatcgtccagtcaaacaacctcactgaggcggcatatagtctctcccgggatcaaaaacctatgctgtatctgttcgttgaccagatcaaaaaatctgatggcaccctacaggaacatgacaggatctgcgagatccatgttgctaaatatgctgaaatattcggattgacccttttcgaaaccaataaagatatacggccagcattgaaaaagtttcccggggaaggaagagttttgcaaagcctgatgggacataagttcatcagttcaacggaagtttacacgaaagtttttgcgctggatttgggtgccccgcacccggtggcaattttggattcccggagtctgatgccggttgccatagctgaaacaattatacctgaagaataa

SEQ ID NO: 129897 - DNA, 1169 bp, Homo sapiens
atgttaactttgattttgctggacttgcaattcatggctcagcttgctgggtaccagatgagctttaacagcaccaagtcaaagcagacaaagaataactttgcagtgggctacaggactggggacttccagctgcacactaatgtcaatgatggggcagaatttggaggatcagtttatcaaaaagtttgtgaagaacttgatgctttaataaacctggcttggacatcaagtaccagctgcactcgttttggccttgcagctaaatttcaattgaaacccattgctttcatttctaccaaagtcaaccactggttgactggggtcagctacactccaccccttgaggctggtgtgaagctcaacctgtctgctctgtgtgacaatctaaaaacttgtcacacttcacatggatctgtcatggcggaaacagcggttatcaatcacaagaaacgtaaaaatagcccgcgaatcgtccagtcaaacgacctcactgaggcggcatatagtctctcccgggatcaaaaacgtatgctgtatctgttcgttgaccagatcagaaaatctgatggcaccctacaggaacatgacggtatctgcgagatccatgttgctaaatatgctgaaatattcggattgacctctgcggaagccagtaaggatatacggcaggcattgaagagtttcgcggggaaggaagtggttttttatcgccctgaagaggatgccggcgatgaaaaaggctatgaatcttttccttggtttatcaaacgtgcgcacagtccatccagagggctttacagtgtacatatcaacccatatctcattcccttctttatcgggttacagaaccggtttacgcagtttcggcttagtgaaacaaaagaaatcaccaatccgtatgccatgcgtttatacgaatccctgtgtcagtatcgtaagcccggatggctcaggcatcgtctctctgaaaatcgactggatcatagagcgttaccagctgcctcaaaataccaacggatgcctgactttcgccggcggtttctgcaggaagaatttgaatctctgaatagacaaataacaggctctgaaattgtggcaatgatcaatagcttatcaaccaaaaagagtccaggaccagatggattcacagccgaattctaccaaag

SEQ ID NO: 129898 - DNA, 1512 bp, Homo sapiens
atgaacatgaacatcaaaaaaattgtgaaacaagccacagttctgacttttacgactgcacttctggcaggaggagcgactcaagccttcgcgaaagaaaataaccaaaaagcatacaaagaaacgtacggcgtctctcatattacacgccatgatatgctgcagatccctaaacagcagcaaaacgaaaaataccaagtgcctcaattcgatcaatcaacgattaaaaatattgagtctgcaaaaggacttgatgtgtgggacagctggccgctgcaaaacgctgacggaacagtagctgaatacaacggctatcacgttgtgtttgctcttgcgggaagcccgaaagacgctgatgacacatcaatctacatgttttatcaaaaggtcggcgacaactcaatcgacagctggaaaaacgcgggccgtgtctttaaagacagcgataagttcgacgccaacgatccgatcctgaaagatcagacgcaagaatggtccggttctgcaacctttacatctgacggaaaaatccgtttattctacactgactattccgaaatagccagtacggggacaaagatggctaccacagctatggccatctggagcccctgtgacaatctaaaaacttgtcacacttcacatggatctgtcatggcggaaacagcggttatcaatcacaagaaacgtaaaaatagcccgcgaatcgtccagtcaaacgacctcactgaggcggcatatagtctctcccgggatcaaaaacgtatgctggatctgttccgtgaccagatcagaaaaactgatggcaccctacaggaacatgactgtatctgcgagatccatgttgctaaatatgctgaaatattcggattgacctctgcggaagccagtaaggatatacggcaggcattgaagagtttcgcggggaaagaagtggttttttatcgccctgaagaagatgccggcgatgaaaaaagctatgaacaacccagtaaggatatacggcaggcattgaagagtttcgcggggaaggaagtggttttttatcgccctgaagaggatgccggcgatgaaaaaggctatgaatcttttccttggtttatcaaacgtgcgcacagtccatccagagggctttacagtgtacatatcaacccatatctcattcccttctttatcgggttacagaaccggtttacgcagtttcggcttagtgaaacaaaagaaatcaccaatccgtatgccatgcgtttatacgaatccctgtgtcagtatcgtaagccggatggctcaggcatcgtctctctgaaaatcgactggatcatagagcgttaccagctgcctcaaagttaccagcgtatgcctgacttccgccgccgcttcctgcaggtctgtgttaatgagatcaacagcagaactccaatgcgcctctcatacattgagaaaaagaaaggccgccagacgactcatatcgtattttccttccgcgatatcacttccatgacgacaggatag

SEQ ID NO: 129899 - DNA, 561 bp, Homo sapiens
agagcgccaatgaaggctcccgctggagtcctcttggtggccagaacggtcccctctagctactttaacagtgactgtgctttctgcagccccctcaccttcccccgagccccggacccctcctttctctcccttctgtggtgtgacaatctaaaaacttgtcacacttcacatggatctgtcatggcggaaacagcggttatcaatcacaagaaacgtaaaaatagcccgcgaatcgtccagtcaaacgacctcactgaggcggcatatagtctctcccgggatcaaaaacgtatgctgtatctgttcgttgaccagatcagaaaatctgatggcaccctacaggaacatgacggtatctgcgagatccatgttgctaaatatgctgaaatattcggattgacctctgcggaagccaagtgtttgttcaaaatacagacatctgccacctccttgccgcccgatggcagtaagatagtcgtagaaggacaacagcagctttctggtgttatttacatatctgggcaacacctggctggaggaggtgaaagttttggatag

SEQ ID NO: 129900 - DNA, 1776 bp, Homo sapiens
gatctggctctgaaggggctacgtgttttgctcgtggaaggtaacgacccccagggaacagcctcaatgtatcacggatgggtaccagatcttcatattcatgcagaagacactctcctgcctttctatcttggggaaaaggacgatgtcacttatgcaataaagcccacttgctggccggggcttgacattattccttcctgtctggctctgcaccgtattgaaactgagttaatgggcaaatttgatgaaggtaaactgcccaccgatccacacctgatgctccgactggccattgaaactgttgctcatgactatgatgtcatagttattgacagcgcgcctaacctgggtatcggcacgattaatgtcgtatgtgctgctgatgtgctgattgttcccacgcctgctgagttgtttgactacacctccgcactgcagtttttcgatatgcttcgtgatctgctcaagaacgttgatcttaaagggttcgagcctgatgtacgtattttgcttaccaaatacagcaatagtaatggctctcagtccccgtggaggaggaggggggttcttctagagtcgcacgtatcagggcgtgtcaagctcacagtatttctttgggatttggccgatttcggaaccaccatcaaacaggattttcgcctgctggggcaaaccagcgtggaccgcttgctgcaactctctcagggccaggcggtgaagggcaatcagctgttgcccgtctcactgtgtgacaatctaaaaacttgtcacacttcacatggatctgtcatggcggaaacagcggttatcaatcacaagaaacgtaaaaatagcccgcgaatcgtccagtcaaacgacctcactgaggcggcatatagtctctcccgggatcaaaaacgtatgctgtatctgttcgttgaccagatcagaaaatctgatggcaccctacaggaacatgacggtattttgcccaccgatccacacatgatgctcagagtgaccattgaacttgatgctgatgactatgatgtcatagttattgtcagcgtgcataccatgtgtatcggcacgattaagctcgcatgggctgctgatgtgcccactgtgcccagtcatgatgagtggagcgactacacatctgcagtacagtgtgtcaatatgcttcgtgatctgctcaacaacgttgatctacaggaaaggggatcctctagagtcgaaatgcagggatgcaagccaagtatccggttagagcttaataatggccggatgccatcccattccttaaatgggaattccccggaaggagaattttggttggaaggcaattggccccactcagaacctctttggcctaaaattctacattccggagcagcccaagaagcccagctgctgcagtcagatgctcccaaggacagcagggattttgccgatttcggaaccaccatcaaacaggattttcgcctgctggggcaaaccagcgtggaccgcttgctgcaactctctcagggccaggcggtgaagggcaatcagctgttgcccgtctcactggtgaaaagaaaaaccaccctggcgcccaatacgcaaaccgcctctccccgcgcgttggccgattcattaatgcagctggcacgacaggtttcccgactggaaagcgggcagtcgccgccttcccgtcagtttaaatgggggtcccttaaggtccgattaggtctttacgcacctcgacccaaaaacttatttggtgatggtcacgaagtggccatcgcctga

SEQ ID NO: 129901 - DNA, 2259 bp, Homo sapiens; identical to SEQ ID NO: 124506

SEQ ID NO: 129902 - DNA, 1122 bp, Homo sapiens
atggaggttctagcttcatgggccaccttcactttgggccaaactgagcagcatgtggactggatttctgctggagcagctccccagggacctattgtgaaacaactccctagcccagttcctcctacagagcaacttgagcaggaaaagcccgtgaccatcggctctgctccctcaacacctaacaagctcctacttagccattccaattgccaactccctaggccattaagatcaataacaaatatctctgcatgcttttctcttgaacttgctatagaccacaggggtttcccacacagccctggagctagatcactgtattcaaattctgtctttggtacttaccagctgtgtgacctttgtgacaatctaaaaacttgtcacacttcacatggatctgtcatggcggaaacagcggttatcaatcacaagaaacgtaaaaatagcccgctaatcgtccagtcaaacgacctcactgaggcggcatatagtctctcccgggatcaaaaacgtatgctgtatctgttcgttgaccagatcagaaaatctgatggcaccctacaggaacatgacggtatctgcgagatccatgttgctaaatatgctgaaatattcggattgacctctgcggaagccagtaaggatatacggcaggcattgaagagtttcgcggggaaggaagtggttttttatcgccctgaagaggatgccggcgatgaaaaaggctatgaatcttttccttggttatcaaacgcagtcctgagtaaagaagaggcaagtttcccttcacccagatgggacaggactgagggagatgatggggccagtcttctggggggagggcagggttgttggtggtctggagttgaaggcccatcttcagcagtgggtgagatgaaagggaagaaggtgaaacttctgaattgtgtccaggaacttggagtggaggtggattctgtggagaatgaagacagaactagctgcaaatgtgagctcctggcccctctgagcagccatattaaagatcaaagggacaaagcctgtgcattccagatggaatcaggcagcaaagcacagctacgaaagcattcttggctgtcataccctcgagtgccatga

SEQ ID NO: 129903 - DNA, 1776 bp, Homo sapiens
atgggaaaaaaacagagcaggaaaactggaaactctaaaaatcagagtgcctctcctcctccaaaggaacgcagctcctcaccagcaatggaacaaagctggacggacaatgactttgacgagttgagagaagaaggcttcagacgatcaaactactgcgagctactaggaggaaattcgaacctaatggcaaacaagcttaaaagctttgaaaagaaattagatgatgatgaactacttgcatccccttcccgaaccccgatttctggcccaaatggggatccagctgggcccaagttcgtcaaggcagcagcgaccaccggaaaagcccgacagcgctttcaccccgccacaacaacgtttcacggtcggaccccagcaccaccgctcgctcatccagcgccgaccgtgtcaaccccagcgagtacccaacatccagcgaggagacatcaggtcgctcgtccagataggtcatcaacgccgttgcctgcgcggatagcgcttcgggtgttttgcccgacaccatccacggcaccaccggaacatccacgacagaacccgaacccggccccgcagactgactcggcactcccgggggctgatgacgtgcgcgttagtaccactgatcccgaacgacgacacccccacccgacgaacacgaccactcctgggccagggcgtgttctccgtaaggagttgaaccgtccccgccgaccaatccaccacaggcgacggcgattccacgtgcaacgtgcgtggcagctgcccgtgccgcatcgccatcaccatcttgatcacaccagccacacccgccgccgcttgcgtatgaccgatgttcgacttgaccgaccccaaccacaacggccgccccggatcacgatcacgaccgtaggtggcgatcagcgcctgcgcctcgatcggagctaccaacccgaaagcccgtgcgatggtgacctaaggcagcttcaaatggctgggcgagcgccttgtagccctttatccatgctggttctagagaagtgtgacaatctaaaaacttgtcacacttcacatggatctgtcatggcggaaacagcggttatcaatcacaagaaacgtaaaaatagcccgcgaatcgtccagtcaaacgacctcactgaggcggcatatagtctctcccgggatcaaaaacgtatgctgtatctgttcgttgaccagatcagaaaatctgatggcaccctacaggaacatgacggtatctgcgagatccatgttgctaaatatgctgaaatattcggattgacctctgcggaagccagtaaggatatacggcaggcattgaagagtttcgcggggaaggaagtggttttttatcgccctgaagaggatgccggcgatgaaaaacagaacgccaagaatgaacatggtactacctcctcattgccaacacaatttaagacagatcatatggaaagccagaaggaccacccccacaaggaggaaaccagtcccaaggtcccccacctcgtccaggaaagccagaaggaccaccttcacaaggaggcaacaaacctcaaggtcccccaccctcatccaggaaagccacaaggaccacccccacaagaaggtaacaaacctcaacgtccccctcctccaggaaggccacaaggaccacccccaccaggaggcaatccccagcagcctctgccacctcccgctggaaagccccagggaccacctccacctcctcaagggggcagaccacacagacctccccagggacagcctccccagtaa

SEQ ID NO: 129904 - DNA, 1755 bp, Homo sapiens
atgaaaaacggtgagctggtgatatgggatagtgttcacccttgttacaccgttttccatgagcaaactgaaacgttttcatcgctctggagtgaataccacgacgatttccggcagtttctacacatatattcgcaagatgtggcgtgttacggtgaaaacctggcctatttccctaaagggtttattgagaatatgtttttcgtctcagccaatccctgggtgagtttcaccagttttgatttaaacgtggccaatatggacaacttcttcgcccccgttttcaccatgggcaaatattatacgcaaggcgacaaggtgctgatgccgctggcgattcagtgtgacaatctaaaaacttgtcacacttcacatggatctgtcatggcggaaacagcggttatcaatcacaagaaacgtaaaaatagcccgcgaatcgtccagtcaaacgacctcactgaggcggcatatagtctctcccgggatcaaaaacgtatgctgtatctgttcgttgaccagatcagaaaatctgatggcaccctacaggaacatgacggtatctgcgagatccatgttgctaaatatgctgaaatattcggattgacctctgcggaagccagtaaggatatacggcaggcattgaagagtttcgcggggaaggaagtggttttttatcgccctgaagaggatgccggcgatgaaaaaagctatgaatcttttccttggtttatcaaacgcatcccgaatttgctcctccatccacggggactgagagccattactattgctgtatttggtaagcaaaatacgtacatcaggctcgaaccctttaagatcaacgttcttgagcagatcacgaagcatatcgaaaaactgcagtgcggaggtgtagtcaaacaactcagcaggcgtgggaacaatcagcacatcagcagcacatacgacattaatcgtgccgatacccaggttaggcgcgctgtcaataactatgacatcatagtcatgagcaacagtttcaatggcccagtcggagcatcaaaaatatcttcagagccaggagatgatgatgaacccacagaaggaagctttgagggacaccaagctgccgtaaatgcaattcagatatttgggaacttgctatatacctgttcagcagataaaactgttcgggtttataatctggtgaacaacaaacgacttgagatctttgaatgccatggccctcgggcagtcagctgtcttgctacagctcaggaaggtgcccgaaaactgctggtcgtggggtcttatgactgcacaattagtgtacgcgatgcccggaatggactgctcctcaaaactctggagggccatagcaaaaccattctttgcatgaaagcaaagggccagagcaaaccatgcagaagaatgccattcatcatggcaattgggagcacagagagctccacaacatctacggtttttatcatgctccatggttcctacgaagctctgaaaggtgggaacaccacagaggccatggaggacttcacaggaggggtggcagagttttttgagatcagggatgctcctagtgacatgtacaagatcatgaagaaagccatcgagagaggctccctcatgggctgctccattgatggtggggagctccaagtgtcaagaagccttttacccaatgaagggcagcatagagcttttgtgtgggacagagcgaatgttttgtttgaggaagcaggaactggctctcaactttga

SEQ ID NO: 129905 - DNA, 2908 bp, Homo sapiens
atgcctgcaagcggtaacgaaaacgatttgaatatgccttcaggaacaatagaaatcttcgtgcggtgttacgttgaagtggagcggattatgtcagcatggacagaacaacctaatgaacacagaaccatgatgtggtctgtccttttacagccatgtgacaatctaaaaacttgtcacacttcacatggatctgtcatggcggaaacagcggttatcaatcacaagaaacgtaaaaatagcccgcgaatcgtccagtcaaacgacctcactgaggcggcatatagtctctcccgggatcaaaaacgtatgctgtatctgttcgttgaccagatcagaaaatctgatggcaccctacaggaacatgacggtatctgcgagatccatgttgctaaatatgctgaaatattcggattgacctctgcggaagccagtaaggatatacggcaggcattgaagagtttcgcggggaaggaagtggttttttatcgccctgaagaggatgccggcgatgaaaaaggctatgaatcttttccttggtttatcaaacgtgcgcacagtccatccagagggcttacagtgtacatatcaacccatatctcattcccttctttatcgggttacagaaccggtttacgcagtttcggcttagtgaaacaaaagaaatcaccaatccgtatgccatgcgtttatacgaatccctgtgtcagtatcgtaagtcttgaatcaaattatgttaatgttaaattgaggaacatggcagttaatttgcattatttagatgatacagaatgtttgcatttaatgtttgtggtaagggtaatggcttatacagtccatgctccacaatcagatgaagttaggtccggttactgcacctttaccatggacggacaaattccgtttattctaccaggcatatttccggtaaccattccggcaaaccaaagcctgccaccggcgcaggtaattgtgtcaaattctgttgaccacctcaaaatcaccggggtggaagatcacaaaccgatttttgccggagccggaaaaccatatcagaaccttcgccagtttatcgatgaaggcaattatacatccggcgacaaccatacgctgagagaccctcactacgttgaagacaaagcccataaataccttgtattcgaagccaacacgggaacagaaaacggataccaaggcgaagaatctttatttaacaaagcgtactacggcggcggcacgaacttcttccggggatcctctagagtcgacctgcaggcatgctgaagaacacatcgacagcaccacaacaacgaatctatcatacactgacaaacacacagcacaaaacgattcacacccagggacagctaaaacacaaacgacaataacagatcaccacgaccacagccacaaacagtggctccaattgccgagccgagcaggactggccgcggaccaaagcggtcggacagtgctccgagaacgggtgcgcatagaaaattgcatacaaacgcactatagccgctcagcaagcaacgcccaagcgcccaggccagtacgcggcaatgaacccaagccatatgccatacaaacataccagggtgacggagcagaggaagacgatgagacttacagccccaatttagaccgcgtaaccaccaaaaagacacaccgtggttgccaagcaaagatggcgggagtatcccctgaattcaaccacagtgaccccttatgcctcatgccaccagaagttagcgtgagccttggtgttcccaatcagtatctctggacttctcaaaccacaaatccacctcgcactggggatgggagagcagaaggctccaaggcacacaaggaccttgatgaggagataagccttattcctacagttaatgtgaggaaaaacctgtttttcctggaaatgcctactttggccgacacaaatattttcccgccacgcggcggtccaatttccctacgacacactaaggggccgtgtgacaatctaaaaacttgtcacacttcacatggatctgtcatggcggaaacagcggttatcaatcacaagaaacgtaaaaatagcccgcgaatcgtccagtcaaacgacctcactgaggcggcatatagtctctcccgggatcaaaaacgtatgctgtatctgttcgttgaccagatcagaaaatctgatggcaccctacaggaacatgacggagtaatggctcgcgctaatgccattacttgccctgtatgtggtcgggatgtgaagtttactcgtgaagtgctccggggtgatagtgttgagaagagctctcgggtatggtcaggtaatgaacgtgaccaggagctgcttactgaggacgcactggatgatctcatcccttcttttctactgactggtcaacagacaccggcgttcggtcgaagagtatctggtgtcatagaaattgccgatgggagtcgccgtcgtaaagctgctgcacttaccgaaagtgattatcgtgttctggttggcgagctggatgatgagcagatggctgcattatccagattgggtaacgattatcgcccaacaagtgcttatgaacgtggtcagcgttatgcaagccgattgcagaatgaatttgctggaaatatttctgcgctggctgatgcggaaaatatttcacgtaagattattacccgctgtatcaacaccgccaaattgcctaaatcagttgttgctcttttttctcaccccggtgaactatctgcccggtcaggtgatgcacttcaaaaagcctttacagataaagaggaattacttaagcagcaggcatctaacgcggggatccttctacgagtcgacctggcaggcatgcaagagcccccaattaattttgtagagcctacacccctccaattgagatga

SEQ ID NO: 129906 - DNA, 743 bp, Homo sapiens
ggagctcagctgttgtgttctctttgctcctggaggtgctaaactggtaggatgtgccctggggctgtcaaggtcttccacatggagagaagctgaccaagaaggaagtcaacacagggatgagtacagtcgagaggtggggggaagatacccatcccgctggaaagtggctgaatccaagaggctgcgcagtgacagtctgcaggccccacttccacagcatctcataggagaagacccacgggcttggaaatccagccagcccctggtagccgccttgcgcctccctgaaatggagctccctgggggagggtgtgacaatctaaaaacttgtcacacttcacatggatctgtcatggcggaaacagcggttatcaatcacaagaaacgtaaaaatagcccgcgaatcgtccagtcaaacgacctcactgaggcggcatatagtctctcccgggatcaaaaacgtatgctgtatctgttcgttgaccagatcagaaaatctgatggcaccctacaggaacatgacggtatctgcgagatccatgttgctaaatatgctgaaatattcggattgacctctgcggaagccagatccccggcggagatcgccgaaggtctggttgagcgccatattccagtgctgatctccaatcacgatacgatgttaacgcgtgagtggtatcagcgcgcaaaattgcatgtcgtcaaagttcgacgcagtataagcagcaacggcggcacac

SEQ ID NO: 129907 - DNA, 2124 bp, Homo sapiens
atgaacatgaacatcaaaaaaattgtaaaacaagccacagttctgacttttacgactgcacttctggcaggaggagcgactcaagccttcgcgaaagaaaataaccaaaaagcatacaaagaaacgtacggcgtctctcatattacacgccatgatatgctgcagatccctaaacagcagcaaaacgaaaaataccaagtgcctcaattcgatcaatcaacgattaaaaatattgagtctgcaaaaggacttgatgtgtgggacagctggccgctgcaaaacgctgacggaacagtagctgaatacaacggctatcacgttgtgtttgctcttgcgggaagcccgaaagacgctgatgacacatcaatctacatgttttatcaaaaggtcggcgacaactcaatcgacagctggaaaaacgcgggccgtgtctttaaagacagcgataagttcgacgccaacgatccgatcctgaaagatcagacgcaagaatggtccggttctgcaacctttacatctgacggaaaaatccgtttattctacactgactattccggtaaacattacggcaaacaaagcctgacaacagcgcaggtaaatgtgtcaaaatctgatgacacactcaaaatcaacggagtggaagatcacaaaacgatttttgacggagacggaaaaacatatcagaacgttcagcagtttatcgatgaaggcaattatacatccggcgacaaccatacgctgagagaccctcactacgttgaagacaaaggccataaataccttgtattcgaagccaacacgggaacagaaaacggataccaaggcgaagaatctttatttaacaaagcgtactacggcggcggcacgaacttcttccgtaaagaaagccagaagcttcagcagagcgctaaaaaacgcgatgctgagttagcgaacggcgccctcggtatcatagagttaaataatgattacacattgaaaaaagtaatgaagccgctgatcacttcaaacacggtatttattcgcgataagctcatggagcggcgtaaccgtcgcacaggaaggacagagaaagcgcggatctgggaagtgacggacagaacggtcaggacctggattggggaggcggttgccgccgctgctgctgacggtgtgacgttctctgttccggtcacaccacatacgttccgccattcctatgcgatgcacatgctgtatgccggtataccgctgaaagttctgcaaagcctgatgggacataagtccatcagttcaacggaagtctacacgaaggtttttgcgctggatgtggctgcccggcaccggtgtgacaatctaaaaacttgtcacacttcacatggatctgtcatggcggaaacagcggttatcaatcacaagaaacgtaaaaatagcccgcgaatcgtccagtcaaacgacctcactgaggcggcatatagtctctcccgggatcaaaaacgtatgctgtatctgttcgttgaccagatcagaaaatctgatggcaccctacaggaacatgacggtatctgcgagatccatgttgctaaatatgctgaaatattcggattgacctctgcggaagccagtaaggatatacggcaggcattgaagagtttcgcggggaaggaagtggttttttatcgccctgaagaggatgccggcgatgaaaaaggctatgaatcttttccttggtttatcaaacgtgcgcacagtccatccagagggctttacagtgtacatatcaacccatatctcattcccttctttatcgggttacagaaccggtttacgcagtttcggcttagtgaaacaaaagaaatcaccaatccgtatgccatgcgtttatacgaatccctgtgtcagtatcgtaagccggatggctcaggcatcgtctctctgaaaatcgactggatcatagagcgttaccagctgcctcaaagttaccagcgtatgcctgacttccgccgccgcttcctgcaggtctgtgttaatgagatcaacagcagaactccaatgcgcctctcatacattgagaaaaagaaaggccgccagacgactcatatcgtattttccttccgcgatatcacttccatgacgacaggatag

SEQ ID NO: 129908 - DNA, 2739 bp, Homo sapiens
cttctgaagcatacttctatcaattcgtcaaattcattctccgtccggttttgttcccttgctgacgaggagttgtgaccctttggaggagaagcagcattctggtttttggaattttcagcctttttgtgctggtttttcctcatcttcgtggatttatctacctttggtctttgctgctggtgaccttcagatagagtttctgtgtggttgtcctttttgttgatgttgatgttgttgctttgtttgataaaccaaggaaaagattcatagcctttttcatcgccggcatcctcttcagggcgataaaaaaccacttccttccccgcgaaactcttcaatgcctgccgtatatccttactggcttccgcagaggtcaatccgaatatttcagcatatttagcaacatggatctcgcagataccgtcatgttcctgtagggtgccatcagattttctgatctggtcaacgaacagatacagcatacgtttttgatcccgggagagactatatgccgcctcagtgaggtcgtttgactggacgattcgcgggctatttttacgtttcttgtgattgataaccgctgtttccgccatgacagatccatgtgaagtgtgacaagtttttagattgtcacactccgcatcagccagcgcagagagtatttccagcaaattcattctgcaatcggcttgcataacgctgaccacgttcataagcacttgttgggcgataatcgttacccaatctggataatgcagccatctgctcatcatccagctcgccaaccagaacacgataatcactttcggtaagtgcagcagctttacgacggcgactcccatcggcaatttctatgacaccagatactcttcgaccgaacgccggtgtctgttgaccagtcagtagaaaagaagggatgagatcatccagtgcgtcctcagtaagcagcttctgggcacgttcattacctgaccctacccgaaaagtcttctcaacactatcaccccggagcactttcagagttaacttcacatcccgaccccataccggcaaagtatgggctttccgcgagccttttcttctccccccccatttacgaaagcccgatactgacacagggtatttgtataaacgcatggcatacggatcggtgatttcttttgtttcactaagccgaaactgcgtaaaccggttctgtaacccgataaagaagggaatgagatatgggttgatatgtacactgtaaagccctctggatggactgtgcgcacgtttgataaaccaaggaaaagattcatagcctttttcatcgccggcatcctcttcagggcgataaaaaaccacttccttccccgcgaaactcttcaatgcctgccgtatatccttactggcttccgcagaggtcaatccgaatatttcagcatatttagcaacatggatctcgcagataccgtcatgttcctgtagggtgccatcagattttctgatctggtcaacgaacagatacagcatacgtttttgatcccgggagagactatatgccgcctcagtgaggtcgtttgactggacgattcgcgggctatttttacgtttcttgtgattgataaccgctgtttccgccatgacagatccatgtgaagtgtgacaagtttttagattgtcacaagaacggtcaggacctggattggggaggcggttgccgccgctgctgctgacggtgtgacgttctctgttccggtcacaccacatacgttccgccattcctatgcgatgcacatgctgtatgccggtataccgctgaaagttctgcaaagcctgatgggacataagtccatcagttcaacggaagtctacacgaaggtttttgcgctggatgtggctgcccggcaccgggaactgagaatgcagaaaacatacaaagctaaagctacagcctacgatatggcacgttctcaaaataataactcagagaagcttttggtttatagaaaattattacaagtgttgacaggactttataaacggagtaacctcggtgtgcggttgtatgcctgctgtggattgctgctgtgtcctgcttatccacaacattttgcgcacggttatgtggacaaaatacctggttacccaggccgtgccggcacgttaaccgggctgcatccgatgcaatgtgacaatctaaaaacttgtcacacttcacatggatctgtcatggcggaaacagcggttatcaatcacaagaaacgtaaaaatagcccgcgaatcgtccagtcaaacgacctcactgaggcggcatatagtctctcccgggatcaaaaacgtatgctgtatctgttcgttgaccagatcagaaaatctgatggcaccctacaggaacatgacggtatctgcgagatccatgttgctaaatatgctgaaatattcggattgacctctgcggaagccaaaatcaccaatccgtatgccatgcgtttatacgaatccctgtgtcagtatcgtaagccggatggctcaggcatcgtctctctgaaaatcgactggatcatagagcgttaccagctgcctcaaagttaccagcgtatgcctgacttccgccgccgcttcctgcaggtctgtgttaatgagatcaacagcagaactccaatgcgcctctcatacattgagaaaaagaaaggccgccagacgactcatatcgtattttccttccgcgatatcacttccatgacgacaggatag

SEQ ID NO: 129909 - DNA, 5830 bp, Homo sapiens
atgcaggaacaacagcaagcctccagcctgatcaggagcggcaatgggcgcctccctggatcaggagcacagcggacaccctgccatatccggagggatggaagtcagcggcgggtctgcgatgactgcaaacagcagtggtggaaggcaaaatacaacataccatctggcttgcatgcttgcactgcgactctagaagaaacccatattttagactcgggggcacatgtgcaagttttttacaagggtcaactgcatgtcatgagagttccatgtacagattattttgacacccagaagaaccccaacttgtcacacttacatggatctgtcatggcggaaacagcggttatcaatcacaagaaacgtaaaaatagcccgcgaatcgtccagtcaaacgacctcactgaggcggcatatagtctctcccgggatcaaaaacgtatgctgtatctgttcgttgaccagatcagaaaatctgatggcaccctacaggaacatgacggtatctgcgagatccatgttgctaaatatgctgaaatattcggattgacctctgcggaagccagtaaggatatacggcaggcattgaagagtttcgcggggaaggaagtggttttttatcgccctgaagaggatgccggcgatgaaaaaggctatgaatcttttccttggtttatcaaacgtgcgcacagtccatccagagggctttacagtgtacatatcaacccatatctcattcccttctttatcgggttacagaaccggtttacgcagtttcggcttagtgaaacaaaagaaatcaccaatccgtatgccatgcgtttatacgaatccctgtgtcagtatcgtaagcccgatggctcaagcatcgtctctctgaaaatcgactgggacatagaaccgtaccccgctggcctaaaagagcagattaagtctgatgttttcttgttaagttcctgtgtggaagttctccccaatgctgaaattgggttcttaaaatgtctagctattattggattatgggctgtttctctcttcagctacaataattgctttatatgtacaccggcgttcggtcgaagagtatctggtgtcatagaaattgccgatgggagtcgccgtcgtaaagctgctgcacttaccgaaagtgattatcgtgttctggttggcgagctggatgatgagcagatggctgcattatccagattgggtaacgattatcgcccaacaagtgcttatgaacgtggtcagcgttatgcaagccgattgcagaatgaatttgctggaaatatttctgcgctggctgatgcggaaaatatttcacgtaagattattacccgctgtatcaacaccgccaaattgcctaaatcagttgttgctcttttttctcaccccggtgaactatctgcccggtcaggtgatgcacttcaaaaagcctttacagataaagaggaattacttaagcagcaggcatctaaccttcatgagcagaaaaaagctggggccataaacacacaactggttgaaaccctgctctctgactctagaagaatccccgacttcatgtctaaaacaccaaaagcaatggtaacaaaagctaaaattgacaaatgggatctaattaaactaaagagcttctgcacagcaaaagaaactaccatcagagtgaacaggcaacctacagaatgggagaaaattttcgcaacctactcgtctgacaaagggctaatatccagaatctacaaagaactcaaacaaagttacaggaaaaaaacaaccctgtcaacaagtggtggccatgagaagtggagacgaaatctgaaactcaatgttgctctgctgatatggttttgctgtgaccccacccaaatttcatttttaattgtagctgccaaaattcccatgtcatgtgagggatctggtgggagaagaaaccccatgataaccaggcaaacaggatctggagtggacctccagcaaactccagcagacctgcagaagagggactttactggtagaaggaaaactaacaaacagaaaggaatagcaccaacatcaacaaaaattacgtccacatggaaacctcatccaaaggattgcaactcctcaccagcaagggaacaaaactggatggagaatgagtttgacaaattgacagaagtaggcttcagaaggtggacaataacaaactcctccaagctaaaggagcgtgttctaacccaatgcaaggaagcaacgaaccttgcaaaaaggttagagaaattgctaactagaataaccagtttagaaaagaacaaaaatgacctgatggagctgaaaaacacagcacaagaacttcgtgaagcatacaccagtatcagcggccgaatcaatcaagcagaacaaaggacatcagagattgaagatcaacttaatgaaataaagcgcagaggcgtctccgtgtgtccacaaccatcagaagacaccccgaggagtactgccagggtcccaaaggggatggtccccttccggccccgggtccccttggtcactccacccagagagaaaaaagaagctccttggcttgcatgccttcgcactagggctctaaggatcctcatagaccctccgagccaggtgtgggatatagtctcgtgtgatgcggagaatgaaaccaagttggaaaacactctgcaggatattatccaggagaacttccccaatctagcaaggcaggccaacgttcagattcaggaaatacagagaacgccacaaagatactcctcaagaagagcaactccaagacacataattgtcagattcaccaaagttgaaatgaaggaaaaaatgttaagggcagccagagagaaaggtcgggttaccctcaaagggaagcccatcagactaacagcggatctctcggcagaaaccctacaagccagaagagagtgggggccaatattcaacacccttaaagaaaagaattttcaacccagaatttcatatccagccaaaataagcttcataagtgaaggagaaataaaatactttacagacaagcaaatgctgagagattttgtcaccagcaggcctgccctagaagacctcctgaaggaagcgctaaacatggaaaggaacaaccggttggttaaatccctcgcttgggcaagccagaacggcttccggtccccggccttgttgccactgtccctaatgctttgtgctcccctacaagaggcagatggaacaaatctgggatggctggctcactgtggcctgctgtgcactggtgaccaccctagtggccttggcaaacctggccggcacggcgctgaccgtcaccatccagagggactggatcgtgagctgacgggtgacaacagaggccagctggttggaggagcgactcaagccttcgcgaaagaaaataaccaaaaagcatacaaagaaacgtacggcgtctctcatattacacgccatgatatgctgcagatccctaaacagcagcaaaacgaaaaataccaagtgcctcaattcgatcaatcaacgattaaaaatattgagtctgcaaaaggacttgatgtgtgggacagctggccgctgcaaaacgctgacggaacagtagctgaatacaacggctatcacgttgtgtttgctcttgcgggaagcccgaaagacgctgatgacacatcaatctacatgttttatcaaaaggtcggcgacaactcaatcgacagctggaaaaacgcgggccgtgtctttaaagacagcgataagttcgacgccaacgatccgatcctgaaagatcagacgcaagaatggtccggttctgcaacctttacatctgacggaaaaatccgtttattctacactgactattccggtaaacattacggcaaacaaagcctgacaacagcgcaggtaaatgtgtcaaaatctgatgacacactcaaaatcaacggagtggaagatcacaaaacgatttttgacggagacggaaaaacatatcagaacgttcagcagtttatcgatgaaggcaattatacatccggcgacaaccatacgctgagagaccctcactacgttgaagacaaaggccataaataccttgtattcgaagccaacacgggaacagaaaacggataccaaggcgaagaatctttatttaacaaagcgtactacggcggcggcacgaacttcttccgtaaagaaagccagaagcttcagcagagcgctaaaaaacgcgatgctgagttagcgaacggcgccctcggtatcatagagttaaataatgattacacattgaaaaaagtaatgaagccgctgatcacttcaaacacggtaactgatgaaatcgagcgcgcgaatgttttcaaaatgaacggcaaatggtacttgttcactgattcacgcggttcaaaaatgacgatcgatggatgccagcctacgtgttctgaggctttgcagaactttcaacggtataccggcatacagcatgtgcatcgcataggaatggcggaacgtatgtggtgtgaccggaacagagaacgtcacaccgtcagcagcagcggcggcacccgcctccccaatccaggtcctgcccgttctgaacattttgaggcatttcagtcagttgctcaatgtacctataaccagaccgttcagctggatattacggcctttttaaagaccgtaaagaaaaataagcacaagttttatccggcctttattcacattcttgcccgcctgatgaatgctcatccggagttccgtatggcaatgaaagacggtgagctggtgatatgggatagtgttcacccttgttacaccgttttccatgagcaaactgaaacgttttcatcgctctggagtgaataccacgacgatttccggcagtttctacacatatattcgcaagatgtggcgtgttacggtgaaaacctggcctatttccctaaagggtttattgagaatatgtttttcgtctcagccaatccctggtcttccttagagctagcagtgatcatgggaccaattctggccaataagtgtgacaatctaaaaacttgtcacacttcacatggatctgtcatggcggaaacagcggttatcaatcacaagaaacgtaaaaatagcccgcgaatcgtccagtcaaacgacctcactgaggcggcatatagtctctcccgggatcaaaaacgtatgctgtatctgttcgttgaccagatcagaaaatctgatggcaccctacaggaacatgacggtatctgcgagatccatgttgctaaatatgctgaaatattcggattgacctctgcggaagccagtaaggatatacggcaggcattgaagagtttcgcggggaaggaagtggttttttatcgccctgaagaggatgccggcgatgaaaaaggctatgaatcttttccttggtttatcaaacgtgcgcacagtccatccagagggctttacagtgtacatatcaacccatatctcattcccttctttatcgggttacagaaccggtttacgcagtttcggcttagtgaaacaaaagaaatcaccaatccgtatggccatgcgttaatacgaatccctgtgtcagtatcgtaagccggatggctcaggcatcgtctctctgaaaatcgactggatcatagagcgttaccagctgcctcaaagttaccagcgtatgcctgacttccgccgccgcttcctgcaggtctgtgttaatgagatcaacagcagaactccaatgcgcctctcatacattgagaaaaagaaaggccgccagacgactcatatcgtattttccttccgcgatatcacttccatgacgacaggatag

SEQ ID NO: 129910 - DNA, 1478 bp, Homo sapiens
aaattaatagcctcaggacaaaaaatctcgtcggggttccttaaggggacggattatgtagccaaggcccgaccacctaatgaacccggaccctgatgtggtttgtccttttacagccagtagtgctccccgcatttgaaccgcaagggacaagccctttaatgagccaaggaagccccagggaacagcacttataaatttcgctttccacccgatgcctaaaaaaactttcccttgggggtaacccccttatccacggggatattttaataattattttttcaatagtttttagatcttcttttttagagcgccttgtaggcctttatccatgctggttctagagaaggtgttgtgacaaatttgccctttcagtgtgacaaatcaccctcaaaaagccggtcctgtttgttacaaattgcctttaaccctgtgacaaattgccctcagaagaagctgttttttcacaaagttatcccctgcttattgactcttttttatttagtgtgacaatctaaaaacttgtcacacttcacatggatctgtcatggcggaaacagcggttatcaatcacaagaaacgtaaaaatagcccgcgaatcgtccagtcaaacgacctcactgaggcggcgatatagtctctcccgggatcaaaaacgtatgctgtatctgttcgttgaccagatcagaaaatcggatggcaccctacaggaacatgacggtatctgcgagatccatgttgctaaatatgctgaaatattcggattgaccttttgcggaacgcagtaaggatatacggcaggcattgaagagtttcgcggggaaggaagtggttttttatcgccctgaagaggatgccggcgatgaaaaaggctatgaatcttttccttggtttatcaaacgtgcgcacagtccatccagagggcttttcagtggacatattccccccatatctcattcccttctttatcggggtaaagaaccggctaacacaaattctgcttatttgaaacaaaagaaatcaccaatcctgttggaagttctggccagggaaatcaggcaggagaagaaataaagggcattcaatttggaaaagaggaagtcaaattgtccctgtttgcagatgacatgattgtatatctagaaaaccccattgtctcagcccaaaatctccttaagctgataagcaacttcagcaaagtctcaggatacaaaatcaatgtgcaaaaatcacaagcattcttatacaccaataacagacaaacagagagccaaatcatgagtgaactcccattcacaattgcttcaaagagaataaaatacctaggaatccaacttacaagggatgtgaaggacctcttcaaggagaactacaaaccactgctcaatgagataaaagaggatacaaacaaatggaagaacattccatgctcatgggtaggaagaatcaatattgtgaaaatggccatactgcccaag

SEQ ID NO: 129911 - DNA, 411 bp, Homo sapiens
atggttggcgctggcggggggaaacgagaaatgtcaccgacgttagaaatcaaccatcggccattagcaacaatgggcgtcgagaaccagacgctggcggtctcttttactacgctgtgcgtcgacgcccgcagtcagcatgactatattgcgctctcacgtctctttcatacggtcatgttgtttgatgtcccagttatgacgcggttgatggagagcgaagcgcggcgctttattgcgctggtggatgagttttacgagcgccatgtcaaattagtggtgagtgcagaagtgccgctgtatgaaatttatcagggcgatcggctgaagtttgagttccagcgttgcctgtcacgtctgcaagagatgcaaagcgaagagtatctgaagcgcgagcatttggcgggttaa

SEQ ID NO: 129912 - DNA, 1359 bp, Homo sapiens
atgagacagtctatggctaccaaactgcaggacgggaatacaccttgtctggcagctacaccttctgaaccacgtcccaccgtgctggtgtttgactccggcgtcggtgggttgtcggtctatgacgagatccggcatctcttaccggatctccattacatttatgctttcgataacgtcgctttcccgtatggcgaaaaaagcgaagcgtttattgttgagcgagtggtggcaattgtcaccgcggtgcaagaacgttatccccttgcgctggctgtggtcgcttgcaacactgccagtaccgtttcacttcctgcattacgcgaaaagttcgacttcccggttgttggtgtcgtgccggcgattaaacctgctgcacgtctgacggcaaatggcattgtcggattactggcaacccgcggaacagttaaacgttcttatactcatgagctgatcgcgcgtttcgctaatgaatgccagatagaaatgctgggctcgacagagggtactagcaggatgtctaaatccctctctatgaggcttatattttcaaatccaaatcaaagtaccggtgacccgctcgatcgtcgcttccacgcccagccggtggcctgcccggagtgtggcccgcatcttgaatgggtaagtcatggtgaacatgcggaacaagaggcggcattacaggcagctatcgcacagttaaaaatgggcaaaattgtcgccatcaaagggattggcggatttcatcttgcctgcgatgcacgtaacagtaacgcggtggcgacacttcgggcgcgcaaacatcgcccggcgaaaccgctggcggtcatgttgccagtggctgacggtttaccagacgctgcgcgccagttgcttaccacgcccgccgcgccgattgtgctggtggataaaaaatacgttcctgagctttgtgatgatatcgcccctgaccttaacgaagtcggggtaatgttgcctgcgaacccgctccagcatttgctgttacaggaactgcaatgcccgctggtgatgacctccggcaacctgagcggtaaaccaccagctatcagcaacgaacaggcgctggcggatttgcagggcattgccgacggattcttgatacataaccgcgacatcgtgcagcggatggggagatgtgtggttttcttcgatcagtcggaggccgccaatcccggagccaattgcggcaccaatgcgggttgcgttctcttccgttatttcaaggccagaatcttgcatggcctgaacgccagcgacaattccatattgaatgaaggcatccatcttgcgctgttctttgcgcgagataatgtcctcacagttaaaatcctttattaa

SEQ ID NO: 129913 - DNA, 1218 bp, Homo sapiens
atgccttacgaccgcccgtttaccgtgatggcggcgtttccgctatgtccggcctgtgacaaagagtaccgtgacccgctcgatcgtcgcttccacgcccagccggtggcctgcccggagtgtggcccgcatcttgaatggttaaaaatgggcaaaattgtcgccatcaaagggattggcggatttcatcttgcctgcgatgcacgtaacagtaacgcggtggcgacacttcgggcgcgcaaacatcgcccggcgaaaccgctggcggtcatgttgccagtggctgacggtttaccagacgctgcgcgccagttgcttaccacgcccgccgcgccgattgtgctggtggataaaaaatacgttcctgagctttgtgatgatatcgcccctgaccttaacgaagtcggggtaatgttgcctgcgaacccgctccagcatttgctgttacaggaactgcaatgcccgctggtgatgacctccggcaacctgagcggtaaaccaccagctatcagcaacgaacaggcgctggcggatttgcagggcattgccgacggattcttgatacataaccgcgacatcgtgcagcggatggatgattcggtggtgcgcgaaagtgcgaaatgctgcgccgttcgcggggcggtgttgagtcagcatctgggcgatttaagtgacgatggcatccagatgcagtggcgcgaacgttacagcctgatgcaaaacatctacgattttaccccgcaatacgttgtgcatgacgcgcatccgggctatgtctccagccagtgggcgcgtgaaatgaatctgccgacgcaaacggtactgcatcatcatgcccatgcagcggcgtgtctggcagagcatcagtggccgctggatggcggtgatgtcattgctttgacgctcgacggtatcgctcaaccggatgagcgttcacgatcagaagatgttgatcgggcgcaccaaagaggccacgaaagagatcgacggcgacgacgttcgggaacctctcacctcacccgcgttgatctgaaagaagatggcaaagggctgaagattgttcgccagagcctgccgtacggcactgccagtggcactcacggtctgtacttctgcgcctactgcgcgcgtctgcataacattgagcagcaactgctgagcatgtttggcgataccgatggtaagcgtgatgcgatgttgcgttcaccaaaccggtaa

SEQ ID NO: 129914 - DNA, 2050 bp, Homo sapiens
ctgctcgctcgcgactagtgattttcccgggtcgacgatttcgtgcggcccgcgtttcaccattattcgcgccatgccttacgaccgcccgtttaccgtgatggcggcgtttccgctatgtccggcctgtgacaaagagtaccgtgacccgctcgatcgtcgcttccacgcccagccggtggcctgcccggagtgtggcccgcatcttgaatgggtaagtcatggtgaacatgcggaacaagaggcggcattacaggcagctatcgcacagttaaaaatgggcaaaattgtcgccatcaaagggattggcggatttcatcttgcctgcgatgcacgtaacagtaacgcggtggcgacacttcgggcgcgcaaacatcgcccggcgaaaccgctggcggtcatgttgccagtggctgacggtttaccagacgctgcgcgccagttgcttaccacgcccgccgcgccgattgtgctggtggataaaaaatacgttcctgagctttgtgatgatatcgcccctgaccttaacgaagtcggggtaatgttgcctgcgaacccgctccagcatttgctgttacaggaactgcaatgcccgctggtgatgacctccggcaacctgagcggtaaaccaccagctatcagcaacgaacaggcgctggcggatttgcagggcattgccgacggattcttgatacataaccgcgacatcgtgcagcggatggatgattcggtggtgcgcgaaagcggcgaaatgctgcgccgttcgcgggggtatgtgccggatgcgctggctttgcctccgggctttaaaaatgttccgcctgtgctgtgtctcggcgcggatctgaaaaataccttctgcctggtgcgcggtgaacaagcggtgttgagtcagcatctgggcgatttaagtgacgatggcatccagatgcagtggcgcgaagcgttacgcctgatgcaaaacatctacgattttaccccgcaatacgttgtgcatgacgcgcatccgggctatgtctccagccagtgggcgcgtgaaatgaatctgccgacgcaaacggtactgcatcatcatgcccatgcagcggcgtgtctggcagagcatcagtggccgctggatggcggtgatgtcattgctttgacgctcgacggtatcggtatgggggagaacggcgctttgtggggcggcgagtgcctgcgggtgaactatcgcgaatgtgagcacctggcggcttgcctgcagtggcgcttccggtgcgattgcagcgagcagccgtgggtccagcccgggtgcgcgctattaacagttaatagccgcgttctacaccaactccgtgacatccattacattattcgccatctgacggaaacgctggggacagacaacctcgcggaaagtcatttacaggtggcgaacgaactgttttaccgcaataaagccgcctggctggtaggcaaactgatcacaccttccggcacattgccatttttgctgccgatccaccagacggacgacggcgagttatttattgatacctgcctgacgacgaccgccgaagcgagcattgtttttggctttgcgcgttcttattttatggtttatgcgccgctgcccgcagcgctggtcgagtggctacgggaaattctgccaggtaaaaccaccgctgaattgtatatggctatcggctgccagaagcacgccaaaaccgaaagctaccgcgaatatctcgtttatctacagggctgtaatgagcagttcattgaagcgccgggtattcgtggaatggtgatgttggtgtttacgctgccgggctttgatcgggtattcaaagtcatcaaagacaggttcgcgccgcagaaagagatgtctgccgctcacgttcgtgcctgctatcaactggtgaacgagcacgatcgcgtgggccgaatggcggacaccaggagtttgaaaactttgttgctggagaagcggcatatttccccggcattaatggcattactgcttcaggaagcagcggcaaacatccacgatctcggcgaacaactgtga

SEQ ID NO: 129915 - DNA, 1013 bp, Homo sapiens
  misc_feature (1)...(1013): n = a,t,c or g
gctccaggcccgcttccccctgtcttggcgcaacttccccatcaccttcgcctgctatgcgggcctcttctgcctctcggcctccatcatctaccccaccacctatgtccagtttctgtcccacgggcgttcgcgggaccacgccatcgccgccaccttcttgtcctgcatcgcgggtgtggcttacgccaccgaagaggcctggacccgggcccggtccggcgagagcactggctatatggccaccggacccgggctgttgaaggtgcaggagaccttcgttgcctgcatcatctttgcgttcatcagcgaccccaacctgtaccagcactcagccggccctggagtggtgcgtggcggtgtacgccatctgcttcatcctagcggccatcgccatcctgctgaacctgggggagtgcaccaacgtgctacccatccccttccccagcttcctgtcggcgctggccttgctgtctgtcctcctctatgccaccgcccttgttctctggcccctctaccagttcgatgagaagtatggcggccagcctcggcgctcgagagatgtaagctgcagccgcaggcatgcctactacgtgggtgcctgggaccgccgactggctgaggccatcctgacggccatcaacctactgacgtatgtggctgacctgatgcactctgcccacctggattttagcaaggtctaagactctcccaagaggctcccgttccctctccaacctctttgttcttcttgcccgagttttctttatggagtacttctttcctccgcctttcctctgttttcctcttcctgtctcccctccctcccacctttttctttccttcccaattccttgcactctaaccagttcttggatgcatcttcttccttccctttcctcttgctgtttccttcctgtgttgttttgttagaaacacatcctgttttcacccctgagctggnnctctttttcttttcnnnnnnnnnnnnnnnnaaaaacggatcccacctg

SEQ ID NO: 129916 - DNA, 2149 bp, Homo sapiens
atggctcagccgcttgcaaagcagtggacacctgtgtcccctagggcgttgttggtcagcatttctagtatgccgcctaggcctgccgcggatgtaacggtttgccgccaccgcaactgcacgcttcgtgaactcttgtacggatttgcttacgctgctgcacagcaattaaatcttcacggcgatgtctgtaatgacggcgatggcgagaagtccggctgcgggaagacccggaaacgtttcttgttcaattgtatagcactgcccgccgctggcgcagcacaggcggcaccatgaatacgcaaattgttcccgatgccgctacgtgccctgctagcctttcggaaatgaataccccaggcgaacggcgttatcgttatccgtttatcaactgtacccactacgggccgagtttccccattattcgcgccatgccttacgaccgcccgtttaccgtgatggcggcgtttccgctatgtccggcctgtacaaagagtaccgtgacccgctcgatcgtcgcttccacgcccagccggtgcctgcccggagtgtggcccgcatcttgaatggggattggcggatttcatcttgcctgcgagcacgtaacagtaacgcggtggcgacacttcgggcgcgcaaacatcgccggcgaaaccgctggcggtcatgttgccagtggctgacggtttaccagacctgcgcgccagttgcttaccacgcccgccggcgccggattgtggcttggtggaaacggttatccaagggctccggacaacgcaaattcaacggcaatgtcgtgtgcgagccacgcccattcatttgggggcggacacccacgtggccgataggcatacgcgcgaagctgactatggcggcacagcttgtagggccctctcaccgccaaggcttcggccttacttataaggctgcaagtccaaagaccggttgtcggattttggattcgacctgccgcaagagtcggatttcccatgctgatggcgaccacacgcagatgagagtggggccaatatcaacattcttaaagaaaaaattttcaacccaaaatttcatatccagacaaattaagcttcaaaaaaatcaaccatcggccattgcaacaatgggcgtcgagaaccagacgctggcggtctcttattactacgtgtgcgtcgacgcccgcagtcagcatgactatattgcgctctcacgtcttttcatacggttaaaggcaaattgccaagaggcccgctggtcgtgctataaatccgtgaacggtaccgagctgattatccctggccagcaagaaataaaagagaaacagctcagggtgaaaacaggattgggcaacaaaacaacacaggaaggaaacagcaagaggaaagggaaggagaagatgcatccaagaactgggccgctggtgctggtacaggttgggctcgctgatgaacgcgaagatgatgcagcaacgaaggtctccagcaccttcagcagcccggcgaatcagtacgagaacaacaaggactcggtggcacaagacaactcggtgcaaaacagaggcggccaccgaagagttccagtaggcgaacccacaggacacacccatggggggcaccgagggacgtccaatcgaagaatggacagagaagcaactggggcaatcccggaagccccaaccaagaaacaggctctggcaaacagacccaaaagagactcactcgttcctctcacagtactcagtccttacgagataaggaccaaagaaaatgtcctgtctggaatgcagggaaaccagacttcagaactccaatacttggcttggaacttgactacttctaacttcggcaacagaaacttcagccagctatggagaaaaggggccctcctctccccagctgcagcaaagcaggtgttattctgcatcataaaccatcctggccatgtttccgagaaaggaaacttcagaggttgtggctatgctctggaaaaaggatccccagtacgagcatgcatgcatgccatcgacgtgtattccctgcggcatgctcctggacagttccgtcgacacgtgagccgctacctcaatctaatggacctggtcgacgtgtattcacctgcggtgcatgcctcctgtacagttccgcacacgtga

SEQ ID NO: 129917 - DNA, 2688 bp, Homo sapiens
atgggagcaaccccaccacggaacccataccactcacaagaacaacacaagaacccgcaagcacccaccgagcgacagacgaaccacccatccctaacaccaccccaagtgaccaccatggcaccgcaaacaggacccatacctcgacacacaaccacaacgaccccgacccgcgaagagacccagaacctaacccaaccaccaccagaaaacgccaaaaacgaacctacacgacagaaggcacggcacatgaagaaaaccatcattttcgcatgtcatcacactgctttcatgtacaccccacctcactttcttctttatttgtgttcgatcaacttactcaatgcatccagctccccaggcactgcctcgcacatcatcaccaattccatcgacacatcccaccccgacacattccaccccacacgagtcaggcatggcctcatcatcccatcacgccaaatcttgcccaagaggcacatcattttgcccacagctattacagcaaatgggctcctagtgagcaacatcacgcacccagagcatacatcacagagcacacatcttcagagtccatactttggcatctatcatcgcacagttcaaaacaaatgtagacagggcactctagaggatcccctgcaatgtcatggcggtccggtgatcctcgacctgctgttaaaacgcattctgaccattcccggcctgcggattgctcgccctggtgagttttccgaacgcgcgtttcttaacgataaacttgacttagcccaggccgaggcgattgccgatcttatcgacgccagttcggaacaggcggcccgttcggcacttaactcgctgcaaggcgcattctccgcacgggttaatcatctggtagaagccctcacccacttgcgcatttacgtcgaagcggcaattgatttccccgatgaagagatcgatttcctctccgacggaaaaattgaagcccagctcaatgacgttattgccgatcttgatgcagtgcgtgctgaagcacgtcagggtagtttgttgcgcgaagggatgaaagtggtgattgccggacgtcctaacgccggtaaatcgagcctgttaaacgcgctggcggggcgtgaagcggcaatcgtaaccgatatcgccggaactacgcgtgacgtgctgcgtgagcatatccacattgacggaatgccgctgcatatcatcgataccgccgggctacgtgaagccagtgacgaagtagaacgtattggtatcgagcgcgcgtggcaggaaattgaacaggccgaccgcgtgctgtttatggtcgatggcaccacaacagacgccgtggatccggcagagatctggccggaatttattgcccgtctgccagcgaaactgccgatcaccgtggtgcgccataaagccgatatcaccggcgaaacgctgggaatgagtgacgtgaacggtcacgcgttaattcgtctctcggacaggactggtgacaggcgtggaacgtgctgcgtacccatctcaaacagagcatgggcttcgacaccaacatggaaggcggcttcctggcgcgtcgtcgccactacaggcgctggaacaggcagggaaaatctacaccaggccaacgcgcacagtgcgacccacccagacaacggcggaggacgactgcgacggcacagcaagtcagcgacaacggggcctaccccaaccacagagggacgataccaaaaccaaacggccaaacggcaacaaaccatggacgcaatcgccaagagtctacagagcatcacagcatcatcatcacacattcatcatcagcacagcacggtcacatcacatcgtcatcgcacacagcacacatcagcgatccacatctgcagcatcacgtcaggccacaatcatattctcaccagtcacaatcgcactcagatatcacattgcgcatctcacaggcattcatcacacgttccaatcagacgcacagataccaagatacacatacctcgcacacacagtcacagcaggagcaagcacaatagcaagagcatttatatccaacgccaggatctattgctatgtaactgtatcgctatgcacgtcttgacgcgcaatcaacccacgcagtatagcggcacaatccccgttgcacgatatagacaagatcacgcagtcgcacgacacaacaccgaggcaccaacctgcgcacagtatatcactagctcgcgaggcacgcgccagagccagcacacacaacacgtgccgacaaggtgcaagctacacacaactgtagctaacaccgcaacgacgcgtccgatcccgtggagatatgcggcacacaactcccaagttgagctggtcccagctccaacacttctagccaatgtggtcaacactcgcagcagcatccaatcaaccagcagtcagtccatccagctcatatggctccaaatcagctgcaactcaacgcaagtcaccccccatccagtctcgcacacactcacagcagtgccacagtgcacaagcacagcaacagccatcatccaacagttgccaacatcagcatcattattggcattttgcatcaacatccacacagtccagcatactccatatattccagtgcaccagtgcacatcacaacatcatatatatcagcagcaccacacagattgttgtgccgtatatcatatatag

SEQ ID NO: 129918 - DNA, 1581 bp, Homo sapiens
atgaatgagttggtgcagatcctgaaaaatacccgtcagcatttaatgacgggcgtttcacacatgattcccttcgtggtatcgggcggtattttgctggcggtttccgtcatgttgtatgacaaaggggtaaatcagctgagactgcgtgtcacgttcgcgctggactgctgtgatcgtgaggcactgcactgggcggtcactaccggcggcttcaacagtgaaacagtacaggacgtcatgctgggagcggtggaacgccgcttcggcaacgatcttccgtcgtctccagtggagtggctgacggataatggttcatgctaccgggctaatgaaacacgccagttcgcccggatgttgggacttgaaccgaagaacacggcggtgcggagtccggagagtaacggaatagcagagagcttcgtgaaaacgataaagcgtgactacatcagtatcatgcccaaaccagacgggttaacggcagcaaagaaccttgcagaggcgttcgagcattataacgaatggcatccgcatagtgcgctgggttatcgctcgccacgggaatatctgcggcagcgggcttgtaatggtacgccgaatacctctttgccaacgccgcaggcttttgacaggtcatgcccaatcaacgcgaccagcgccaagaccttcttccaccgccaaccgacacagtgcggaaagctccatcaagcagagattgcgtcagcaacgtatcgccagtggaggttgaaccggtgtatcaaagggttaatgccacgctcacttctgacgtgtggattaagtctaccgaaatattatgccgcgcgaggatgccgaaaacttccgcgaggtaaccgcgagaatgcagcaatattcagcctgtgcaaaacaaaacacacaccaagaaaagaatcaacgataaaagtacacatgaaaacacaaaaacaaataacaaaaacacttagaccaatatccttgatgaacattgatgcaaaaatcctcaataaaatactggcaaaccgaatccagcagcacatcaaaaagcttatccaccatgatcaagtgggcttcatccctgggatgcaaggctgcttcaatatacgcaaatcaataaatgtaatccagcatataaacagaaccaaagacaaaaaccacatgattatctcaatagatgcagaaaaggcctttgacaaagttcaacaacccttcatgctaaaaactctcaataaattagagagaaaaccaatgctcaatgcagaacatccacgcctggaccggccaacctaccccccggcccccgcgggccatcaaagagccacatccaatacccgcggcccccacggccacagccagaccaacacaacacacgcaccggccgagcccccaaagaccccgagagccccccactgcccccccacgctgctgccgccccccaacacagcccgcacccccacggggacaccaaacccccgcgacccaccgccaaccgagcgaccgagcccccgcccacaccgacgccagcacgcacggatcccgcccccccccccacaggccccctcaaaccctggcggagaccccccctaa

SEQ ID NO: 129919 - DNA, 877 bp, Homo sapiens
atgcaagctgctcataggttacgccctgcataccgtataaagactggcaaaccaccagctttggcagattatcatcctgcatatcaagaaatgctttcacgaaaacaggatcgtgtaatcgatcagatcgattttggcatcaaagacaccgtcgaaattctgcatatggggcagatccagagcatgggtcgcgagttcgcattgtctctcaggttttcaatccatggacacaatgtgcatggaaatgaaagcccagagatgggtcccgagcgtcgttcaggtttctatgatgaatggtcccctgagagaatcatacaatattataggcctgcccgggagcagcttatgaatgagttggtgcagatccttaaaaatacccgtcagcatttaatgacgggcgtttcacacatgattcccttcgtggtatcgggcggtattttgctggcggtttccgtcatgttgtatggcaaaggcgcagtgccggatgctgtagccgatccaaatctgaaaaaactgtttgatatccggcgttgcgggcttgacgctgatggtgcctttcctcgcagcgtacatcggttattccattgcagagcgttctgcgctggctccgtgcgctatcggtgcctgggttggtaacagctttggtgcgggcttctttggtgcgctgatcgacgcctttccacgtttgtctgaggagataaaccctgcactacctgaggcaaaagtgatggcctgccttgaggcagttgccaggcaagataatgttgattctcctcaggagctacccccaacacccctgtttgcttctagacctataactagactgaagtcctggtgggcccctggaggtgaagttgagagtgggacccacaagaag

SEQ ID NO: 129920 - DNA, 423 bp, Homo sapiens
gccgcaatttgcacgcgctggcgttaaatattttcaaagatgaaggccgcgaagcgtttctgaaattaatggaaaccaccgatatcttcatcgaagccagtaaaggtccggcctttgcccgtcgtggcattaccgatgaagtactgtggcagcacaacccgaaactggttatcgctcacctgtccggttttggtcagtacggcaccgaggagtacaccaatcttccggcctataacactatcgcccaggcctttagtggttacctgattcagaacggtgatgttgaccagccaatgcctgccttcccgtataccgccgattacttttctggcctgaccgccaccacggcggcgctggcagcactgcataaagtgcgtgaaaccgggaaaggcgaaagtatcgacatcgccatgtatgaagtga

SEQ ID NO: 129921 - DNA, 790 bp, Homo sapiens
atggcccaattgccgtcattaaccatgttcgccacaattttcggtctttcggcgaacgggcggccccctaagccgaaaaaaccgggtggtgccgggccccagtttattgacgtggtttttttccgctcctttatcgccttctgttggcttttacccgaaattggtgcgctggattcataccattccgccgacggttattggtggtgcatcaattgttgtgttcgggctgattgccgtcgcaggcgcaaggatatgggtacaaaaccgtgtcgatttaagccagaacgaagttgttcatcaggagccataaacagaaaaccgccggggttaccggcggtgcagattgttgacaacgtacgcattgttcatgccggatgcggcgtaaacgccttatccggcctacaaaacagtgcaaattcaatatattgcaatcttctgatgcgcgctgcgggtcattcgttgaaattacccccgctgtgctgtccaccttttttacctgcttctgatgctctttcgcggtcttctgcaaattgccggaaccgcctcgatggttgccatactgacctccgtctggaatctggaggaccgcatacatcctccaaagaaaccagagtggtgccccaagatggtgaaacaaccggagtcaccccgctctgtgtacgaataggccaccccgaacgcgattggtgttttatccgctactggcgcctaacgcctaactggcagcgcttcagaagggttgggcgtacggagcgggccacaacgcataatcgcctgcaggcgtttgggg

SEQ ID NO: 129922 - DNA, 4017 bp, Homo sapiens
atgcgcttctgcctgtacgtttgcaccccgctggtgtggttcttcaacggcctggcgaacataatcttccgtattttcaaactgccaatggtacgtaaagatgacatcacttctgatgacatctacgcggtagtggaagccggtgcgctggcgggcgtgttacgtaaacaggaacacgagctgattgaaaacgtctttgagctggaatcccgtaccgttccgtcttcaatgacaccgcgtgaaaacgtgatttggtttgatctccacgaagatgagcaaagcctgaagaataaggtggcggaacatccgcactctaagttcctcgtctgtaatgaagatattgaccacatcatcggttatgtcgattctaaagacctgctgaaccgcgtgctggctaaccaaagcctggcactgaacagcggcgtacaaattcgcaacacgctgattgtgccggatacgttaaccctttcagaggcgttggaaagttttaaaaccgcaggtgaagacttcgcggtgatcatgaacgagtacgcgctggtggtggggatcatcaccctcaatgacgtgatgaccacgctgatgggcgatctggtcggtcaggggctggaagagcagattgtcgcccgtgatgagaactcatggctgattgacggcggcaccccaattgacgacgtcatgcgcgtgctggatattgacgagttcccgcagtcgggcaactacgaaaacatcggcggctttatgatgttcatgctgcgtaagatccgaaacgcccgattcggtgccagctatttcaatcagcaactggcgtatgcgcaattgcaaatagccgaagaaacgctgcgtaattatcagcagtcatatgcgtttgtcgaaaaacaactgttgacaggtagcagtaatgttctggcgctggaacaggctcgcggggtgatagaaagtacccgcagcgacatcgctaaacgtcagggggaactggcgcaggcgaataatgcattgcaactgttgctgggaagctacggcaagctgccgcaagcgcagacagtaaacagcgacagcctgcaaagcgttaaattaccggcgggattgtcgtcgcaaatcttattgcagcgcccggatattatggaagctgaacacgcgttaatggcggctaatgccaatattggcgctgcacgcgcggcattttttccgtctataagcctgaccagcggaatatcgaccgccagtagcgatctatcgtcattatttaacgccagcagcgggatgtggaattttatacccaaaattgagatccccatttttaatgccggacgcaaccaggccaatctggatatcgccgaaattcgccagcagcagtcggtggtgaattatgaacagaaaatccagaacgcctttaaagaagtggcagatgcgctggcattacgtcaaagcctgaacgatcaaattagcgcccagcagcgttatctggcatcgctgcaaattactttgcaacgggcgcgggcattatatcagcacggcgcagtaagtaatctggaagtgctggatgccgagcggtctttatttgcaacccgacaaacttatctggatcggaatatgtccggcaaggttaacgaagtttcatggcgatccgaactggtggaggttgcaagcatatactcgaccgtcctcaaaattgatattcactttttcattgttgatcaggtattccacatcgccatcgaaaggcacattcacttcgacctgaccatgccagtggctggtgggcatgatatgcggatgctggaagccgcacacaccagccgaacggccagttcatgtgaaatcccctacgccggaaactggctggccgggcttcatgcacccacggccatgccccgcacagccgcaatatccatgcgaacaaactcgcttcccgcactttggcgcccctacgaacatgtcccaccaacgctggccactcaggttgcggcgctggcggcgattgttccggtcgcgctggcgatcggcgttgatccggcatacatcgtggcttcagcaccggcttgctacggttattacatcctgccgacttatccgagcgatctggcagcgattcagtttgaccgttccggcaccacccacatcggtcgcttcgtcatcaaccacagctttattctgccggggttgattggtgtgagcgtatcgtgcgtcttcggctggatcttcgccgcgatcgttgccgacttcgacggcgaaaccatcctgaaagtggaaccagaagccctgaccctgctggcgcagcaagcctttcacgacgcttcttttatgctccgcccggcacaccagaaacaggttgcggctattcttcacgatccagaagccagcgaaaacgacaagtacgtggcgctgcaattcttaagaaactccgaaatcgccgccaaaggcgtgctgccgacctgccaggataccggcaccgcgatcatcgtcggtaacaaaggccgcgcgttgtggaccggcggggtgatgaagaaacgctgtcgaaggcgttatacacctatttcgagatacctgcgctattccagatgggggctggcatgtcacgcgcctgaccatgactatgccgagctgcaggacaaaatcggtgtcatgtcgaagattggctataacggcacaaaaattcttgagattgattccagagcgccctacagcgaagtgctggaacaggcacagaaggcggtttctctggttgccatcgtttctgaccgccgaaatggcgcgtttcgcaccattattcgcaatagcgcctggttaggctccagtaatgtcgtgagcgccttgctgggtctgttggcgctctcgtgtgccggtaaagggatgacgcccgccatgtttggcgtactggtgattgtgcaatcgtacgccaagtcgatcagcgattttattaggtttcagacatgtatcgatctggacattgccaaaggcaaatttgtcgctaaagcgcgttttcttgctgaagcaggctggcgcacgctgttaggcagcaaagagcgcgatgaagaaaacgacggcacgccactgcctgtggtggcgaaaggcgatgagttgctgtgtgaaaaaggtgaagtggtagagcggcaaacccagccgccgcgccattttaccgatgcaacactgctttcggcgatgaccgggatcgcgcgctttgtgcaggataaagatctgaaaaagatcctccgtgcgaccgatggtctggggacagaggcaacgcgtgccgggattattgaactgttgttcaagcgtggtttcctgaccaaaaaagggcgctatatccactccaccgacgccggaaaagcgctattccattcgctgccggagatggcgacgcgaccggacatgaccgcgcactgggaatcggtgctgacgcaaatcagcgaaaagcagtgtcgctatcaggactttatgcagccgctggtggggacgctatatcagcttattgatcaagccaaacgtacgccggtgcggcagtttcgcggcattgtggctccgggcagtggtggcagtgctgataagaaaaaggctgcaccgcgtaaacgggaggggcgttatcttcactcagatatcgacaccgtcgaacgtatggagattatccgcgacttgagtctgggtgagttcgacgtgctggtagggatcaacttactgcgcgaaggtctggatatgccggaactgtcgctggtggcgatcctcgacgctgacaaagaaggcttcctgcgttccgaacgttcgttgatccagaccattggtcgtgcggcacgtaacgttaacggtatagcgattctctacggcgataagatcaccccatcaatggcgcaagcgacttggacgaaagccgaacgtcgccgtgagaaacagcagaagtacaacgaggaacacggaattacgccgcaaggcttgaacaagaaagtggtcgatatcctggcgctggggcagaacattggccaaaaccaaagcgaagggcagaggaaaatcgcgcccgattgttga

SEQ ID NO: 129923 - DNA, 1146 bp, Homo sapiens
tcaggtcacccattcataccgcttaaagatctcacacaaatagcaattggtgatgtcttcaacaataacctcatcttgtgggccaacagagaaatcattcacagcgttccttgaaggtattgacatgatgcaaatatccaatgttttgtagtcatctctagctttgttcgctctcaacagtgactgtattttcacaatttcattattcttcacaacagaatcagtattatcaatgaacgtttgccgcctgtgcatatactccttccgttgtttatatcctttccaaaaagccttgccctcgacaagttgtaaaactttatgatcaagagtgtgggccctggaggatttcaaatcatgtgggtttgaatctctgctccacttagtaactgtgttacccaggaaaaggtttatacctgttctgtgcctagtttcctcatctgtaaaatactgataataacctccactctcttggggttgcataatacagaatgagtggatgccctgagcttgttttcctacaactagacagtcccattttatcatgaggcttcggctatctatagcttcaccgtcctctatgtcatatttgcttgtcaagacaagagaaatctcggtctttgaaagctgacttagtgtatttgccttgttagggtcattggggtcaactgctccttccccaagaaaagattccacggttggcacctctcccagcgaccccagcaattcactcagtaagtcatttttctcaggggcaattgcatcctggtgttccaacaggagtgagtgtgtgctgatgatttcttcaattgaaatataaatgactggtttgctgactgtcaccaggtctgtgtatttgtccatattaaacttctcttctggctcagggacattacatgcttctttgaaatatttcctgaattcctgatacgtctctgataaataattgttcatagatgagagatgctcattttctccttcaaacagcttgttggaggctgcgtgctgaagaaccttggccactgatcctaagtttctcctttggtcagaatttatctgacctccagctgtcatgtcgatgatatcaaagccatctggagctacaatggctggattcatgtaccgatagtacaggaggtttccaacaat

SEQ ID NO: 129924 - DNA, 1908 bp, Homo sapiens
  misc_feature (1)...(1908): n = a,t,c or g
atggcgggcgtcatccctttaccggcacacgagagcgccaacagacccagcaaggcgctcacgacattactggagcctaaccaggcgctattgcgaataatgcctgaccttatcgttgatagtaaaaagtatcccgccagccttaagttaaacttcggcggtcagaaacgatggcaaccagagaaaccgccttctgtgcctgttccagcacttcgctgggaaggagcagttgaccccaatgaccctaacaaggcaaatacactaagtcagctttcaaagaccgagatttctcttgtcttgacaagcaaatatgacatagaggacggtgaagctatagatagccgaagcctcatgataaatatgtataactcggcgttcctggacgacctgaccaaagcaatgggcagaaaatcctttgacgaagatttaaaagcgctgccggaaaaaggcggttatttgtgcctgtttgacgtcgataaattcaaaaacattaacgacaccttcggtcatttgctgggcgatgaagtgttgactagggnaacgaaaatatggcagccgccatacgccgcgttaattctatgcaatatgatgtctatacccagacggaggtcagtaatggcaaaccatcgaggcggttccggcaattttgcagaagaccgcgaaagagcatcagaagcaggtaaaaaaggtggacagcacagcgggggtaatttcaagaatgacccgcagcgcgcatctgaagcaggcctacgggagcacgaatgtaggccggataaagcgtttacgccgcatccggcagtcatgcgctacataaatttttcaggagcacataatggatcatctacccatgccgaaattcgggccgttggccggattgcgcgttgtcttctccgaaatgggcgcgcggaagttatctggatcgagaacgtcgcctgggccgacaccattcgcgttcaaccgaactacccgcaactctcccgccgcaatttgcacgcgctgtcgttaaatattttcaaagatgaaggccgcgaagcgtttctgaaattaatggaaaccaccgatatcttcatcgaagccagtaaaggtccggcctttgcccgtcgtggcattaccgatgaagtactgtgggaggacaagccgaaactggttatcggtcacctgtccggtttcgcacatcaggtctcccaaatcagcacccatcaaggcagcagtaactgggtgtcaccagaccagctacaatgcaacacacaaacaaattcacccaagcagcttttttcaacacactgcatgcaatgccgacccaattccacaacaaattccaggcagttccaatcaaatcccgtcaatcatgcattaaatcatcaaagcaaaccccatcaccctttggtttatgcacagcacaaagccaaaagagcacacagggcaaaatccatcacagctagcaggaaacaagcaaccactttccaacaggttggtgcaccagcaggtggccacactcacacttcctccagtcatccacaaacaaccaaagcacttgaacaggtcaagcacctcacaactcgtcaagcaatcctcagcaaggcaaaacctcaggcaacatcacccattcctagggacactgggcccttgcgcggcaggcaattccatgcactcaatccctcaacaacagtaattggccaaccagcaaaccaaaggattggacaacatgggcaccctcaattcaaacccaaaacacccttctggccacagccaaaagaaaaagtacccaacaggcagtgcaccagcaagacctacagcaatggggagcaaaatattccacaaacatatgcaatccggacaaaaaacagatctacatatcccagaaatctcaaacagcaacctttaaatccaggcaaggcaaagacctaa

SEQ ID NO: 129925 - DNA, 361 bp, Homo sapiens
caaaccacggggatttctttccagggtaggggaggggccgggcccggggtcccaactcgcactcaagtcttcgctgccatgggggccgtcatgggcaccttctcatctctgcaaaccaaacaaaggcgaccctcgaaagataagattgaagatgagctggagatgaccatggtttgccatcggcccgagggactggagcagctcgaggcccaaaccaacttcaccaagagggagctgcaggtcctttatcgaggcttcaaaaatgagtgccccagtggtgtggtcaacgaagacacattcaagcagatctatgctcagtttttccctcatggaggactttgtaaccgctctgtcgatttta

SEQ ID NO: 129926 - DNA, 450 bp, Homo sapiens; identical to SEQ ID NO: 123296

SEQ ID NO: 129927 - DNA, 1452 bp, Homo sapiens
atgctgctggagcaattaagtcagcataaactggatatgatcatttctgactgtccgatagactctacgcagcaggaaggcctgttctccgtgagaattggcgaatgtggcgtgagtttctggtgtacaaatccaccaccagaaaaaccgttcccggcttgtctggaagaacggcgacttttgattcctgggcgacgttcaatgttagggcgcaaattgcttaactggtttaactcccagggattaaacgtagaaatcctcggcgagtttgatgatgccgctttgatgaaagcttttggtgcgatgcacaatgcaatcttcgttgccccaacgctttatgcatatgacttttatgccgataaaactgtcgtagaaattggtcgcgtcgagaatgtgatggaagagtaccatgctatttttgctgagcggatgattcagcacccggcggtacagcgaatctgcaatacggattattctgcgctttttagtccagcgaaacttcgccgcgccctttatcatccagcgtcaactgaacttcatccagcgtgcgggaaagattttcggcagctatatcgccgaattcaaaaccagattcagcgccatgcgctctggcataaaatcttcgacgtggaaatcccacatccgatactgattatcgcccgtgttagcgcgaatatgccacataccggttgccgcattgctatcgagtggccaggtaaagtggtagaggccattctccggctgactaacgacgctcctgagtacctgcccatcgggtttaatcacaaaagtaagatgaggagcgaaggcatgaacccatatcagcgccagtttatggaattggcgcttagcaaccaggtgttaaagtgtggcgagtttacgctgaatcgcgggcgcaaaagcccctatttcttcaacgccggtctgtttaataccgggcgcgatctggcactgttagcccgtttttacgctgaagcgttggtggattccggcattgagttcgatctgctgttggcccctgcttacaaagggatcccgattgccaccacaaccgctgtggcactggcggagcatcacgacctggacctgccgtactgctttaaccgcaaagaagcaaaagaccacggtgaaggcggcaatctggttggtagcgcgttacaaggacgcgtaatgctggtagatgatgtgatcaccgccggaacggcgattcgcgagtcgatggagattattcaggccaatggcgcgacgcttgctggcgtgttgatttcgctcgatcgtcaggaacgcgggcgcggcgagatttcggcgattcaggaagttgagcgtgattacaactgcaaagtgatctctatcatcaccctgaaagacctgattgcttacctggaagagaagccggaaatggcggaacatctggcggcggttaaggcctatcgcgaagagtttggcgtttaa

SEQ ID NO: 129928 - DNA, 1086 bp, Homo sapiens
atgatcgtggcgttttgtttatataaatattgtccatttgctgggcttcaacgtgactttatgcgcattgcatcaacagttgccgcacggggccaccatgttcgggtatatacacagtcgtgggaaggcgattgcccgaaagcatttgagcttattcaggtgccagttaagtcccataccaaccatggacgcaatgcagaatattatgcctgggtacaaaatcatctcaaagagcatcccgcagatcgcgttgttgggtttaataagatgcctggcctggatgtttattttgccgctgatgtttgttacgccgagaaagttgcgcaagaaaaaggttttttatatcgtttaacatcacgatatcgccattatgccgcatttgagcgagcgactttcgagcagggtaaatcgacgaaacttatgatgctgaccgataagcaaatcgccgatttccagaagcattatcaaactgaacctgaacgttttcaaattcttcctcccggtatttatccggacagaaaatacagtgagcaaatcccaaacagccgtgaaatttatcgccagaaaaatggcataaaagagcaacaaacttattactgccaggttggatcagattttggccgtaaaggctgttttgccgcgaaggtaccgctggtttccggcgcggcaattcgtatggaaggtcaaatcaccgtctttacttatcaggacggtgaaccgtgctatcgctgccttagccgtttgtttggtgaaaatgcattaacctgcgtggaagcaggcgtaatggcaccgttgatcggcgtaattggttcgttgcaggcaatggaagcgatcaaaatgctggcaggttatggcaaaccggccagcgggaaaatcgtcatgtacgatgcgatgacctgtcagtttcgcgaaatgaaactgatgcgtaatccggggtgtgagcaatttatgaggatgcagaacgtccggttaaatcgacgttctgccaaacgctccctgccagtcctgctcaaacttcgccacagcggcatcaaccgccggatagctaatcatctgttgtgccacatccagtggcagagtaattga

SEQ ID NO: 129929 - DNA, 1062 bp, Homo sapiens
ctattggtcacagcattttctgtccggataaataccgggaggaagaatttgaaaacgttcaggttcagtttgataatgcttctggaaatcggcgatttgcttatcggtcagcatcataagtttcgtcgatttaccctgctcgaaagtcgctcgctcaaatgcggcataatggcgatatcgtgatgttaaacgatataaaaaacctttttcttgcgcaactttctcggcgtaacaaacatcagcggcaaaataaacatccaggccaggcatcttattaaacccaacaacgcgatctgcgggatgctctttgagatgattttgtacccaggcataatattctgcattgcgtccatggttggtatgggacttaactggcacgtgatccgttgcaccaaatagactaatgactggcgttttcactgccgctgcaatatgtcccggcgcagaatccacaccaataaaaagcactgcatgatcaattaatgcacccagttcaggaaaacgtgttttacctgcaaggccagtaatgggttttgtttcgcaacctcgtgcaatctcatctacacaagcgagatcatctgccgagggcccacaggttagcacaacctgatagcctcgctgttgcagcgcatcgataaccttagaaaatttatcgttatcccaacacttaaatatctgacgcgctgtcggttggatgacaacataatgatcttttacgcccagggcatctaattcccggcgcatcttcttccagcaatcttcggcgtaactcattgttgtgtcggtgtagaaatcggtaatacctaatggctcaaggaccgataaattacgctcaacaatatgtgtaccgtgtattggcgctaagtgtgtgaagctttttttccaaataccatgctgccgatgaccataaagttgcgatattttcatccgtgcaggtaaacaacgtaccagcagcgccaccatccatgcctcccttggctgtgggttgggggctcctctgccccgtgtggctctcaggtgggccaccacaccacactgtgttccctcctcttcgtggatcat

SEQ ID NO: 129930 - DNA, 3066 bp, Homo sapiens
  misc_feature (1)...(3066): n = a,t,c or g
tcacaccatcccgttcgacttgttgcggttgtacttggccagcagcagctggatcggcgtcgcatttatcaagccgtgcgattcgacgtcggtttccgccatcacaaacaggccgtagatatcacacagttcgtaaaaacgcggatcgttcgggtagtgagcggtacgcacggagttgatattgtgctgcttcatcaactggagatctttctcgacgcgatccattccaacggcgcggcctttgcgatgatcgttgtcgtgacggttgacgccgtgcagcatcacataacggttattgatccagaacagaccgtcgcgcactttgatatcacggaagccaacgcgttgtggcaccacttccagaacgttgccgttggcgtctttcagcgtcatgaccagatggtaaagataaggggattctgctgaccattgctgcggctgttcgacagtaaaagcaaagctggcgctggtcagtttttcaattgccaaatgatcaatggcgctgctgtgcaccacgcgttcgccatcaaacagggtatattccagcgtcgtgacgacaggggaggcggcgagattttccagcaccacttcgcaggaaagcgtggcatcgcaataggcttcgtcaaagtcggtacgcacagtgaaatcgttaatatgcgttaggtgttttccgaccagataaacatcgcggaagatccccgctgaccaccacatatcctggtcttccacgtaggtagagtccgcccagccgtcaaatttaatcagcgtctgtttaccctgccagccgtcgctgagggtgaaaatacgttgataggcaccggttgggttatcgctggggacaaacggcacatcgatggggaacggaaaaccttcgtcggtatattgcagtttgccgtgaccttccatttgccacatggcggggacggtaatatgcccccagtcagccattaactcagaggtgaaggcttctggtacttgcagcggatggtcaaaaaagtggaaattccactgaccgcngcnccngcccagatgttccgccatttccggcttctcttccaggtaagcaatcaggtctttcagggtgatgatagagatcactttgcagttgtaatcacgctcaacttcctgaatcgccgaaatctcgccgcgcccgcgttcctgacgatcgagcgaaatcaacacgccagcaagcgtcgcgccattggcctgaataatctccatcgactcgcgaatcgccgttccggcggtgatcacatcatctaccagcattacgcgtccttgtaacgcgctaccaaccagattgccgccttcaccgtggtcttttgcttctttgcggttaaagcagtacggcaggtccaggtcgtgatgctccgccagtgccacagcggttgtggtggcaatcgggatccctttgtaagcagggccaaacagcagatcgaactcaatgccggaatccaccaacgcttcagcgtaaaaacggcctaacagtgccagatcgcgcccggtattaaacagcccggcgttgaagaaataggggcttttgcgcccggatttcagcgtaaactcgccaaactttaacacctgcttgctaagcgcaaattcaataaactggcgctgatatggtttcatgccttcgctcctcatcttacttttctggttacgggtataagggccagattccaggtacgccgaggccctgctgtgccgctgacttaaccagccaacgcctgggccgaaatgtgggagtatagtgcctggcaaaggcgtatgtacagtatggggtgaacgtccaaggtcgttgttcacccaggtgcaacggaccgttggtgaaacacgaacggttgctaccggattttttggatcgctgctccattcgtaccagccgccgtcatacacggaaacattcttccaacccatggcgcgtgcgtacataaaggtttcggacgcgcgccagccggtgccgcagtagaatgaaacttgctgctctggtttgatattccacgctttccacatagcggtaatatcatcggcgctgcgcatggtgccatccgggttatgaaaatcttccatatgcgtcgagtcgctaccagcgtgtccccaacgtgcgccggctatttcaccttttggtttaatatagctgtaaccgctggtcgtaccgataaattctggccacgaacgaatgctcaccagcgatgcatcctggcgatgcagcagtccacgggcctgttccatatcgagcatcaactgcggttgtgccgggatcttcacgccgaaatccggttccgctttcactttcggtggcgttccgcgctcaacaggcagtcccgcgtcggaccaggtttgccagccgccatccagcaggcgcacatctttcacgccagcataaagcataatctgcgccacacgcgccttggtgtcatgccgaatcccttgttttgccagcatcgcttttagttgttcatcagaaactttgttccacaccggttcactttccacttcgttggtatcgatgtagtcagcgccgggaatatggctgataaggtaaagcttaggagcgccccaggccgcttcaatgactttccagtcaccggcaggtttcgccgtaacctctttaccttgttgcaggtcgtgcagccattgcggataaaccagctgctcaaaatgcggcagtttttgcagacgggaaggttcgcttagcgcgtcactcaggatggagatatgcgttaaacctgctttttgcagtcgcgttttgacggcgtcgacatctttgtcattaccgtacagcgccaccggagcatcggttttcaggttatgttgcttgatccacgcgttgagctgttcggtgctcattttgtcaagccagctggcagagaggtttaaggcggcaagttcatgaccagaagggccatttaaggtttgtggccagccgttataaaacgcgctggggcgagtatctatcgctttgccattttgttgttgaagctggtcaagtgtaagaggcttcgccagttcagcggcccacgaagaagcgcaagccagccctaaagccattgccagcgcggtcat

SEQ ID NO: 129931 - DNA, 765 bp, Homo sapiens; identical to SEQ ID NO: 126910

SEQ ID NO: 129932 - DNA, 823 bp, Homo sapiens
ggcttcagggcaccgtcctcggccctgggcgagggaaccgccgggccgggtcctcgcgcggggaagcggttccgaaggctcgcggggagcggctagccctgagtccctgcatgtgcggggctgaagaaggaagccagaagcctcctagcctcgcctccacgcttgctgaataccaagctgcaggcgagctgccgggcgcttttctctcctccaattcagagtagacaaaccacggggatttctttccagggtaggggaggggccgggcccggggtcccaactcgcactcaagtcttcgctgccatgggggccgtcatgggcaccttctcatctctgcaaaccaaacaaaggcgaccctcgaaagataagattgaagatgagctggagatgaccatggtttgccatcggcccgagggactggagcagctcgaggcccagaccaacttcaccaagagggagctgcaggtcctttatcgaggcttcaaaaatgagtgccccagtggtgtggtcaacgaagacacattcaagcagatctatgctcagtttttccctcatggagatgccagcacgtatgcccattacctcttcaatgccttcgacaccactcagacagggctccgtgaagttcgaggactttgtaaccgctctgtcgattttattgagaggaactgtccacgagaaactaaggtggacatttaatttgtatgacatcaacaaggacggatacataaaccaagaggagatgatggacattgtcaaagccatctatgacatgatggggaaatacacatatcctgtgctcaaagaggacactccaaggcag

SEQ ID NO: 129933 - DNA, 3109 bp, Homo sapiens
atggtgaaggatgcttcccagtcccaagcatctctgggccttgatgctttcctgcctgcctcaggagttcaatacacccatgagaggtccccagatagcccactgaagagccaggagtgccccagtggtgtggtcaacgaagacacattcaagcagatctatgctcagtttttccctcatggagggctgatgtcagagaatggcactggaaagaaagcctctgtgtttgggtccaccgggtcaggggcgcttcttctggaggaaggcgagagaaggcgagagcaacctcttattgaaatgcggaaacctccccacgtgctcatcaattaccaggccaaagtaggtggaaatagcatcccatcgccttccctctgcaaaccggcattcccaccccttccttcctgggctgtggacctggcatctgccagacaaaaggaagacgcaagcagaagtttacaaaacaaggaggaagacttctacacctcacagccaggattccctgctctggctctcggctgctgcctcagggtgaatctgttgctaggtcatcgtggcatctctgcagggagctcatacagacccatcacatccaccccctgccacctctgcaagcttggacaggaggtgtttgccaaacctttaaatcttcaggatcaatgtcagcaaaatctggtaatgcaggtcttgaaactggtccttaactgccttaactttgacttcattggcagttcagcagatgaatctgcagatgatctttgcacggtgcagattccaacaacttggagaacaatgggtctggtcggatgtgatggcgtgtgttgtcgaacccgctggtgtcagtgtctcgcgaccgcggtggtctctggtgttggcggtggcccctggttgcttccggcctgttcttctggaccgtcgatgatttccaagagaaagaaatttgtacacaaatgggctaaagacttggtggaacctagacacgggcttgaaaacgtatgggacctgcccagggccatggctggaagctacttgatgtacaagcaaagaaagtggaagataatggaatttgggaaatgggcacttcaacacaagatgacagtgaaagacatagaaaggctacagttgtataacaaagttaaggagcaaccagttcaagttgaaggctctgggagggctagcacgattttttgggtgttgaaaacgtttaaggggggaaaaagcccctgtggtgcccccggcgagtgtgtggcgtggacgcaatgcagaattttaggttgggtacaaattcatttcaaagagcatcccgcagatcgcgttgtgggtttaattaagatgcctggcctggatttttattttgccgctgatgtttgttacgccgagaaagttgcgcaagaaaaaggttttttatatcgtttaacatcacgatatcgccattatgccgcatttgagcgagcgactttcgagcagggtaaatcgacgaaacttatgatgctgaccgataagcaaatcgccgatttccagaagcattatcaaactgaacctgaacgttttcaaattcttcctcccggtatttatccggacagaaaatacagtgagcaaatcccaaacagccgtgaaatttatcgccagaaaaatggcataaaagagcaacaaaacttattactgcaggttggatcagattttggccgtaaaggtgtagatcgctcaattgaagctttggcatcgttaccggaatcattacgtcacaatacgcttttatttgttgttggtcaggataagccgcgaaaatttgaagcgctggcagaaaaactcggcagtgaacgtgcatccatggagttcaagcggtatgaatacaacgccgcaggcgacctgactgccgttatcaccccggacggcaaccggagcgagacacagtacgatgcgtggcggaaaggcggtcagcaccacgcagggcgggctgacgcgcagtatggagtacgatgctgccggacgtgtcatcagcctgaccaacgagaacggcagccacagcgtcttcagttacgatgcgctggaccggctgtgaggatgagggacttgtcatcctctgggtactacgatgaatcggaccgtatcactcaccgcacggtgaacggcgaaccggcagagcagtgccagtatgatggccacggctggctgacagacatcagccacctgagcgaaggccaccgtgttgccgtccacgatggctatgacgataaaggccgcctgaccggcgaatgccagacggtggagaacccggagacgggggaactgctgtggcagcatgagacgaaacacgcatacaacgagcaggggctggcaaaccgcgtcacgccggacagcctgccgccggtggagtggctgacgtatggcagcggttacctggcgggaatgaagctgggcggaacgccgctggtcgagtatacgcgggacaggctgcaccgtgagacggtgcgcagcttcggcagcatggcaggcagtaatgccgcatacgaactgaccagcacatacacccccgcaggccacgttacagagccagcacacttgaacagcctggtgtatgaccgtgactacgggtggaatgacaacggcgacctggtgcgcatcagcggcccgcgacagacgcgggaatacggctacagcgcctacgggcaggctggagagtgtgcgcaccctcgcaccagacctgtacatccgcatcccgtatgccacggacccggcgggcaaccggctgccggacaaggagctgcatcccggactagtacactcacagtgtggccggataaccgcatcgcggaggatgcgcactatgtctaccgccacgatgaatacggcaggctgacggagaagacggaccgcatcccggcgggtgtgatacggacggacgacgagcggacccaccactaccactagcagggatcctgaacgcgggcgcggcgagatttcggcgattcaggaagttgagcgtgattacaactgcaaagtgatctctatcatcaccctgaaagacctgattgcttacctggaagagaagccggaaatggcggaacatctggcggcggttaaggcctatcgcgaagagtttggcgtttaa

SEQ ID NO: 129934 - DNA, 1524 bp, Homo sapiens; identical to SEQ ID NO: 116251

SEQ ID NO: 129935 - DNA, 1182 bp, Homo sapiens; identical to SEQ ID NO: 121156

SEQ ID NO: 129936 - DNA, 693 bp, Homo sapiens
atggagaatgactttgacgagctgagagaagaaggcttcagacgatcaaattactctaagctacgggaggacattcaaaccaaaggcaaagaagttgaaaactttgaaaaaaatttagaagaatgtataactagaataaccaatacagagaagtgcttaaaggagctgatggagctgaaaaccaaggctcgagaactacgtgaagaatgcagaagcctcaggagccgatgcgatcaactggaagaaagggtatcagcgatggaagatgaaatgaatgaaatgaagcgagaagggaagagctggttttttgaaaagagcaacaaaattgatagaccactagcacgactaataaagaaaaaaagagagaagaatcaaatagacacaataaaaaatgataaaggggatatcaccaccaatcccacagaaatgcaaactaccatcagagaatactacaaacacctctacacaaataaactagaaaatctagaagaaatggataaattcctcgacacatacactctcccaagactaaaccaggaagaagttgaatctctgaatagaccagtaacaggatctgaaattgtggcaataatcaatagtttaccaaccaaaaagagtccaggaccagatggattcacagccgaattctaccagaggtacaaggaggaactggtaccattccttctgaaatga

SEQ ID NO: 129937 - DNA, 474 bp, Homo sapiens; identical to SEQ ID NO: 126623

SEQ ID NO: 129938 - DNA, 719 bp, Homo sapiens
atggataaattcctcgacacatacactctcccaagactaaaccaggaagaagttgaatctctgaatagaccaataacaggatctgaaattgtggcaataatcaatagcttaccaaccaaaaagagtccaggaccagatggattcacagctgaattctaccagaggtacaaggaggaactggtaccattccttctgaaactattccaatcaatagaaaaagagggaatcctccctaactcattttatgaggccagcatcattctgataccaaagccaggcagagacacaacaaaaaaagagcattttagaccaatatccttgatgaacattgatgcaaaaatcctcaataaaatactggcaaaacgaatccagcagcacatcaaaaagcttatccaccatgatcaagttggcttcatccctgggatgcaaggctggttcaatatacgcaaatcaataaatgtaatccagcatataaacagagccaaagacaaaaaccacatgattatctcaatagatgcagaaaaagcctttgacaaaattcaacaacccttcatgctaaaaactctcaataaattaggtccctggaaaccggaggcatggcatgctgtgcagggccacacggggaagcaccagggctgtcaggagacagacagagtgaaggggaaacatggacaagagccttcattgtggtttccacaggaagaaattagcaaggcagg

SEQ ID NO: 129939 - DNA, 3552 bp, Homo sapiens; identical to SEQ ID NO: 126630

SEQ ID NO: 129940 - DNA, 321 bp, Homo sapiens
atggataaattcctcgacacatacactctcccaagactaaaccaggaagaagttgaatctctgaatagaccaataacaggagctgaaattgtggcaataatcaatagcttaccaaccaaaaagagtccagcaccagatggattcacagctgaattctaccagagatacaaggaggaactgattcgggttttcagaccacccaactactctggtaccattgctttggccctgttagtgtcgcttgttggaggtttgctttatttgagaaggaacaacttggagttcatctataacaagactggttgggccatggtgtctctg

SEQ ID NO: 129941 - DNA, 362 bp, Homo sapiens
atggatacattcctggacacatacactctcccaagactaaaccaggaagaagttgaatctctgaatagaccaataacaggagctgaaattgtggcaataatcaatagcttaccaaccaaaaagagtccaggaccagatggatccatagctgaattctaccagaggtacaaggaggaactgtgcccagactccagtggcagccccactactgttcaggggcacgaggttctcaaggtggaggcagggccacaagaggggcagcagaaaggctctgccagtggctggcacaccattacttctgctcatgtttctgtgttcagtgacagtcccatggcaaaccctacagtcagcatagctgggag

SEQ ID NO: 129942 - DNA, 516 bp, Homo sapiens
atgtgggaaagtttggaacctcctagagacttgttgagtggctttgacaaaaatgttgatagtgatatgaacaataaggtccggtctggggtggtctcagatggagatgaggaacatgttgggaactggagcaaagaaatacaaactaccatcagagaatactataaacacctctacgcaaataaactagaaaatctagaagaaacggataaattcctcgacacatacactctcccaagactaaaccaggaagaagttgaatctctgaatagaccaataacaggagctgaaattgtggcaataatcaatagcttaccaaccaaaaagagtccaggaccagatggattcacagccgaattctaccagaggtacaaggaggaactgcatataaacagagccaaagacaaaaaccacatgattatctcaatagatgcagaaaaggcctttgacaaaattcaacaacgcttcatgctaaaaactctcaatgaggtattgatgggacgtatctcaaaataa

SEQ ID NO: 129943 - DNA, 1671 bp, Homo sapiens
atgttaaagggatcaattcaacaagaagagctaactgtcctaaatatatatgcacccaatacaggagcacccagatgcataaagcaagtcctgagtgacgtacaaagagacttagactccaacacattaataatgggagactttaacaccccactgtcaacattagacagatcaacgagacagaaagtcaacaaggatacccaggaattgaactcagctctgcaccaggcggacctaatagacatctacagaactctccaccccaaatcaacagaatatacatttttttcagcaccacaccacacctattccaaaattgaccacatacttggaagtaaagctctcctcagcaaatgtaaaagaacagaaattataacaaactctctctcagaccacagtgcaatcaaactagaactcaggattaagaatctcactcaaaaccgctcaactacatggaaactgaacaacctgctcctgaatgactactgggtacataacgaaatgaaggcagaaataaagatgttctttgaaaccaaggagaacaaagacacaacataccagaatctctgggacgcattcaaagcagtgtgtagagggaaatttatagcactaaatgcctacaagagaaagcaggaaagatcaaaaattgacactctaacatcacaattaaaagaactagaaaagcaagagcaaacacattcaaaagaaatacaaactaccatcagagaatactacaaacacctctacacaaataaactagaaaatctagaagaaatggataaattcctcgacacatacactctcccaagactaaaccaggaagaagttgaatctctgaatagaccaataacaggatctgaaattgtggcaataatcaatagcttaccaaccaaaaagagtccaggaccagatggattcacagctgaattctaccagaggtacaaggaggaaatgcatataaacagagccaaagacaaaaaccacatgattatctcaatagatgcagaaaaggcctttgacaaaattcaacaacccttcatgctaaaaactctcaataaattaggtattgatgggacatatttcaaaataataagagctatctatgacaaacccacagtcaatatcatactgaatgggcaaaaactggaagcattccctttgaaaactggcacaagacagggatgccctctctcaccactcctattcaacatagtgttggaagttctggccagagcaataaggcaggagaaggaaataaagggtattcaattaggaaaagaggaagtcaaattgtccctgtttgcagatgacatgattgtatatctagaaaaccccattgtctcagcccaaaatctccttaagctgataagcaacttcagcaaagtctcaggatacaaaatcaatgtgcaaaaatcacaagcattcctatacaccaacaacagacaaacagagagccaaatcatgagtgaactcccattcacaattgcttcaaagagaataaaatacctaggtatccaatttacaagggatgtgaaggacctcttcaaggagaactacaaacctgctcaaggaaataaaagaggatacaaacaaatggaagaacattccatgctcatgggtaggaagaatcaatatcgtgaaaatggccatactgcccaaggtaatttatag

SEQ ID NO: 129944 - DNA, 1593 bp, Homo sapiens; identical to SEQ ID NO: 121955

SEQ ID NO: 129945 - DNA, 1177 bp, Homo sapiens
atggtaaagggatcaattcaacaagaagagctaactatcctaaatatatatgcactcaatacaggagcacccagattcataaagcaagtcctgagcgacctacagagagacttagactcccacacattaataatgggagactttaacaccccactgtcaacattagacagatcaatgagacagaaagtcaacaaggatacccaggaattgaactcagctctgcaccaagcggacctaatagacatctacggaactctccacccccaatcaacagaatatacatttttttcagcaccataccacacctattccaaaattgaccacatacttggaagtaaagctctcctcagcaaatgtaaaagaagagaaattataataaactatctctcagaccacagtgcaatcaaactagaactcaggattaagaatctcactcaaaacctctcaactacatggaaactgaacaacctgctcctgaatgactacttggtacataacgaaatgaaggcagaaataaagatgttctttgaaaccaacgagaacaaagacacaacataccagaatctctgggacacattcaaagcagtgtgtggagggaaatttatagcactaaatgcccacaagagaaagcaggaaagatccaaaattgacaccctaacatcacaattaaaagaactagaaaagcaagagcaaacacattcaaaagctagcagaaggcaagaaataactaaaatcagagcagaactgaaggaaatagagacacaaaaaacccttcaaaaaatgaatccaggagctgaaatacaaactaccatcagagaatactacaaacacctctacacaaataaactagaaaatctagaagaaatggataaattcctcgacacatacactctcccaagactaaaccaggaagaagttgaatctctgaatagaccaataacaggatctgaaattgtggcaataatcaatagcttaccaaccaaaaagagtccaggaccagatggattcacagccgaattctaccagaggtacaaggaggaactggcacagcaatctttacaagtcagagctgtgcatgaggacactcactgcagcagcagcagcaacttggattcactacctttgttaggttttgctcagtctgaaagcaagataagtggccttggctacagtcagg

SEQ ID NO: 129946 - DNA, 3666 bp, Homo sapiens; identical to SEQ ID NO: 116259

SEQ ID NO: 129947 - DNA, 1998 bp, Homo sapiens
atgaaggcagaaataaagatgttctttgaaaccaacgagaacaaagacacaacataccagaatctctgggacacattcaaagcagtgtgtagagggaaatttatagcactaaatgcccacaacagaaagcaggaaagatccaaaattgacaccctaacatcacaattaaaagaactagaaaagcaagagcaaacatattcaaaagctagcagaaggcaagaaataactaaaatcagagcagaactgaaggaaatagagacacaaaaaacccttcaaaaaattaatgaatccaggagctggttttttgaaaggatcaacaaaattgatagaccactagcaagactaataaagaaaaaaagacaaaagaatcaaatggacacaataaaaaatgataaaggggatatcaccaccgatcccacagaaatacaaactaccgtcagagaatactacaaacacctctatacaaataaactagaaaatctagaagaaatggataaattcctcgacacatacactctcccaagactaaaccaggaagaagttgaatctctgaatagaccaataacaggagctgaaattgtggcaataatcaatagcttaccaaccaaaaagagtccaggaccagatggattcacagccgaattctaccagaggtacaaggaggaactgcctggcagagacacaaccaaagaagagaattttagaccaatatccttgatgaacattgatgcaaaaatcctcaataaaatactggcaaaccaaatccagcagcacatcaaaaagattatccaccatgatcaagtgggcttcatccctgggatgcaaggctggttcaatatacgcaaatcaataaatgtaatccagcatataaacagagccaaagacaaaaaccacatgattatgtcaatagatgcagaaaaggcctttgacaaaattcaacaacccttcatgctaaaaactctcaataaattaggaataaaatacctaggaatccaacttacaagggatgtgaaggacctcttcaaggagaactacaaaccactgctcaaggaaataaaagaggatacaaacaaatggaataacattccatgctcatgggtaggaagaatcaatatcgtgaaaacggccatactgcccaaggtaatttatagattcaatgccatccccatcaagctaccaatgcctttcttcacagaattggaaaaaactactttaaagttcatatggaaccaaaaaagagcctgcatcaccaactcaatcctaagccaaaagaacaaagctggaggcatcacactacctgacttcaaactatactacaaggctacagtaaccaaaacagcatggtactggtaccaaaacagaaatatagatcaatggaacagaacagagccctcagaaataacgccgcatatctacaactatgtgatctttgacaaacctgacaaaaacaagaaatggggaaaggattccctatttaataaatggtgctgggaaaactggctagccatatgtagaaagctgaaactagatcccttccttacaccttatacaaaaatcaattcaagatggattaaagacttaaacgttagacctaaaaccataaaaaccctagaagaaaacccaggcagtaccattcaggacataggcatgggcaaggacttcatgtctaaaacaccaaaagcaatggcaacaaaagacaaaattgacaaatgggatctaattaaactaaagagcttctgtacagcaaaagaaactaccatcagagtgaacaggcaacctacagaatgggagaaaatttttgcaacctactcatctgacaaagggctaataatatccagaacctacaatgaactcaaacaaatttacaagaaagaaacaaacaactccatcaaaaagtgggtgaaggatatgaacagacacttctcaaaagaagacatttatgcagccaaaaaacacatgaaaaatttctcatcatcactggccatcagagaaatgtaa

SEQ ID NO: 129948 - DNA, 4194 bp, Homo sapiens
atggtaaagggatcaattcaacaagaagagctaactatcctaaatacatatgcagcccatacaggagcaccaagactcataaagcaagtcctgagtgacctacaaagagacttagactcccacacaataataatgggagactttaacaccccactgtcaacattagacagatcaacgagacagaaagttaacaaggatacccaggaattgaagtcagctctgcaccaagcggacctaacagacatctacagaactctccaccacaaatcaacagaatatacatttttttcagcaccacaccacatctattccaaaattgaccacatactgggaagtaaagctctcctcagcaaatgtaaaagaacagaaattataacaaactatctctcagaccacagtgcaatcaaactagaactctggattaagaatctcactcaaaaccactcaactacatgggaactgaacaacctgctcctgaatgactactgggtacataacgaaatgaaggcagaaataaagatgttctttgaaaccaatgagaacaaagacacaacataccataatctctgggacacattcaaagcagtgtgtagagggaaatttataccactaaatgcccacaagagaaagcaggaaagatccaaaattgacaccctaacatcacaattaaaagaactagaaaagcaagagcaaacacattcaaaagctagcagaaggcaagaaataactaaaatcagagcagaactgaaggaaatagagacacaaaaaacccttcaaaaaattaatgaatccaggagctggttttttgaaaggatcaacaaaattgatagactgctagcaagactaataaagaaaaaaagagagaagaatcaaatagatgcaataaaaaatgataaaggagatatcaccaccgatcccacagaaatacaaactaccatcagagaatactgcaaacacctctatgcaaataaactagaaaatctagaagaaatggataaattcctggacacatacactctcccaagactaaaccaggaagaagttgaatctctgaatagaccaataacaggagctgaaattgtggcaataatcaatagcttaccaaccaaaaagagtccaggaccagatggattcacagccaaattctaccagaggtacaaggaggaactggtaccattccttctgaaactattccaatcaatagaaaaagagggaatcctccctaactcattttatgaggccagcatcattctgataccaaagccaggaagagacacaacaaaaaaagagaattttagaccaatatccttgatgaacattgatgcaaaaatcctcaataaaaaactggcaaaacgaatccagcaacacatcaaaaagcttatccaccatgatcaagtgggcttcatccctggaatgcaaggctggttcaatatacgcaaatcaataaatgtaatccagcatataaacagagccaaagacaaaaaccatatgattatctcaatagatgcagaaaaagcctttgacaaaattcaacaacccttcatgctaaaaactctcaataaattagagaataaaatacctaggaatccaccttacaagggatgtgaaggacctcttcaaggagaactacaaaccactgctcaaggaaataaaagaggatacaaacaaatggaagaacattccatgctcatgggtaggaagaatcaatatcgtgaaaatggccatactgcccaagaattggaaaaaactactttaaagttcatatggaaccaaaaaagagcccgcatcgccaagtcaatcctaagccaaaagaacaaagctggaggcatcacactacctgacttcaaactatactacaaggctacagtaaccaaaacagcatgccttatagactgctttttgttggactcggctcctctcaatgtttctatgtctcctactggagactttctggcaacttcccatgtggaccaccttggaatttatctatggtccaatatttccctgtattcagttgtttcattacggccacttcctgcagattatgtcccttcaatagtcatgcttcctggtacttgtcaaacccaagatgtagaagtatcagaagaaacagtagaaccaagtgatgaattgatagaatatgattcgccagaacagttgaatgagcaattggtgactctttcacttcttcctgaatcacgatggaaaaaccttcttaaccttgatgttattaagatagtacatacctttaagggtcataaggcagaaatccatttcttgcaaccctttggagaccacattatctctgttgatactgatggcattcttattatttggcacatatattcagaagaagaatacctgcagttgacttttgataaatcagtatttaaaatttctgcaattttgcatccaagtacctacttgaataaaatacttctgggcagtgaacaaggaagcctgcagttgtggaatgtaaaatccaaccagaaatacccaatcaggcagacatttatccctgcgggctatttgttgggtgcacatgggttgaagactcaggcaccagccgtggatgttgttgctattggtcttatgtcaggtcaagttatcattcacaacattaaatttaatgaaacattaatgaagtttcgtcaagactggggacccattacttcaatttcatttcgcacagatggtcatccagtaatggcagctggaagcccatgtggccatattggactctgggatctagaagacaaaaaattaatcaaccaaatgagaaatgcacactctacagcaattgccggactgacatttctccatagagagccacttcttgtcacaaatggcgctgacaatgctcttaggatatggatatttgatggtcctacaggtgaaggccgacttttgagattcagaatgggtcatagtgctcctcttaccaatatcagatattatggacagaatggacagcagattctaagtgcaagattaataaataaaaagagagttaaacgtaaaggacttcagaataccatgtcagtgagacttccacccatcacaaagtttgcagcagaggaagctcgtgaaagtgactgggatggtatcattgcttgccatcaaggtaagctatcttgctcaacctggaattatcagaaatctacaataggcgcttactttctcaagccaaaagagttgaagaaagatgacataactgcaacaatgaggaaagataggaccaagaaggtcacacaattaaatgattataatcaagtcataactggattaaaatttaatgcagatgacactgctctcaaccttctgaaagaatcaggcccatcaggaattgaaacagagctgcgaagcttgtctcctgattgtggtgggtccatagaagttatgcagagcttcttgaaaatgattgggatgatgctggacagaaagcgtgattttgagttagcccaggcataccttgcattgtttctaaagctggtgaaggattcttctgaacccctaccctacctcctcaagctatctttgatattggcaggatggggaatacacattacagaagtgcaggatttgactctgggcatgaaagatggcagcagccctagggtgaccacaagctatacacctcatggtctttttggtgaaagaagggacaagttgaccctttgcccattttcttatggacctcacccatcacaccagcaaggtcataggaccctggccttgttccagatcatctgggacatgtcccactccccactttcactgtgtagaaaacagagacttgtttgcgtggccccaatacccataaggaaaccaggctttaggcccaggggagcagtggaggttcagaaacttagtctggttgcagtaagtaattctgttccacaggatatctgctgtatggcagctgatggcagattagtctttgctgcttatggaaatgttttctctgcatttgcccgtaataaagagaaaaagaataaaccaaaggaaccacccaaagtacccaaatcagcaccatttttcattccaacaattcctggccttgtacccagatatgctgcacctgaacaaaataatgatccccagcagatcagtggcagcatcagattctcagattctcgtaggagcataaaccctattgtgcactgtgcatttgaggttgtgcactccttatga

SEQ ID NO: 129949 - DNA, 1659 bp, Homo sapiens; identical to SEQ ID NO: 119496

SEQ ID NO: 129950 - DNA, 1743 bp, Homo sapiens
atgaaatctgcccaataccggaagtggtgctggcagcgccagaagatttggtcgactctgcgcagcggcttagcgaggtatgtcagtggctggcggaagctgcaccgacgtaaaaagacgagtttcaggataaagagggagatctaccattatcgggttatttttctctcttcgcctacaggagtgcgcatgtgggatgtcattgatttatcgcgctggcagtttgctctgaccgcgctgtatcactttttatttgtaccccttaccctggggctgatttttttgctggctattatggaaaccatttacgtggtcaccggcaaaacaatctaccgcgatatgacgcgcttctggggtaagctcttcggtatcaattttgctcttggcgtggctaccggcctgaccatggagtttcagtttggtactaactggtcattctattccaactatgtgggcgatatttttggcgcaccgctggcgatggaagcatgtggtattgaaatcgtcatgtgcggtttggatgtcaccaatcaggcaatattaactcctgactatctctctacactgccgcagttaaaccgtaccgggaaaatgcttcacgccctgtttagccactaccgtagcggcagtatgcaaagcggcttgcgaatgcacgatctctgcgccatcgcctggctggtgcgcccggacctgttcactctcaaaccctgttttgtggcagtggaaactcagggcgaatttacctcaggcacgacggtggttgatatcgacggttgcctgggcaagccagccaatgtacaggtggcattggatctggatgtgaaaggcttccagcagtgggtggctgagagaatagctatgcatgatgcaaacatccgcgttgccatcgcgggagccggggggcgtatgggccgccagttgattcaggcggcgctggcattagagggcgtgcagttgggcgctgcgctggagcgtgaaggatcttctttactgggcagcgacgccggtgagctggccggagccgggaaaacaggcgttaccgtgcaaagcagcctcgatgcggtaaaagatgattttgatgtgtttatcgattttacccgtccggaaggtacgctgaaccatctcgctttttgtcgccagcatggcaaagggatggtgatcggcactacggggtttgacgaagccggtaaacaagcaattcgtgacgccgctgccgatattgcgattgtctttgctgccaattttagcgttggcgttaacgtcatgcttaagctgctggagaaagcagccaaagtgatgggtgactacaccgatatcgaaattattgaagcacatcatagacataaggcactgggaatacaatgcgcaggttacagctactggcattcgcatcaggttgccgctgacgacaaagcgcagcaacgcgtcgtgccctcaccggtcttctacgcgctggataccttcacggtcaatttgggcgatgcggatcgcgtactttatatcggcataaccctgcgcctgaaagatgaagctacccgctcgcggctgagtgagtatttgccggaagtccgtagtcgcttgctgttactgttttcgcgtcaggatgctgccgtactggcgacagaagaaggcaagaaaaacctgattgccgagattaaaaccacactttccaccccgcttgttgccgggcaaccgaaacaggatgtcaccgacgtgctgtataccgcttttattctgcgataa

SEQ ID NO: 129951 - DNA, 2779 bp, Homo sapiens
atggataaattcctggacacatacactctcccaagactaaaccaggaagaagttgaatctctgaatagaccaataacaggagctgaaattgtggcaataatcaatagcttaccaaccaaaaagagtccaggaccagatggattcacagctgaattctaccagaggtacaaggaggagctgatagggtggcttagagaaagtgtgtcaaaaatatgtctaaaatttgatcaccaggttcaggtgatcactggccgcctgataatccgcttccagatcgccttcggcaccgttgtgctctgccagctcacgcgccatatcgacgtgtttgtaggcaagcggcttgcgaatgcacgatttgcgccatcgctgggtggtgcgcccgacctgttcactctcaaaccatgttttgtggcagtggaaactcagggcgatttacctcaagccacgacggtggttgatatcgacggttgcctgggcaagccagccaatgtacaggtggcattggatctggatgtgaaaggcttccagcagtgggtggctgagagaatagctatgcatgatgcaaacatccgcgttgccatcgcgggagccggggggcgtatgggccgccagttgattcaggcggcgctggcattagagggcgtgcagttgggcgctgcgctggagcgtgaaggatcttctttactgggcagcgacgccggtgagctggccggagccgggaaaacaggcgttaccgtgcaaagcagcctcgatgcggtaaaagatgattttgatgtgtttatcgattttacccgtccggaaggtacgctgaaccatcttctgccccgaattacacttaaaacgactcaacagcttaacgttggcttgccacgcattacttgactgtaaaactctcactcttaccgaacttggccgtaacctgccaaccaaagcgagaacaaaacataacatcaaacgaatcgaccgattgttaggtaatcgtcacctccacaaagagcgactcgctgtataccgttggcatgctagctttatctgttcgggcaatacgatgcccattgtacttgttgactggtctgatatccgtgagcaaaaacggcttatggtattgcgagcttcagtcgcactacacggtcgttctgttactctttatgagaaagcgttcccgctttcagagcaatgttcaaagaaagctcatgaccaatttctagccgaccttgcgagcattctaccgagtaacaccacaccgctcattgtcagtgatgctggctttaaagtgccatggtataaatccgttgagaagctgggttggtactggttaagtcgagtaagaggaaaagtacaatatgcagacctaggagcggaaaactggaaacctatcagcaacttacatgatatgtcatctagtcactcaaagactttaggctataagaggctgactaaaagcaatccaatctcatgccaaattctattgtataaatctcgctctaaaggccgaaaaaatcagcgctcgacacggactcattgtcaccacccgtcacctaaaatctactcagcgtcggcaaaggagccatggattctagcaactaacttacctgttgaaattcgaacacccaaacaacttgttaatatctattcgaagcgaatgcagattgaagaaaccttccgagacttgaaaagtcctgcctacggactaggcctacgccatagccgaacgagcagctcagagcgttttgatatcatgctgctaatcgccctgatgcttcaactaacatgttggcttgcgggcgttcatgctcagaaacaaggttgggacaagcacttccaggctaacacagtcagaaatcgaaacgtactctcaacagttcgcttaggcatggaagttttgcggcattctggctacacaataacaagggaagacttactcgtggctgcaaccctactagctcaaaatttattcacacatggttacgctttggggaaattatgaggggatctctcagcacataatatacttgctgtcagaagtccattttacacagataacatgttgcattctctttgtatgatatacctccctgcttcgacttttgtctacaggaaagattcgaatagatttaccgaaactagcagacacaaactccttcccagtgggagagtaatccacatcaagcactgcagatacatgatccatatggaccattacaggagtgtccagtgcacgcatatcaaaagtatataagttattatcttcatttgctgctgtaaaaatgaaagcttccatagggttccaacagattgtatttgttctcatatctaagataacctttttcaaaggagtagcttgcctcatatcgtacagtactatattcctgtcagatgcacaacttcccaagagaaatgtctcaattgggttaaatttaacactacttatactgtcaaatccccaggtcattgaacatataggattagttctttgttcatcccaaatgtctacttgctgtccacatgtggcaaaaacagcttctttccagtgatgatcaatcccagtatacactgtctttcctaatattgtatgtaatggctcttcctcgtctccatagcctggcccatccattttccactgcttcacagttttgtcatcaccaacctctctgtaagtccaacttggtttcgcggacataattgtccggattccggctcagcatcttcaccttcatctcggttgctcttccggccggactccacgaggtgtccgctaggagttccgcccaccgccacc

SEQ ID NO: 129952 - DNA, 2779 bp, Homo sapiens
atggggaaaaagcagaacagaaaaactggaaactctaaaaagcagagcacctctcctcctccaaaggaacgcagttcctcaccagcaatggaacaaagctggatggagaatgactttgttgagctgagagaagaaggcttcagacgatcaaattactctgagctacaggaggacattcaaaccaaaggcaaagaagttgaaaactttgaaaaaaatttagaagaatgtatgactagaataaccaatacagagaagtgcttaaaggagctgatggagctgaaaaccaaggctcgagaactacatgaagaatgtagaagcctcaggagccgatgcgatcaactggaagaaagggtatcagcaatggaagatgaaatgaatgaaatgaagcgagaagggaagtttagagaaaaaagaataaaaagaaatgagcaaagcctccaagaaatatgggactatgtgaaaagaccaaatctacatctgatgggtgtacctgaaagtgatggggagaatggaagcaagttggaaaacacgctgcaggatattatccaggagaacttccccaatctagcaagtactctctcagaccacagtggaataaaactggaaatcaactccaaaaggaaccctcaaaaccatgcgaatacatggaaattaagtaacctgctcctgaatgcacactgggtcaacaatgaaatcaagatgaaagttaaaaatttctttgaattgaacgataatagtgacacaatctatcaaaatttctcggatacagcaaaagcggtgctagaagaaaagttcctaggactaaatgcctacaccaaaaaacctgaaagagcacagatagagaaagagagaatcctccctaaatcattctatgaagccagtatcaccctaatacccaaaccacgcaaggacataacaaaaaaagaaaactacaaaccaatatccctgatgaacatagaggcaaaaatcctcaacaaaataatagttaaccaaatccaacagcatatcaaaaagataatccaccatgataaactgagtttcataccagggatgcaggggtggtttaatatatgtaagccagtaaatgtgattctccacataaacataattaaaaacaaaaatcatatgatcatctcaatagacacagaaaaagcatttggcaaaatgcagcatccctttatgattaaaaccttcagcaaaattggcacagaagggacataccttaaggtaatagaagccatctatgatagacccacagccaacattatactgaatggggaaaacttgaaagcactccccctgagaactagaccaagacaaggatgcccactttcaccacttttattcaacttagtactggcagtcctagccagagcaatcagacaagagaaagaaataaagggcatccaagtcagtaaagaggaagttaaactgtctctgtttgctgatgatatgattgtatacctagaaaaccctaaagcctcatccaaaaagcttccagaactaaacaaagacacaatataccagaatctctgggatgcattcaaagcagtatgtagagggaaatttacagcactaaatgcccacaagagaaagcaggaaagatccaaaattgacaccctaacatcacaattaaaagaactagaaaagcaagagcaaacacattcaaaagctatcagaagacaagaaataactaaaatcagagcagaactgaaggaaatagagacacaaaaaacccttcaaaaaattaatgaatccaggagctggttttttgaaaggatcaacaaaattgatagaccgctagcaagactaataaagaagaaaagagagaagaatcaaatagacacaataaaaaatgataaaggggatatcaccaccaatcccacagaaatacaaaccaccatcaggagaatactacaaacacctctacgcaaataaactagaaaatctagaagaaatggataaattcctcgacacatacactctcccaagactaaaccaggaagaagttgaatctctgaatagaccaataacaggctctgaaattgtggcaataatcaatagtttaccaaccaaaaagagtccaggaccagatggattcacagccgaattctaccagaggtacaaggaggaactgctgataagcaacttcagcaaagtctcagcatacaaaatcaatgtacaaaaatcacaagcattcttatacaccaacaacagacaaacagagagccaaatcatgagtgaactcccattcacaattgcttcaaagagaataaaatacctaggaatccaacttacaagggatgtgaaggacttcttccaggagaattacaaaccactgctcaaggaaataaaagaggatacaaacaaacggaagaacattccatgctcatgggtaggaagaatcaatatcgtgaaaatggccatactgcccaaggtaatttttagattcaatgccatccccatcaagctaccaatgcctttcttcacagaattggaaaaaactactttaaagttcatatggaaccaaaaaagagcccgcatcgccaagtcaatcctaagccaaaagaacaaagctggaggcatcacactacctgacttcaaactatactacaaggctacagtaaccaaaacagcatggtactggtaccaaaacagggatatagatcaatggaacagaacagagccctcagaaataatgccgcatatctacaactatctgatctttgacaaacctgagaaaaacaagcaatggggaaaggattccctttttaattaa

SEQ ID NO: 129953 - DNA, 4969 bp, Homo sapiens
atggctactctgatccccctactgtttcacaagcatcctcatctcacacaaagatatcaattcaacgtcagaggtggctgcccgacgagcaccagtgccattgctactctggatcctagaactgcagtgtttccactcatgtctgtttttcagacctcagctccatggccattttggggtttcactcatcagacaccagtgccacagccactgaaagtgaaaatccacagttctgcagacaccgctgctgatatccaggcaaacagggtctggagtggacctccagcaaactccaagagacctgcagctgaggaaggaaaactaacaaacagaaaggacatccacaccaaaaacccatctgtacgtcaccatcatcaaagaccaaaagtagataaaaccacaaagacggggaaaaaacagaggagaaaaactggaaactctaaaaagcagagcgcctgtcctcctccaaaggaacgcagttcctcaacagcaacggaacaaagctggacggagaatgactttgacaagttgagagaagaagtcttcagacaatcaaactactccgagctacaggaggaaattcaaaccaatggcaaagaagttaaaaactttgaaaaaaaattagatgaatgtataactagaataaccaatgcagagaagtgcttaatggagctgatggagctgaaagccaaggctcgagaactacgtgaagaatgcaaaagcctcaggagccaatgcaatcaactggaagaaagggatcaacaaaattgatagaccactagcaagactaataaagagaaaaagagagaagaatcaaatagacgcaataaaaattgataaaggggatatcaccaccgatcccacagaaatacaaactaccatcagagaatactacaaacacctctatgcaaataaactagaaaatctagaagaaatggataaattcctcgacacatacactctcccaagactaaaccaggaagaagttgaatctctgaatagaccaataacaggagctgaaattgtggcaataatcaatagcttaccaaccaaaaagagtccaggaccagatggattcacagctgaattctaccagaggtacaaggaggaactggtaccattccttctgaaactattccaatcaatagaaaaagagggaatcctccctaactcattttatgaggccagcatcatcctgataccaaagctgggcagagacacaaccaaaaaagagaattttagaccaatatccttgaggaacattgatgcaaaaatcctcaataaaatactggcaaaccgaatccagcagcacatcaaaaagcttatccatcatgatcgagtgggcttcatccctgggatgcaaggctggttcaacatacgcaaatcaataaatgtaatccagcatataaacagaaccaaagacaaaaaccacatgattatctcaatagatgcagaaaaggcctttgacaacattcaacaacccttcatgctaaaaactctcaataaattaggaatggatgggacatatctcaaaataagaagagctatctatgacaaacccacagccaatatcatactgaatgggcaaaaactggaagcattccctttgataactggcacaagacagggatgccctctctcaccactgctatacaacatagtgttggaagttctggccagggcaattaggcagaagaaggaaataaagggtattcaattaggaaaagaggaagtcaaattgtccctgtttgcagacgacatgactgtatatctagaaaaccccatcatatcagcccaaaatctccttcagctgataagcaacttcagcaaagtctcaggatataaaatcaatgtacaaaaatcacaagcattcttatacaccaataacagacaaacagagagccaaatcaagagggaactcccattcacaattgcttcaaagagaataaaatacttaggaatccaacttacaagggatgtgaaggacctcttcaaggaaaactacaaaccactgctcaatgaaataaaagaggatacaaacaaatggaagaacattccatgctcatgggtaggaagaatcaatattgtgaaaatggccatactgcccaaggtaatttatagattcaatgccatccccatcaagctaccaatgactttcttcacagaattggaaaaaactactttaacgctcatatggaaccaaaaaagagcccacatcgtcaagtcaatcctaagccaaaagaacaaagctggaggcatcacgctaccagacttcaaactatactacaaggctacagtaaccaaaacagcatggtactggtaccaaaacagagatatagatcagtggaacagaacagagccctcagaaataatgccacatatctacaactatctgatctttgacaaacctgagaaaaacgagcaatggggaaaagattccctatttaataaatggtgctgggaaaactggctagccatatgtagaaagctcaaactggatcccttccttacaccttatacaaaaattaattcaagatggattaaaggcttaaatgttagacctgaaaccataaaaaccctagaagaaaacctaggcattaccattcaggacataggcatgggcaaggacttcatgtctaaaacaccaaaaacaatggcaacaaaagccaaaattgacagatgggatctcattaaactaaagaacttctgcacagcaaaagaaactaccatcagagtgaacaggcaaactacaaaatgggagaaaattttcacaacctactcatctgaaaaagggctaatatccagaatctacaatgaactcaaacaaatttacaagaagaaacaaacaaccccaacaaaaagaggtattccaaaagaaagcattattgtaataggagatgacagctccatgcatgttaatgcccctgaaggccttccagtgggacaagatttggaggttgaagatggtgatattgattatcctgattctgatggcagctcctcaccagctatggaacaaagctggacagagaaggactttgatgaattgacagaagtaggcttcagaagaataaacagtgtggagaagatgttaaatgacctgatggagctgaaaaccatggcacaagaactttgtgacacatgcacaagtttcagtagcagatttgatcaagtggaagaaaggatatcagtgattgaatatcaaattaatgaaataaagcaagaggaggagtttagagaaaaaagagtaaagagagacaaacaaagcctccaagaaatatgggacaatgtgaaaagaccaaatctatgtttgattggtatacctgaaagtgatggggagaatggaaccaagttggaaaacacttttcaggatattatccaggagaacttccccaacctagcaaggcaggccaacattcaaattcaggaaatacagaaaataccacaaagatactccttgagaagagcaaccccaagacacataattgtcagattcactaaggttgaaatgaaggaaaaaatgttaaaagcagccagagagaaagcactaaatgcccacaagagaaagcaggaaagatccaaaattgacaccctaacatcacaattaaaagaactagaaaagcaagagcaaacacattcaaaagctagcagaaggcaagaaataactaaaatcagagcagaactgaaggaaatagagacacaaaaaacccttcaaaacattaatgaatccaggagctggttttttgaaagaatcaacaaaattgatagaccgctagcaagactaataaagaaaaaaagagagaatcaaatagacgcaataaaaaatgataaaggggatatcaccaccgatcccacagaaatacaaactaccatcagagaatactacaagcacctctacgcaattaaactagaaaatctagaagaaatggataaattcctcgacacatacactctcccaagactaaaccaggaagaagttgaatctctgaatagaccaataacaggagctgaaattgtggcaataatcaatagcttaccaaccaaaaagagtccaggaccagatggattcacagccgaattctaccagaggtacaaggatgaactgataccattccttctgaaactattccaatcaatagaaaaagagggaatcctccctaactcattttatgaggccagcatcatcctgataccaaagccgggcagagacacaaccaaaaaagagaattttagaccaatatccctgatgaacatcgatgcaaaaatcctcaataaaatactggcaaacggaatccagcagcacatcaaaaagcttatccaccatgatcaactgataagcaacttcaacaaagtctcaggatacaaaatcaatgtacaaaaatcacaagcattcttatacaccaataacagacaaacagagagccaaatcatgagtgaactcccattcgcaattgcttcaaagagaataaaatacctaggaatccaccttacaagggacgtgaaggacctcttcaaggagaactacaaaccactgcttaaggaaataaaagaggatacaaacaaatggaagaacattccatgctcatgggtaggaagaatcaatatcgtgaaaatggccacactgcccaagatttttaacaaaatggcacggaaaggggcttccaagccagaaagccttggcacatcaggtgagcctttgacacactgcctgagcagcctacgggctgtcccatctggaactggtgctagagttagggaagcttcaggaagagaccgtgggatctacgcagctgttctgtttttccttcctgagagtgtaaagggattcagggtctctgctcttcacgacgtcatccatagagagtctctctcatatacatctaaggtgatcttcaaaataacccacgaaccagggatcatttacaaacgggaaattgggaagaaaactaacatttacagagttaaataa

SEQ ID NO: 129954 - DNA, 2047 bp, Homo sapiens; identical to SEQ ID NO: 124353

SEQ ID NO: 129955 - DNA, 3288 bp, Homo sapiens; identical to SEQ ID NO: 123249

SEQ ID NO: 129956 - DNA, 3684 bp, Homo sapiens
atgggagactttaacaccccactgtcaacattagacagatcaacgagacagaaagtcaacaaggatacccaagaattgaactcagctctgcaccaggtggacctaatagacatctacagaactctccaccccaaatcaacagaatatacatttttttcagcaccacaccacacctattccaaaattgaccacatggttggaagtaaagctctcctcagcaaatgtaaaagaacagaaattataacaaactatctctcagaccacagtgcaatcaaactagaactcaggattaagaatctcactcaaagccgctcaactacatggaaactgaacaacctgctcctgaatgactactgggtacataacgaaatgaaggcagaaataaagatgttctttgaaaccaacgagaacaaagacacaacataccagaatctctgggacacattcaaagcagtgtgtagagggaaatttatagcactaaatgcccacaagagaaagcaggaaagatccaaaattgacaccctaacatcacaattaaaagaactagaaaagcaagagcaaacacattcaaaagctagcagaaggcaagaaataactaaaatcagagcagaactgaaggaaatagagacacaaaaaacccttcaaaaaatcagtgaatccaggagctggttttttgaaaggatcaacaagattgatagaccactagcaagactaataaagaaaaaaagagagaagaatcaaatagacacaataaaaaatgataaaggggatatcaccaccgatcccacagaaatacaaactaccatcagagaatactacaaacacctctacgcaaataaactagaaaatctagaagaaatggataaattcctcaacacatacactctcccaagactaaaccaggaagatgttgaatctctgaatagaccaataacaggagctgaaattgtggcaataatcaatagtttaccaaccaaaaagagtccaggaccagatggattcacagctgaattctaccagaggtacaaggaggaactgccgggcagagacacaaccaaaaaagacaattttagaccaatatccttgaggaacattgatgcaaaaatcctcaataaaataccggcaaaacgaatccagcagcacatcaaaaagcttatccagcatgatcaagtgggcttcatccctgggatgcaaggctggttcaatatacacgaatcaatatatgtaatccagcatataaacagaacaaaagacaaaaaccacatgattatctcaatagatgcagaaaaggcctttgacaaaattccgcagcccttcatgctaaaaactctcaataaattaggtattgatgggacgtatttcaaaataataagagctatctatgacaaacccacagccaatatcatactgaatgggcaaaaactggaagcattccttttgaaaactggcacaagacaggtatgccctctctcaccactcctattcaacatagtgttggaagttctggccagggcaattaggcaggagaaggaaataaagggtattcaattaggaaaagaggaagtcaaattgtccctgtttgcagacgacatgattgtatatctagaaaacgccattgtctcagcccaaaatctccttaagctgataagcaacttcagcaaagtctcaggacacaaaatcaatgtacaaaaatcacaagcattcttatacaccaacaacagacaaacagagagccaaatcatgagtgaactcccattcacaattgcttcaaagagaataaaatacctaggaatccaacttacaagggatgtgaaggacctcttcaaggagaactacaaaccactgctcaaggaaataaaagaggatacaaacaaatggaagaacattccatgctcatgggtaggaagaatcaatatcgtgaaaatggccatactgcccaaggtaatttacagattcaatgccatccccataaagctaccaatgactttcttcacagaattggaaaaaactactttaaagttcatatggaaccaaaaaagagcccgcatcaccaagtcaatcctaagccaaaagaacaaagctggaggcatcacactacctgacttcaaactatactacaaggctacagtaaccaaaacagcatggaccccaaatagctgctatatcaccagcattttttcaccttccacggaggaagagtggaaaggacaaagagcagtgatgacccctcacaacccatcagtcagaatactgccacttggccccaccaagaacaacaaggttattttatcgggggacatgggctggtgtggaacaaatgggacacaggagcttctgcaagctatatacctgaacgaatatggcaacatgaccaaagcactgacccagatcttcacagacaaaacgggtgatggccttaagctattgatggcagcggcggcccatctggagtggctgctgccaagatgccagctgcagtggggtgggaggtgcagccagggctgcatgctcccagtagccggcaggagctgggaacaggtggaagccccaaccccttccaagttggaggggcaggaatccggccctcttgggtgcagctgcagccggccacctagccatggctgcagacccaggcatctctgcactctcagtgggccggggaagcccccacgtccgtgcaggctgggaactcccattggctggcctctccctgctcacagcgcacaatccgatttcagaccaaagttgtggccaagcccaggtgctgtcaagaccctggcaggtgtgcttgactcagggcacgcggacaagcagcccctgctgtctcagcacgaaaaccgaaaggaagcaggggggcgagaaatacaaactaccatcagagaatactacaaacacctctatgcaaataaactagaaaatctagaagaaatggataaattcctcgacacatacactctcccaagactaaaccaggaagaagttgaatctctgaatagaccaataacaggagctgaaattgtggcaataatcaatagcttaccaaccaaaaagagtccaggaccagatggattcacagccaaattctaccagaggtacaaggaggaactggtaccatttcttctgaaactatgccaatcaacagaaaaagagggaatcctccctaactcattttatgagaccagcatcatcctgataccaaagccgggcagagacacaatgaaaaaagagaattttagaccaatatcctggatgaacattcatgcaaaatcctcaataaagatactggcaaatcgaatccagcagcacatcaaaaagcttatccaccatgatcaagtgggcttcatccctgggatgcaaggctggttcaatatatgcaaatcaataaatgtaatccagcatataaacagaaccaaagacaaaagccacatgattatctccatagatgcagaaaaggcctttgacaaaattaaacaacacttcatgctaaaaactgtcaataaattaggtattgatgggatgtatttcaaaataataagagctatctatgacaaacccacagacaatatcatactgaatgggcaaaaactggaagcattccctttgaaaactggcacaagacatgggatgccctctctcaccactcctattcaacatagtgttggaagttctggccagtgcaattag

SEQ ID NO: 129957 - DNA, 1854 bp, Homo sapiens
atgaaggcagaaataaagacgttctttgaaaccaacgagaacaaagacacaacataccagaatctctgggacgcattcaaagcagtgtgtagagggaaatttacagcactaaatgcccacaagagaaagcaggaaagatccaaaattgacaccctaacatcacaattaaaagaactagaaaagcaagagcaaacacattcaaaagctagcagaaggcaagaaataactaaaatcagagcagaactgaaggaaatagagacacaaaaagcccttcaaaaaattaatgaatccaggagctggtgttttgaaaagatccacaaaatagatagaccgctagcaagactaataaagaaaaaaagagagaagaatcaaatagacgcaataaaaaatgataaaggggatatcaccaccgatcccacagaaatacaaactaccatcagagaatactacaaacacctctacgcaaataaactagaaaatctagaagaaatggataaattcctcgacacatacactctcccaagactaaaccaggaagaagttgaatctctgaatagaccaataacaggatctgaaattgtggcaataatcaatagcttaccaaccaaaaacagtccaggaccagatggattcacagccgaattctaccagaggtacaaggaggagctgagaataaaatacctaggaatccaacttacaagggatgtgaaggacctcttcaaggagaactacaaaccactgctcaaggaaataaaagaggatacaaacaaatggaagaacattccatgctcatgggtaggaagaatcaatatcgtgaaaatggccatactgcccaaggtaatttacagattcaatgccatccccatcaagctaccaatgactttcttcacagaattggaaaaaactactttaaagttcatatggaaccaaaaaagagcccacatcgccaagtcaatcctaagccaaaagaacaaagctggaggcatcacactacctgacttcaaactatactacaaggctacagtaaccaaaacagcatggtactggtaccaaaacagagatatagatcaacggaacagaacagagccctcagaaataatgccacatatctacaactatctgatctttgacaaacctgagaaaaacaagcaatggagaaaggattccctatttaataaatggtgctgggaaaactggctagccatatgtagaaagctgaaactggatcccttccttacaccttatacaaaaatcaattcaagatggattaaagacttaaacgttagacctaaaaccataaaaaccctagaagaaaacctaggcattaccattcaggtcataggcatgggcaaggacttcatgtctaaaacaccaaaagcaatggcaacaaaagccaaaattgacaaatgggatctaattaaactaaagagcttctgcacagcaaaagaaactaccatcagagtgaacaggcaacctacaaaatgggagaaaattttcgcaacctactcatctgacaaagggctaatatccagaatctacaatgaactcaaacaaatttacaagaaaaaaacaaaccaccccatcaaaaagtggacgaaggacatgaacagacacttctcaaaagacgacatttatgcagccaaaagacacatgaaaaaatgctcatcatcactggccatcagagaaatgcaaatcaaaaccacaatgagataccatctcacaccagttagaatggcaatcattaaaaagtcaggaaacaacaggtgttggagaggatgtggagaaataggaacacttttacactgttggtgggactgtaaactagttcaaccattgtggaagtcagtgtggtga

SEQ ID NO: 129958 - DNA, 2718 bp, Homo sapiens
atgggagactttaacaccccactgtcaacattagacagatcaatgagacagaaagtcaaaaaggatacccaggaattgaactcagctctgcaccaagcagacctaatagacatctacagaactctccaccccaaatcaacagaatatacatttttttcagcaccacaccacacctattccaaaattgaccacatacttggaagtaaagctctcctcagcaaatgtaaaagaacagaaattataacaaactatctctcagacggcagtgcaatcaaactagaactcaggattaagaatctcactcaaaaccgctcaactacatggaaactgaacaacctgctcctgaatgactactgggtacctaacgaaatgaaggcagaaataaagatgttctttgaaaccaacgagaacaaagacacaacataccagaatctctgggacgcattcaaagcagtgtgtagagggaaatttatagcactaaatgcccacaagagaaagcaggaaagatccaaaattgacaccctaacatcacaattaaaagaactagaaaagcaagagcaaacacattcaaaagctagcagaaggcaagaaataactaaaatcagagcagaactgaaggaaattggggacacaaaaaaaccccttcaaaaaattaatgaatcccaggagctgggttttttgaaaggatcaacaaaattgatagaccgcttagcaaggacttaataaagaaaaaaagagagaagaatcaaatagacgcaataaaaaatgataaaggggatatcaccaccgatctcacagaaatacaaactaccatcagagaatactacaaacaactctacacaaataaactagaaaatctagaagaaatggataaattcctcaacacatacactctcccaagactaaaccaggaagaagttgaatctctgaatagaccaataacaggatctgaaattgtggcaataatcaatagcttaccaaccaaaaagagtccaggaccagatggattcacagccaaattctaccagaggtacaaggaggaactgcatataaacagagccaaagacaaaaaccacatgattatctcaatagatgcagaaaaggcctttgacaaaattcaacaacccttcatgctaaaaactctcaataacttaggtattgatgggacatatttcaaaataataagagctatctatgacaaacccacagccaatatcatactgaatgggcaaaaactggaagcattccctttgaaaactggcacaagacagggatgccctctctcaccactcctattcaacatagtgttggaagttctggccagggcaattaggcagcagaaggaaataaagggtattcaattaggaaaagaggaagtcaaattgtccctgtttgcagatgacatgattgtatatctagaaaaccccattgtctcagcccaaaatctccttaagccgataagcaacttcagcaaagtctcaggatacaaaatcaatgtacaaaaatcacaagcattcttatacaccaacaacagacaaacagagagccaaatcatgagtgaactcccattcacaattgcttcaaagagaataaaatacctaggaatccaacttacaagggatgtgaaggacctcttcaaggagaactacaaaccactgctcaaggaaataaaagaggatacaaacaaatggaagaacattccatggtcatggataggaagaatcaatatcgtgaaaatggccatactgcccaaggtaatttacagattcaatgccatccccatcaagctaccaatgcctttcttcacagaaatggaaaaaaactactttgaagttcatatggaaccgaaaaagagcccgcatcgccaagtcaatcctaagccaaaagaacaaagctggaggcatcacactacctgacttcaaactatactacaaggctacagtaaccaaaacagcatggtactggtaccaaaacagagatatagatcaatggaacagaacagagccctcagaaataatgacgcatatctacaactatctgatctttgacaaacctgagaaaaacaagcaatggggaaaggattccctatttaataaatggtgctgggaaaactggctagccatatgtagaaagctgaaactggatcccttccttacatcttatacaaaaatcaattcaagatggattaaagacttaaatgttagacctaaaaccataaaaacctcagaagaaaacctaggcattaccattcaggacataggcatgggcaaggacttcatgtctaaaacaccaaaagcaatgccaacaaaagccaaaattgacaaatgggatctaattaaactaaagagcttctgcacagcaaaagaatctaccatcagagcgaacaggcaacctacaaaatgggagaaaattttcgcaacctactcatctgacaaagggctaatatccagaatctacaatgaactccaacaaatttacaagaaaaaaacaaacaaccccatcaaaaagtgggcgaaggacatgaacagacacttctcaaaagaagacatttatgcagccaaaaaacacatgaaaaaatgctcatcatcgctggccatcagagaaatgcaaatcaaaaccgcaatgagataccatctcacaccagttagaatggcaatcattaaaaagtcaggaaacaacaggcacatggatgaaattggaaatcatcattctcagtaa

SEQ ID NO: 129959 - DNA, 5034 bp, Homo sapiens
  misc_feature (1)...(5034): n = a,t,c or g
atggagaatgactttgatgagctgagagaaggcggcttcagaagatcgaattattctgagctacgggaggacattcaaaccaaaggcaaagaagttgaaaactttgaaaaaaatttagaagaatgtataactagaataaccaatacagagaagtgcttaaaggagctgatggagctgaaaaccaaggctcaagaactacgtgaagaatgcagaagcctcaagagccaatgcaatcaactggaagaaagtgtatcagcaatggaagatgaaatgaatgaaatgaagcgagaagggaagtttagagaaaaaagaataaaaagaaatgaccaaagcctccaagaaatatgggactatgtgaaaagaccaaatctacgtctgattggtgtacctgaaagtgatggggagaatggaaccaagttggaaaacacgctgcaggatattatccaggagaacttccccaatctagcaacgcaggccaacgttcagattcaggaaatacagaaaacgccacaaagatactcctcgagaagnagcaactccaagacacataatgaaatacaaactaccatcagagaatactacaaacacctctacgcaaataaactagaaaatctagaagaaatggataaattcctcgacacatacactctcccaagactaaaccaggaagaagttgaatctctgaatagaccaataacaggagctgaaattgtggcaataatcaatagcttaccaaccaaaaaagagtccaggaccagatggatccacagccgaattctaccagaggtacaaggaggaactgggtactccaacagacctgcagctgagggtcctattagaaggaaaattaacaaacagaaaggacatccacaccaaaaacccatctgtacatcaccatcatcaaagaccaaaagtagataaaaccacaaagatggggaaaaaacagagcagaaaaactggaaactctaaaaatcagagcgcctctcctcctccaaaggaatgcaattcctcaccagcaacaaaacaaagctggaccgaaaatgactttgaggagctgagagaggaaggcttcagacgatcaaattactctgagctatgggaggacattcaaaccaatggcaaagaagttaaaaactttgaaaaaaatttagaagaatggataactagaataaccaaggcagagaagtgcttaaaggacctgatggagctgaaagccaaggctccagaactacgtgacaaatgcagaagcctcaggagccgatgcgatcaactggaagaaagggtatcagcgatggaagacaaaatgaatgaaatgaagcgagaagagaagtttagagaaaaaagaataaaaagaaacgaacaaagcctccaagaaatatgggactatgtgaaaagaccaaatctacgtctgattggtgtacctgaaagtgatggggagaatggaaccaagttggaaaacactctgcaggatattatccaggagaatttccccaatctagcaaggcaggccaatgttcagattcaggaaatacagagaacgccacaaagatcctcctcgagaagagcaactccaagacacataattgtcagattcaccaaagttgaaatgaaggaaaaaatgttaagggcagccagagagaaaggtcgggttaccctcaaagggaagcccatcagactaacagcggatctcttggcagaaactctacaagccagaagagagtgggggccaatattcaacattcttaaagaaaagaattttcaacccagaatttcatatccagccaaactaagcttcataagtgaaggagaaataaaacactttacagacaagcaaatgctgagagattttgtcaccaccaggcctgccctaaaagagctcctgaaggaagtgctaaacatggaaaggaacaaccagtaccagccgctgcaaaatcatgccaaaatacagatcaacgagacagaaagtcaacaaggatacccaggaattgaactcagctctgcaccaagcggacctaatagacatctacagaactctccacaccaaatcaacagaatatacatttttttcagcaccacaccacacctattccaaaactgaccacatagttggaagtaaagctctcctcagcaaatgtaaaagaacagaaattataacaaactatctctcagaccacagtgcaatcaaactagaactcaggattaagaatcccactcaaagccgctcaactacatggaaactgaacaacctgctcctgaatgactactgggtacataacgaaatgaaggcagagataaagatgttctttgaaaccaacgagaacaaagacacaacataccagaacctctgggacacattcaaagcagtgtgtagagggaaatttatagcactatatgcccacaagagaaagcaggaaagatccaaaattgacaccctaacatcacaattaaaagaactagaaaagcaagcgcaaacacattcaaaagctagcagaaggcaagaaataactaaaatcagagcagaactgaaggaaatagagacacaaaaaaccctttcaaaaaattaatgaattccaggagctggtttttttgaaaggatcaacaaaattgatagaccgctagcaagactaataaagaagaaaagagagaagaatcaaatagacacaataaaaaaatgataaagggaatatcaccaccaccgatccccacagaaatacaaactacccatccagagattactacaaacacctctacgcaaataaactagaaaatctagaagaaatggataaattccttgacacatacgctctcccaagactaaaccaggaagaagttgaatctctgaatagaccaataacaggagctgaaattgtggcaataatcaatagcttaccaaccaaaaagagtccaggaccagatggattcacagccgaattctaccagaggtacaaggaggaactggtaccattccttctgaaactattccaatcaatagaaaaagagggaatcctccctaactcattttatgaggccagcatcattctgataccaaagccaggcagagacacaaccaaaaaagagaattttagaccaatatccttgatgaacattgatgcaaaaatcctcaataaaatactggcaaaacgaatccagcagcacatcgaaaagcttatccaccatgatcaagtgggcttcatccctgggatgcaaggctggttcaatatacgcaaatcaataaatgtaatccagcatattaacagagccaaagacaaaaaccacatgattatctcaatagatgcagaaaaagcctttgacaaaattcaacaacccttcatgctaaaaactctcaataaattaggtattgatgggacgtatttcaaaataataagagctatctatgacaaacccacagccaatatcatactgaatgggcaaaaactggaagcattccctttgaaaactggcacaagagagggatgccctctctcaccattcctattcaacatagtgttggaagttctggccagggcaatcaggcaggagaaggaaataaagggtattcaattaggaaaagaggaagtcaaattgtcccagtttgcagacgacatggttgtatatctagaaaaccccactgtctcagcccaacatctccttaagctgataagcaacttcagcaaagtctcaggatacaaaatcaatgtacaaaaatcacaagcattcttatacaccaacaacagacaaacagaaagtcaaatcatgagtgaactcccattcacaattgcttcaaagagaataaaatacctaggaatccaacttacaagggatgtgaaggacctcttcaaggagaactacaaaccactgctcaatgaaatcaaagaggatacaaacaaatggaagaacattccatgctcatgggtaggaagaatcaatatcgtgaaaatggccatactgcccaaggtaatttatagattcaatgccattccaatcaagctaccaatgactttcttcacagaattggaaaaaactactttaaagttcatatggaaccaaaaaagagcccacatcgccaagtcaatcctaagccaaaagaacaaagctggaggcatcacactacctgacttcaaactatactacaaggctacagtaaccaaaacagcatggtactggtaccaaaacagagatatagatcaatggaacagaacagagccctcagaaataacgctgcttatctacaactatctgatctttgacaaacctgagaaaaacaagcaatggggaaaggattccctatttaataaatggtgctgggaaaactggctagccatatgtagaaagctgaaactggatcccttccttacactttatacaaaaatcaattcaagatggattaaagacttacatgttagacctaaaactataaaaaccctagaagaaaacctaggcattaccattcaggacataggcatgggcaaggacttcatgtataaaacaccaaaagcaatggcagcaaaagacaaaattgacaaatgggatctaattaaactaaagagcttctgcacagcaaaagaaactaccatcagagtgaacaggcaacctacaaagtgggagaaaattttcacaacctactcatctgacaaagggctgatatccagaatctacaatgaactcaaacaaatttacaagaaaaaaacaaacaaccccatcaaaaagtgggcgaaggacatgaacagacacttctcaaaagcagacatttatgcagccaaaaaacacatgaaaaaatgctcatcatcactggccatcagagaaatgcaaatcaaaaccacaataagataccatcttacaccagttagaatggcaatcattaaaaagtcaggaaacaacagtgatctctaccttatgtctgcaggaaccagttgtttaatgggcagacactgggacagtggacaagaaacgtgtgtccaaaatgtcgtgctggacacgtgcagcccctctgaacaactcttaagagctattgctgatcttgtcccgcaaccctga

SEQ ID NO: 129960 - DNA, 757 bp, Homo sapiens
taaagttttggtgattcagaccgaaaaagggggagattgtccccggcgttgcgactcagtggaaaagtaatgacaacgtatcttggcctttacccctgcgcgataccgcaaaatgggcggatggcacaccggtaacggcgcaagattttgtctacagctggcaacgtctggtggacccaaaaacattgtcgccatttgcatggtttgccgcgctggcgggaatcaacaacgcacaggcgattattgatggtaaagctacgcctgaccagcttggcgtcaccgcagttgatgcccatactttgaaaattcagcttgataaaccgttgccgtggtttgtgaatttaaccgctaactttgccttcttcccggtgcaaaaagccaacgtagaaagcggtaaagagtggacgaaacccggaaatctgatcggcaatggcgcttatgttcttaaagagcgcgtagtcaatgaaaaactggtcgtggtaccgaatacccattattgggataacgccaaaacggtactgcaaaaagtgaccttcctgccaattaatcaggaatccgcagccactaagcgttacctcgcgggggatattgatatcaccgaatccttcccgaaaaatatgtatcagaagctgttgaaggatattccggggcagggcggtagtttcggcaaaataacgcgctccggccatactggtttcttcatcagcagtcgccagaatgtagagcggttttttcagtttcgtgacgtcgacatcgc

SEQ ID NO: 129961 - DNA, 1878 bp, Homo sapiens
atggggctggacggtcgtacgctggtgaccaaaaactccttccgctatttgcacaccctgcacactatggggccggcaccggaacctaacctgaccattctttggtcggaagaattaccgattgccttcaaaaaatatgccgcgcaggtgtcgatcgtcacctcttccttgcagtatgaaaatgacgatctgatgcgtactgacttcaacagcgacgattacgcgattgcctgctgcgtcagcccaatggtgattggtaagcaaatgcagttctttggtgcacgcgctaacctggcgaaaacgctgctctacgcaattaacggcggggtggacgagaagctgaagattcaggtcgggccgaaaacagcaccgctgatggacgacgtgctggattacgacaaagtgatggacagcctcgatcacttcatggactggctggcggtgcagtacatcagcgcgctgaatatcattcactacatgcacgacaagtacagctacgaagcttcgctgatggcgctgcacgatcgtgatgtctatcgcactatggcatgcggcatcgcgggcctgtcggtggcgacggactccctgtctgccatcaaatatgcccgcgtgaaaccaatccgtgacgaaaacggcctggcgaaagacattcagggaacaacagaaccacaattcagaaactcccacagccggacctccggcactgtaaccctttacctgccggtatccacgtttgtgggtaccggcttttttattcgcgttgatccgccaaagaaaccgctgaagatccgcaaaattgagtttgttgaaatttacgagccgttttccgaaggccaggccaaagcgcaggctgaccgctgcctgtcgtgcggcaacccatactgcgagtggaaatgcccggtacacaactacatcccgaactggctgaagctcgccaacgaggggcgtatttttgaagcggcggaactgtcgcaccagaccaacaccctgccggaagtttgcggacgagtctgcccgcaagaccgtctgtgcgaaggttcctgcactctgaacgatgagtttggcgcggtgaccatcggcaacattgagcgctatatcaacgataaagcgttcgagatgggctggcgtccggatatgtctggtgtgaaacagaccggtaaaaaagtggcgattatcggcgcaggcccggcaggtctggcgtgtgcggatgtcctgacgcgtaacggcgtaaaagccgttgtcttcgaccgtcatccagaaattggcgggctgctgaccttcggtattccggccttcaagctggaaaaagaggtaatgacgcgtcgccgtgaaatcttcaccggcatgggtattgaattcaaactcaataccgaagtgggccgcgacccgcgcgcttcatcgttttatgaagagaagcagcttattgcacgcaaggcactaccctttatcgacaataaaaccaccatggcagccgattccagtagtaccgtaatggaattgctcaaattgttacaggaccgtagtggcctgacgttgctaaccaactcggcggaagcgattcatgttctggctcagtcagaaattaaagtcgtttcaacgggtggggaactaaacaaaaatacactttcactgcaaggaagaattactaaagagatcatcaggcgctatcatgtcgatatcatgtggttgccggacgagctgcgtgtcgaaaaagggtttagcccggatacgctcaagctgctggaagcaaaaggtcagaaagtggcgctgaaagaggcgatgggcagtacacaaagcattatggttgggccggacgaacgtcgaacgggattttcttatttaagatatcagaatcttatgattcgggtaaaattctaa

SEQ ID NO: 129962 - DNA, 2118 bp, Homo sapiens
atcattttttatttttcgtacaatggcgacagatgctgattatgataccgaaaacgggtttgaacgtgcgaagcccgaacgtagtgttcggagttctatgtgctttaccgcattttggagactattatttacactaaatgtgatttgatatattgatacttaaaacatttgatgcttcctttgtcacttttttgatggaagttgtttgcatttctttaaggcgaaacaaataattacgcatcaattttaatgtcggttagagggaaacttatgaagcactctgtttcagtcacgtgttgtgcgctgttggtcagcagcatttctctttcgtatgctgcagaagttccgagcggcacagtactggcagagaagcaggagctggtgcgccacattaaagatgagcctgcgtcgctggatcccgctaaagccgtgggcctgccagagattcaggtcattcgcgatctgtttgaaggtctggtgaatcagaacgaaaaaggggagattgtccccggcgttgcgactcagtggaaaagtaatgacaaccgtatctggacttttaccctgcgcgataacgcaaaatgggcggatggcacaccggtaacggcgcaagattttgtctacagctggcaacgtctggtggtaccaaaaacattgtcgccatttgcatggtttgccgcgctggcgggaatcaacaacgcacaggcgattattgatggcgagaagccgttcttattaccggacaatgaaggggtaaagatgaacacttcaccggtgcgaatggatgatttaccgcttaaccgttttcactgccgcattgctgcgctcactttcggcgcacacctgaccgacggttatgttctcggcgtcattggttacgccattattcagcttacgcccgccatgcaactgacgccgtttatggcgggaatgatcggcggctcggcgctccttggtttgttccttggcagcctggttcttgggtggatctccgaccatattggtcggcaaaaaatcttcaccttcagctttttgctgattacgcttgcttcgtttttacaattttttgccaccacgccagagcatcttattggactgcgcattttgattggcattggtctgggaggcgattattcagtaggtcacaccttgctggctgaattttccccgcgccgccattgcggtatttggctgggcgcattcagcgtggtggggaccgtaggctatgtgctggcaagtattccgggaatcactttctcttgcatgcctgcaggtcctgaacacattctgtttatcgcttctggcgcgttccagattgcgagaccgtctgacctgatcccggaactgcatggtcgtctgcacatccgcgttagactgcaggcgctggacaccagaagcttcgagcgtgttctagaagattcgaatgcctctatcgacgtgcagtacaaagcactgatggcgattgaaggcgtaaatatcgagtttaccgactccggtattaaacgcatcgcggaagcggcatggcaggtgaacgaatctaccgaaaacatcggtgctcgtcgtttacacactgttctggagcgtttaatggaagagatttcctacgacgccagcgatttaagcggtcaaaatatcactattgacgcagattatgtaaccgaagaaaccattcgccgcgatcttgagaagctggaagatgaaggctttttgaccagaacctatggtggtgctgttttaaatacagcgatgttgacggagaatatccatttttataagcgcgcttcatcgttttatgaagagaagcagcttattgcacgcaaggcactaccctttatcgacaataaaaccaccatggcagccgattccagtagtaccgtaatggaattgctcaaattgttacaggaccgtagtggcctgacgttgctaaccaactcggcggaagcgattcatgttctggctcagtcagaaattaaagtcgtttcaacgggtggggaactaaacaaaaatacactttcactgcaaggaagaattgctaaagagatcatcaggcgctatcatgtcgatatcatggtaatgagttgtaaaggtcctgatattaacagcggcgcgctggactcctga

SEQ ID NO: 129963 - DNA, 1263 bp, Homo sapiens
atggaatactatgcagccataaaaaaggatgagtttctctcctttctagggacatggatgaaactggaaaccatcattctcagcaaactatcgcaaggacaaaaaaccaaacactgcgactctagaggactccccgcgaccgagcgaaatcatctggtgaccgaagagggcgaatgctggtttgattcgccgatcatcgctgaatatattgaattaatgaatgtcgctccggcgatgttgccgcgcgatccgctggagtcgttgcgggtgcgcaaaattgaggcactggcggatggcattatggatgccgggctggtatcggtgcgtgaacagaagaggtttcagttaacaagtgctaaaaggacaaaatcaactttttatgggggcaaaaatccatggggcattcgtattgacgccaacgttatgcaaggcatctggcaaatgaccaaacagggcgatgcgataacggggtcgatggtctttttctgcgttattggtgccccgctcattctggtgacctccatagcttatttatggtttggtaaccgactgggaatgaatttacgtccggtactgctgatgcttgagcgacttaaagagtgggtaatgctcgatatctacctggtcggcattggcgttgcttctataaaggtacaggattatgcccatatccaggctggtgtcggcttgttctcttttgtggcgttggtgattttaacgacggtgacgttgtcacatcttaatgtcgaagaactgtgggagcgattttatccgcagcgccccgctacgcgtagggacgagaaacttcgtgtctgtcttgggtgccattttaccggctatccagatcagcgtggtcgctgcccgcgttgccatatcccgtacagactgcggacctgcacgcctgaaaggttggcggccagtggcagaaagacagagggcaaacctcagacagtatacagagaggaagagagagagacacagagagagagagagtcaccggttcgcaatgatctgcgcttccgtgaactgactgtgttacgcgttgagcgcatcagcgccggttttcagcgcattgtcctcggcggcgaggcgctggacggtgaaattcgccgaaaaccgcagtcaggacggaacgttgaatcccttgttggaagccaccgcttattccgaatcctgcaacagttccagggacctgacgtcccctttttccgggtcagcccgtccccatggcccaacagcagctgcctgacccgaaaatgctag

SEQ ID NO: 129964 - DNA, 1066 bp, Homo sapiens
atgaataacaccccccgctacccgcagcgcgttcgcaatgatctgcgcttccgtgaactgactgtgttacgcgttgagcgcatcagcgccggttttcagcgcattgtcctcggcggcgaggcgctggacggttttacatcgcgtggctttgacgatcacagcaaactcttctttcctcaacctgacgctcactttgtgccgccaacggtaacggaagagggcatcgtctgtcaggaagcatggagctgctgcctctcctgcacttcaccagaggctattgccaaatggtggttcaaatgtactcacgatctctatccatacgtggtgttgcctgatgcgacgcttgcgcgtcttatcaggtctacagtgacctttcgggctggcttccagtacctgtaccggcagcggcgaatcgaggctggtacggcggctgatatccacttcccaagggcgcaggaagagatccaccggcccctgatacgcaggtgtgtagcccagcggccagcgatgcgcgccaacatggaactgcccgccgcgaatggttccctgcaggcggttcacttcgcccataaattcgagcacaaaacgggtcgccgtggttgtcgtttctggtggattcggtatgtgttctcaaggcgtgtgttgatgcggtcatgcgagcgggtatttgttctgtgtcttgactggcagtatcagagcggagtaggggctaactcctcggcgctcagcggtttctctcaaggcgcgattatgatgctggagagcattaaagccgaaccgggccttgcttcacgcgtcattgcttttaacggacgctattcgagcctgccggaaactgcgtctacagccacgactattcacctgattcatggcggtgaagatccggttatcgatctggcgcatgcggttgcggcgcaggaagcgttaatcagtgccggtggtgacgtgacgctggatatcgtggaggatttaggccatgcgatcgacaatcgcagtatgcaatttgccctggatcacttgcgttataccattccgaaacattatttcgacgaagcgctaagtggcg

SEQ ID NO: 129965 - DNA, 2655 bp, Homo sapiens; identical to SEQ ID NO: 121874

SEQ ID NO: 129966 - DNA, 1494 bp, Homo sapiens; identical to SEQ ID NO: 127455

SEQ ID NO: 129967 - DNA, 1733 bp, Homo sapiens
atgggcgttggttccaaaggcacaatctttgggagcacaaccacacaacatggcagtttcataccctatcttacggggtatctaacttacactcacggccacagtccagcaaatccgaagccggcggtcggcgggcaaattctcacagcggtcttaccagcccatgatggctacgtcagtcgcattatgactatgaacactcaactcactaccccgcttacaaccgcgacacatacagcgcgacaaacagcctcactaatatctgtcatcggccgtcagctacggtgttttcgccacagtagccagccctctgtgctaacccacgtccgtgatgactctacacaatatgcacagctggatatggcaaatggacagccaactagccatgggtatgaacactgggcacaattgatgtatgcaactgacaggagatatggaagacacatgtcagatgctgccagacaaggctgctcagacactggtatcgtaaagttcagtcatccggaaccagagatgtcagtcaggaaattcacgtcagcacgttccgggtgtgtacgatcgggagcatggaacgtgacagtttctgcgcagaccagagtttcccaggccctgaccacgttactccgtcgtgtgcataagagccccatgaatgcattgacggtacctgctgtcatggcagaagctccttcgcaggctcacggtcgtagacagactcggcgtctcagtctacatcagacgctccggcttctgttgactacgcctgattgggttggagttattcgtcgttgtgtccctgtagtatgggggtgtttggaacatttggacactgcgggttttcccctccccaacagtcatacgatgcccctgccgatcggatggaacgatacccggaagcgtctacaccattcagcacataatgggcaacatgacgttgcgcaggggcgtcgcgtgttagggcgtaaagtgggcctgacacatccgaaagtgcaacaacaactgggcgttgatgggttgtcccttttctgtgtctatctggtctggtatattggattgcaccttcgccgacctttcaggttagcttatactatctgtccgtctctggtttatggcgcggatcttcgggttattgtgcgtcttttctccgacagccatcattttatggcattcggaaatcctcaacccaaacatttagactgccaagaatatgcattattcctgctcaatagcatgccggataatacagctgagcattaccgcaataaaatcgccatttatttgcactgcttgccggaagatgatcgcatcaaagcgattaatgaaatccgcatggcgatccatcaggttagcccctttcgtgaagagccagtggattgcgttctgtgggttaaatacagccaacttatgcctaatgattacaacccaaacaacgtggcaccacccgaaaaaaaactgctgcaaaaatccattgaaatagatggttttacccaacccattgtggtcacacatacggataaaaatgccatggaaatcgtggatggttttcaccgccatgaaattggtaaaggctgcatgcatcattaaaattacgcttaagaggttatttgccggtgacctgtctggaaggtacacgtaatcaacgcatcgccgcgactattagccataatcgcgctcgtggacgccatcacatcaccgccatgtcggaagttactccggaacttaggctattgggatgg

SEQ ID NO: 129968 - DNA, 273 bp, Homo sapiens
atgcggaaattctataacgtaccggacttcctcgtgaagttccatatccaggcggagccaggtcacgacaaaatccgcgatgcggtccgtgcatgggcgtcgtccctggacaatcaggacgtagtgccagcgctgatcatcaacgaataccgggagcatggcggtaccgccatcaacttcccaggagacatcaccaagtaccgccaaaaactatttcgatatgtggataaacggttccactgcgatcagtgcgagagaaccattataaactga

SEQ ID NO: 129969 - DNA, 319 bp, Homo sapiens
aaatggtgggttcttggtctcactgacttcaagaatgaaaccgcggaccctcgcggtgaccgttacagttcttacaaggcggtgtgtctggagtttgtttcttctagacgttcggatgtgtccggagttttttccttctggtgggttcatggtctcgctggatcaggaatgaagctgcagaccttcacggtgagtgtcacagatcttaaggcggtgtgtctggagtcgttcaattcctcccggtgggttcctggtctcactggcttccagagtaaagcttcagaccttcacggtgagtgttacagctcataaaggcagt

SEQ ID NO: 129970 - DNA, 1113 bp, Homo sapiens
taaaggtggcgtttacaaaacctcagtttctgttcatcttgctcaggatctggctctgaaggggctacgttgtttgctgtggaaaggtaccgcccccccagggaacaccctcaatggtatcgcgggagggggacccagctcttcataattagtgcaaaacacagctcttatgcctctcatatcttggggaaaaggacgatgtcacttatgccataaagcccacttgctggccggggcttgacattattcctttctgtctggctctggaccgtattgaaactgagttaaatgggcaaatttgatgaaggtaaactgcccaccgatccacacctgatgctccgactggccattgaaactgttgctcatgactatgatgtcatagttattggacagcgcccataaccgggggtatcggcacgattaatgtcgtatgtgctgctgatgtgctgattgttcccacgcctgttgagatagtttgactacacctccgcactgcagtttttcgatatgcttcgtgatctgctcaagaacgcgtgatcttaaagggttcgagcctgatgtacgtatttttgttaccaaatacagcaatagtaatggctctcaattcccggtggatggaagagccaattccggaatgcctcccgaagcatgggtctaaaaaaaataatgtgcgtaacgccaatgaagttggtaaaggtcagatccggatgagaacctgtttttgaacaggccattgatcaacgctcttcaactggtgcctggagaaatgctctttctatttgggaacctgtctgcaactgaaattttcgatcgtctgattaaaccacgctgggagattagataatgaagcgtgcgcctgttattccaaaacatacgctcaatactcaaccggttgaagatacttcgttatcgacaccagctgccccgatggtggattcgttaattgcgcgcgtaggagtaatggctcgcggtaatgccattactttgcctgtatgtggtcgggatgtgaagtttactcttgaagtgctccggggtgatagtgttgagaagacctctcgggtatggtcaggtaatgaacgtgaccaggagctgcttactgaggacgcactggat

SEQ ID NO: 129971 - DNA, 681 bp, Homo sapiens
atgagtattggaggcagcgggaacagcttgtgcacaagacccaagcagcagcaggggggcaccggcctgaaacagtatgaagtgagcgtgcctggaacactgaggtgcctggcctgcccacaggcttgtaccttacggaaggagcactggattcattttgctcccaagagcaactatgactcatgtcgatacattgaggaatattttgcttatgaggcatcattcatgtcggtgcagcttacggagctggtcattaagtcacttgaggacctcgcttcccttttcatgatacacaaaaaaaaccccgtaagtataccacacaccgtctggtacgccgacgatatccgccgcggagaacgcgaggcggcagatgtgctggggctcacactctatgagctgatgcttcgcgctggcgaggccgcattccaggtgtgtcgttcggcgtatcctgacacccgccactggctggtgctgtgcggtcatggtaataacggcggcgatggctacgtggtcgcgcgactggccaaagcggtcggcattgacgacacgttgttggcccaggagagcgacaaaccgttgccggaagaggccccgctggcacacgaagcatgggtaaacgcgggtggcgagatccatgctttgaatattggctgggcccgaatcggaacatcttattgttga

SEQ ID NO: 129972 - DNA, 774 bp, Homo sapiens
tcgttaaatgcagcgaaaagtgtttatttttacccttggggcaattcagtcagtttattcagaaattgcgcggttatattccttgacccattgtttattcgcaaaggccagggtgtcactcctaccgcatttgcgatgcatctacatgagtatatcagtcagggccttgagtccattcttggcgcgctggatatcgaaggaagctatgataagcaacgaacgataactattgcgaccactccctcggtcggagcactggtccttcctgtcatctatcgggcgattaaaactcactatccgcagcttttactgcgcaacccgcccatcagcgacgcggaaaaccaactcagtcagtttcaaaccgatctcatcatcgataacatgttttgcaccaatcgtacggtgcaacatcatggtctgttcgccgcaaatatggtgttaatttgccgcgagggaaatccactactctctttagaagatgacagagaggctatcgccaacgctgcgcatgtacttctgttaccggaagagcaaaatttcagcggtttgcggcagagagttcaagaaatgtttccgggccggcaaatcaatttcaccagctacaacattttgacaatcgctgcactggttgccaacagtgacatgttagcgattattcccagccgtttgtataacctgtttagccgctgctggccgctggaaaaactgcctcatccgtccttaaatgaggagcaaatagatttctctatccactacaacaaattcagcctgcgt

SEQ ID NO: 129973 - DNA, 741 bp, Homo sapiens
atgattaccgtcctgctgatcgccacccagttcgcgccttacttcactgaaatggcgctcaaaggcggtttcagttttgccggtgaaagtgcgcaaatctcagcgttgtccgtgggcaatatgttcggttggtcgatttctgaattgatgtcgcttgggattattggcgttgtcgtggcggtcggtattgtcgccagcgtcgtgctgttcttacgagtactttcaatgagttggctgaaagaggttattgggacggaaaaagcggtcatcgccatgtgccatctacgtgcattgcccggcgacccgagttttgatgcgcagttggggatgaactgggttatcgacaaagcctgggacgatctgatggcgctccaaaatggtggggtggatgcagtcatgttctccaacgagtttagtcttccctatctcacgaaggggctggtgcctgcactggtggcacgagaaattctcgttcgcgggatgtacgtgcgcggacgtaaaatggtggcgttcctggtctgctgcgtggcgctggcgataagcgcgatgtatgaattaatcgagtggtgggcagcgctggcaatgggtcagggagcggatgattttctcggcacccagggcgaccagtgggacacgcaatccgatatgttctgcgcgctgcttggcgcattaacgacggtgatattcctcgctcgctttcattgccgccagctacggcgctttggcttgataaccggataa

SEQ ID NO: 129974 - DNA, 678 bp, Homo sapiens
atgtgccatctacgtgcattgcccggcgacccgagttttgatgcgcagttggggatgaactgggttatcgacaaagcctgggacgatctgatggcgctccaaaatggtggggtggatgcagtcatgttctccaacgagtttagtcttccctatctcacgaaggtgcgtccggaaaccactgcggcaatggcacgaatcatcgggcaattaatgagcgatatccgcatcccgtttggcgtgaatgttctgtgggatccggtcgcctcattcgacctggcgatggctaccggcgctaagtttatccgcgagatatttaccggtgcctatgccagcgactttggcgtctgggacactaacgtcggtgagaccatccgtcatcaacaccggattggtgcaggcgaagtgaaaaccttgttcaatatcgtcccagaggccgccgtgtatctgggcaatcgcgatatctgttctattgctaaatcgacagtatttaacaaccatcctgatgcgctctgtgtttctggcctgaccgccgggacgcgtaccgacagcgcgctgttaaaacgggtcaaagaaacggtgcctgacacctgtcgtgttggccaacacgggcgtctgcctggaaaacgtggaggaacaactcagtatcgccgatggctgtgtgaccgcaaccacctttaa

SEQ ID NO: 129975 - DNA, 1581 bp, Homo sapiens
atgagtcacaagaagcttcgaaccccgataattccctatattcttaagttgcatgtcgagttacccgaaaatatcgacaagcaaagccccaccatgacgctaatttatgatgagaacgggcagcttttatgggcgcaacgtgacgtgccctggctgatgaagatgatccagcctgactggctgaaatcgaatggttttcatgaaattgaagcggatgttaacgataccagcctcttgctgagtggagatcattcgatacagcaacagttgcaggaagtgcgggaagatgatgacgacgcggagatgacccactcggtggcagtaaacgtctacccggcaacatcgcggatgccaaaattaaccattgtggtggtggataccattccggtggagctaaaaagttcctatatggtctggagctggtttatctatgtgctctcagccaatctgctgttagtgatcccgctgctgtgggtcgccgcctggtggagtttacgccccatcgaagccctggcaaaagaagtccgcgaactggaagaacataaccgcgaattgctcaatccagccacaacgcgagaactgaccagtctggtacgaaacctgaaccgattgttaaaaagtgaacgcgaacgttacgacaaattgtcgactctagagcgatcccgtttacgtaagaacggttacactctcccatcaatcaaccaaagaatccgtatccgcctgaaagcgtttgatcatcgtctgatcgatcaagcaaccgcggaaatcgtcgagactgccaagcgcactggtgcgcaggtccgtggtccgatcccgctgccgacacgcaaagagcgcttcactgttctgatctccccgcacgtcaacaaagacgcgcgcgatcagtacgaaatccgtactcacttgcgtctggttgacatcgttgagccaaccgagaaaaccgttgatgctctgatgcgtctggatctggctgccggtgtagacgtgcagatcagcctggaagacggcgtctctatcccagtaaccgtaatcgaagttgaagcaaaccgcgttactcaggttaaagacctggctaacgatggctaccgtgctattcaggtgaccaccggtgctaaaaaagctaaccgtgtgaccaagcctgaagctggccacttcgctacagctggcgtagaagctggccgtggtctgtgggaattccgcctggctgaaggcgaagagttcactgtaggtcagagcattagcgttgaactgtttgctgacgttaataaagttgacgtaactggcacctctaaaggtaaaggtttcgcaggtaccgttaagcgctggaacttccgtacacaggacgctactcacggtaactccttgtctcaccgcgttccgggttctatcggtcagaaccagactccgggcaaagtgttcaaaggcaagaaaatggcaggtcagatgggtaacgaacgtgtaaccgttcagagccttgacgtagtacgcgttgacgctgagcgcaacctgctgctggttaaaggtgtctgtctccgggtgcaaccggtagcgtacctgtatcagttaaaccgagctgtgtaa

SEQ ID NO: 129976 - DNA, 1926 bp, Homo sapiens
atgcccttcgcgttgggtggcggggaccttgaagaaacccctagaagtgaccccggggtgacctttgcctgtagcctcgctcagccaatgaggaagcccactggggtgcttggaaaccgtttccatgacacccaggagccgccggtccctggagggcctggtctgaggggtttccacctttggcacgcacccccgttagatcgccctgcacagttcgcagccattcgcaccgatagcgaattaatgtcatcggcgaacccgaagtcttttactgcaagcccgctgatgacttttaccccagccaggagccgtattaattaccggtattaccccgcaggaacacgggcgaaaggagaaaacgaagccgcgtttgccgcccgtattcactcctttttaccgtaccgaagacctgtattctgggctacaacaatgggccaggctaaaagcgcaatcaaaccgatgagtacagctgtgacaagggatgccagcgtttttcaaacagaatatgagcgatcccggttcggcgcgcgcccttggcccctccggaaggccccggaagccatgggcaggggcttccatgaaatcggggtgcagtgtgaagcccccacggccaacacccttgagccctccaggagaggggccgtgatggccgcgggcctgagtttccagaggaccccctggagggaggtccttggtcggggggaggggagcttcctgggcgctgggtccgaccccgtcctcagggcgctgagtctggccagtacacctttccctggagagaagcacgtgggctcctggggtatggggcgcatcgttttaagaagtttcgcactcgcttcatcgtcattacggcatagcggggagagaattccaggcactgttctaccatgcgatgacatttttgcctgccaccagcgcaactacgcggaagtgttcgggatttggcgcaccacgtccagcgtgctgcaaccaatcgagccggtcgagcccaaatgcatcagtcagtttctgtacatcgtcctggaacggcgatcgtcgtcttcgctgatctctttatctttcaacagtgcttcactttgtcgttcgcgtcacgacgcacgttacgtactgcaacacgcgctgttctgcttcaccacgaacgattttggtcagatctttacgacgttcttcgtcagcggcggcagcggaacacggatgtcgctacccgcagagttcggggtgatcgcccagtccgatcaaaaagtgttatttattgatgccgacttagccgtggttattcgcataacctgtttaccgagtacttcaatgagttggctgaaagaggttattgggacggaaaaagcggtcatcgcatgtgccatctacgtgcattgcccggcgacccgagttttgatgcgcagtggggatgaactgggttatcgacaaagcctgggacgatctgatggcgctcaaaatggtgcgtccggaaaccactgcggcaatggcacgaatctcgggcaattaatgagcgatatccgcatcccgtttggcgtgaatgttcttgggatccggtcgcctcattcgacctggcgatggctaccggcgctaagttatccgcgagatatttaccggtgcctatgccagcgactttggcgtctggacactaacgtcgccagatccagacgcatcagagcatcaacggttttccggttggctcaacgatgtcaaccagacgcaagtgagtacggatttcgtatgatcgcgcgcgtctttgttgacgtgcggggagatcagaacagtgaagcctctttgcgtgtcggcagcgggatcggaccacggacctgcgcaccagtggcttggcagtctcgacgatttccgcggttgcttgatcgatcagacgatgtcaaacgctttcaggcggatacggattctttggttctgcattga

SEQ ID NO: 129977 - DNA, 900 bp, Homo sapiens
tcaatttttgaggtagttgagaaggccccctgaaccggcaaggccccagcaaggccccagcgtgtcaccgcccggcagacctcggggcatccgcacaatcttggactcctggaggcccatacatagcatctggagcgaggagtaggattgatggatagagtagatacgtacatagataattagaattatagagggttcacacaattccacatagaatcttgttcccgtgtgtaatttgtagctcatggtcatcctgattccgatagcgaactggggatctgcaggcaggaacttgagtcggtatgcacgtctacctccaatgtgtttaagtcgagataatcgccgtgagcgtgtttctacatggtacgggtatggccagaaattccgttggaagtgtcgcccgtccatacaccagataatcagagtatagcacgtgtagacgcccctgtttcttaggccccggaggctgcccgaggtagaagactcgttattcgtgtcgaggagagacgtggtcgaacccgcagtcatcgcagctttcggctttaatcgcggctgttcgtcatccagcgaccagtaatgcagtttgccgctctgctcgcagttgctgcattttacgcgcactacgtgccattcagtttcacacaggttgcagtgcaggtaacgtagcccctgagtggtgccaatttgcaccatgctggaggaagcccttgaaagacagaatctgacagcgtctttatgcgggtgattaaagaaagcttgtggcaggagctggcagacatcaccgataaaacgcagcttgaatggcgcgaagttttccaggacctcaatcatcatggggtttatcacagcggagaagtggtcgggctgggaaatctggtctgcgagaaatgtcacttccat

SEQ ID NO: 129978 - DNA, 555 bp, Homo sapiens
tcaaaggttttcgcggtagcgggatgcgtcgtgttgatgacgaccatgcccgacagttgcaattcgtggcaaaaatgcaggaataaaacaatgaacaagaagattcattccctggccttgttggtcaatctggggatttatggggtagcgcaggcacaagagccgaccgatactcaggcgcctggcgtttcgaccatcaccgcagatgaaatccgcaaaaacccggttgcccgcgatgtgtcgaagatcatccgtaccatgccaggcgttaacctgaccggtaactccaccagtggtcagcgtgggaataaccgacagattgatattcgcggtatgggtccggaaaacacgctgattttgatgacggcaagccggtaagcagccgtaactcggtacgtcaggggtaccgactggaatgcggcgacggttaacggaatactggcgacatccggcgcaggatccaatccggggaaatcgcgatggacataacttggggctgacctgcgatccggttgccgagcaggtacaaatcccgtgcattgaacgtaatgccat

SEQ ID NO: 129979 - DNA, 1359 bp, Homo sapiens
atgacggccgcagcaagccaaaaagagggcggggccagacggaaccaagggagaagggaccggccccggaaaaggacgcagagaaccaaaacccggccggagcaagacggcaaaccggaaggaccggacccccggccccgccccccggaaaaacgcaaaaccgaagacgggaagaccaacccagcagaggcaagcaagccggacggccccaaagctcgaatacaaaaaacccaccaaatgaaaacattggatttgaaaaagggagcaataaatgcaacttacttggagggtgggatgccgtcggagcaactcgttgaacatgcgggagacgacgacgtagaccatttggaaggttacgcgttggatgatcatgttgaagtattgaaactgaaaaagacagatggctggtcaatacttagaatctgtgactcagagtggtatcgatccttatgcaatcacgctgcgtgcagataccagcataccgaagctgactcagcaggatgttaccgagctgatcgcctatctgaacaaaggtggatcggtgctgatcatggaaaacgtctgtcgatggcactgaacaagtcggtagtaaataacgattcgcaaagggtatccgaaccgcgttcgtcagcagcggcaacgggcatttgggtctatgaacgttatcctgccgtatatggtgcgctgccgtacaccatcgatagtaagacaggggaagttatgtggaaatatcaggtagaaaacaacctgatgacaaccgaagctggagttgcagctgctgaagatgagatggcaacaggaacgcgttatgctttattgagaggcgatcaaaacagagattctctgaaggctgcaagagaaatttctcgccgcgttctcgggctgaagagtgtactaatccgacatatcactatgagctcactcctgaaatatcgtcatgacacggagatccggaaaactgcgatggtgcagcatgcgaatttagccaccaacattcagcgtctgtatcagcatgagctctactaccggaccaatggtcgcaaaggtgagcgtctgagcagcgtcgatctggaaacaacatgtcggtctggctgtggaacgatacgagctatcgttatgaagaaggcaaaaatgacgagctgggctttaaaaacgttcaccgagttcctgaactcgtacgccaatgatgctatgcaggcggcaccaaagtgttctgcagatctgaaaaaatcgctggtcgataacaacatgatctacggtgacggtagcagcaaagcgggcatgatgaacaccgagctacccgctcaactatatggaaaaaccgctgacacgcctgatgctgggccgttccggtgggat

SEQ ID NO: 129980 - DNA, 546 bp, Homo sapiens
ttatgtggatgtcctttttgttgatgttgatgctattgcattctgtttgttagttttccttctaataggcccctctgctgcagatctgctggagtttgccagaggtacactccagaccctttttgcctgggtatcaccagcagaggctgcagaagagcaaagattactgcctgttccttcctctggaaacttcatcccagaggggcacttgccagatgccagccggagctctcctgttggaggtgtctgtcgacctctcctggaaggtgtctccccatcaggaggcacaggggtcagggacccatatgaggaggcagtctgtcctttagcagagctcaagtgctgtgctgggagatctgctgttctcttcagagctggcaggcagggacgtttaagtctgctgaagctgttcccacaactgcccttttccccatgtgttctctgtctttctaagttagttccagtgtcccctaattcaactagaacttccaaactattgtccattccatattcccgtggtcctgcactactggaggtgctctccat

SEQ ID NO: 129981 - DNA, 479 bp, Homo sapiens
tttccaggaacgcgaagctgaaaaatacgcgaatcccatccctagtcgggaatttatcctcgaacatttaaccaaacgtgaaaaaccggccagccgtgatgagctggcggtagaactgcacattgaaggcgaagagcagcttgaaggcctgcgtcgccgcctgcgcgcgatggagcgcgatggtcaactggtcttcactcgtcgtcagtgctatgcgctgccggaacgcctcgacctggtgaaaggtaccgttattggccaccgtgatggctacggctttctgcgggttgaagggcgtaaagatgatttgtatctctccagcgagcagatgaaaacctgcattcatggcgatcaggtgctggctcagccgctgggtgctgaccgtaaaggtcgtcgtgaagcgcgtattgtccgcgttgtggtgccaacccccagccacattgttggtcgcccctttaccccaccgggcgtcggctttg

SEQ ID NO: 129982 - DNA, 1386 bp, Homo sapiens
ttacaccaaggcaagcctagatcttgaatattcaacatctagaagtaaagatgggagccctagtgccactccccagagaggcagcccatgggagtcaaaagctgggtctttgatgtcaaagggacttgagttcagaatcctggaattgccaccgagtgactttgggtagggcatttcaacttttgactgccagcttttcctctgctgtaaaacgcaggttatgtgaaggttagatgaggtgaagtatgtaaagcgcctggaactgagctctctgcctctcttgtccatatcctgtgagtaacgctgccgatttctcagtacggtaggaaaaagcaaaagggatggtccttgctggccttctccatcttcttttgtttttcttacataaatgcctaccccagctaagggaattggatcacatgattctggaggctgagaaatcccatgatcttccagatatgccatctgcaagctggagaaccaagaaagcctgtggtgtgatttagctcgagtctgcagtcctgagaaccagagaagccacagtgtaactcccagtttgaggcagaaagcctgaaaactggtagggttgtcggtgtaagtcccagagtggaaaggccctagaaccaggagctccaatgtcttatgtcggtggctttgagctgattgccgaatgccacggcagctttcacacttaaaggattccaggaggccctgtggtccctctggttgcgtgttcagattaagggtcctggaaacctgtagcaacccttccttacattccgggtgtcgcagcaccacaacttttgagtctttactcaaaagtaaatcaagacacaccatccttggcatgctgatgagattaatgtaacctacatttaggggaatttcagaaattttgtaattagaggtaccgttgctccttgcagaatccaggtctcttctcttcagaaatgtggcttttgagtgaatagtctttgttaagtcaccagtgttggctctgccaccaccaaccgtgttgaaatctttggcatcagagcagaaccggatgactccgggaagctgagctggaaggctcgtttgagctgatcctttccaggaacgcgaagctgaaaaatacgcgaatcccatccctagtcgggaatttatcctcgaacatttaactaaacgtgaaaaaccggccagccgtgatgagctggcggtagaactgcacattgaaggcgaagagcagcttgaaggcctgcgtcgccgcagtgctatgcgctgccggaacgcctcgacctggtgaaaggtaccgttattggccaccgtgatggctacggctttctgcgggttgaagggcgtaaagatgatttgtatctctccaagcgagcagatgaaaacctgcat

SEQ ID NO: 129983 - DNA, 401 bp, Homo sapiens
cgtttgaagatctgcccgatgaagaagtgggtagccgcgaactggacgacgacacgcttgccagctaccagaaacagtttaactacagcgcggaagagctggactccgtaattcgcgtactgggcgaaaacggtcaggaagcggtcggttcgatgggcgatgataccccattcgccgtgctctccagtcagccgcgcattatttacgactacttccgccagcagtttgcccaggtgactaacccgccaatcgacccgctgcgtgaagcgcatgttatgtcgctcgccaccagtatcggtcgtgaaatgaacgtgacgatgaaagaggagcactaccgcgcagatacgctggatatcacctttgacgtcactaaaaccacgctcgaagcgacagtcaaagag

SEQ ID NO: 129984 - DNA, 3675 bp, Homo sapiens
atgtcgtcgctgtacggttccgatgcgctcggcggtgtagtgaatatcatcaccaaaaaaatcggtcagaaatggtcgggtaccgttaccgtcgataccaccattcaggaacatcgcgatcgcggtgacacctataacggtcagttctttaccagtggaccattaattgatggtgtgctgggaatgaaagcttacggcagcctggcaaaacgtgaaaaggatgacccgcaaaactcaacgaccaccgataccggagaaacgccgcgtattgaaggattctccagccgcgacggcaatgtcgaatttgcctggacaccgaatcaaaatcacgattttactgccggatacggtttcgaccgtcaggatcgtgatcccacctcgctggacaaaaaccgcctggaacgcacagaactactccccagacctgctcactcgcacacgctgccaccccatcatcgccccgtgctgcacaactcaccccccaccaccatcgccgtcacaccgccacgacaacactcaccccgtcattcccacgccgcccactctccgccccactctccacgcgtcgctgctacacctcgtctgcgccacacgggccccactcccgaatggggcgtggtgcatcagcatccactcgaacgcttgcccgccaagctgtcggcaggccgcaaatatcgcgagcggttgatggcgaccggggcacgtcattacgggaatattcgtgccaccgcgcagaagtggctggaagaggtggagattcccgccaaccggatcgacgacctgccgaccaccttttccggcggtatgcagcagcgtttgcagattgcccgcaacctggtgacgcatccgaagctggtgtttatggatgaaccgaccggcgggctggatgtgtcggtgcaggcccgcctgctcgacctgctgcgcggcctggtggtggagctgaaactcgcggtggtgattgtcacccatgatgttagcgtatcgtccctgctggcggaccgtttgctggtgatgaagcaggggcaagtggtggagagtgccttaaccgaccgcgtgctcgacgacccgcatcatccgtatacacagctgctgcatttgcgcgccgaaaccaatattcagtatgaagggcgtcagggtgggacgctgcaactgttccgtaccgaacaacagtatgaaaatgcgaccccgcgatatcgccgtgctggaagatgccggcgtaccgtatcagctgctggaatccagcgcctggcggaagtggagcccgcgctggcagaagtggcgcacaaactgacgggcggcctgcagttacccaatgatgaaaccggagactgtcagctatttacccagaatctggcgcggatggcggagcaggcgggggttaaattccgctttaatacgcccgttgaccaactgctttgcgacggcgagcaaatctacggcgtgaagtgtggcgatgaagtgattaaggccgatgcgtatacttgcgaaattactttaatctacgtggaaacacacaggcttggctctgatccctatcagtctcggtcccatcttacccacttccggcgtgaacatttggagaaggccagaccaaatgtgcccgttgaatttgccagctccatatttggcacaatcccggcaatcacactccagaccaagaaaagcccacagcgtcatagcgatggaagaacctaccgcactgaagaacggtgcatgatgcggattccaggaatcaacgtacagcgtcgggctaaaccagaaccagccaataatgcacagaccgacgaccggaataatgaccccccacacggtaatgctactgatttgcccggtaatgcgcgcaccaccaaagttagccacggtacaaatccacagcaccccgatggtcgcaagaccaatctgcactggcgacaaactcgcgccgagcagttcggtgccgtaaccaaccgccgaaatagcaatcgcgacgttagcaatcagcaagataaacggtttcgccgttttctcttcgcgtttttcgatctctaccggcagcgcgatatggtcggagtatttgctgatgatggaacgcacgcgccagtcatcgaggaaccggtcttcgccttcacgcagatgcagggtgatttcagtaccacgatcttcttggtgatgtcggcaacggtgtattcaccttcgccagccgattcccagaagacgccattttctggtttttcgccttgccgcgcgaaacccagggattcgaggaatgatttggtaccggatttagcgatagtccccagatggtcaatcacttcgtcgcgtgtcatccccacgccgttatcggagatggtcaggaacccagcaccagaacgcctaagggagaaaaactaccggccaaccaagggcaccattcgagcaaaattacaaggttgcagcaacccattcgggaaaaagccgaacccgtccagcgggccatcttcggccaataatagcccagacttggcggacaaacggggaattgttacaacaaaagccgaattaaagctgcggataaacgcccaggggttactacccaagtacaccgaacgtttgtacaaacgacccggccaaagaggagagggcgatttcacccagcacgccttcgttagtggggacatcacgccagcccacaatcgacaaggtttcgcgttgcagttcttcttcaacgatgcggcgtgcggcagcggcgagttcaggatctttattcaggaagagcatcccgacagccaagccgcaaccgtcgccggttttaccatcggcgagaatcgcgccacggtgctgcatgcgggccagtgcgtgtattgcagtacgcactaccttgtggctaggttcgccttctatgtgggcgatcaggccgaaaccacagttatccctctcaagggatttatcgtacaacatatcgtgaacctcccccaggctctgcgggaaccccacttccgaaccgtgcgcacgggcacagaaagagcgtggcgacggggtgaggtcatccaggccacaacgccaaggatcgtcttcaccgaccagttgcccgtcagcaaaaccttcccgttgatagctatagggaatatcttctccgttatcgccatcattaaggaccattctgccgtcgtgggtaaagatggcaaaggcatgatggattccaaaaaggcactgactgaagctaacggcgacatcgagctggcaatcgaaaacatgcgtaagtccggtgcttttaaagcagcgaaaaaagcaggcaacgttgctgctgacggcgtgatcaaaaccaaaatcgacggcaactacggcatcattctggaagttaactgccagactgacttcgttgcaaaagacgctggtttccaggcgttcgcagacaaagttctggacgcagctgttgctggcaaaatcactgacgttgaagttctgaaagcacagttcgaagaagaacgtgttgcgctggtagcgaaaattggtgaaaacatcaacattcgtcgcgttctgcgctggaaggcgacgttctgggttcttatcagcacggtgcgcgtatcggcgttctggttgctgctaaaggcgctgacgaagagctggttaaacacatcgctatgcacgttgctgcaagcaagccagaattcatcaaaccggaagacgtatccgctgaaagtggtagataaattataa

SEQ ID NO: 129985 - DNA, 1951 bp, Homo sapiens
tcatctggcctgaactgccggaggagtaggccattcaatatctggcgcactggaagtatcgaccagctccagtgcgtccagataatccagccacaaattatattgcgccagttcctcacctttcagacgaccaatagccgctttaccagcccattgtttactgttcatataatcgttggcctgattaatcaattgctgctttttcagttcggctgcagcaatctgttcctcatgtgttggtggtggaatttcagaccatgcaggaaaaccattttctccagcgatacggatttttcctttcggcggtaatccggaaaactcaatatacacttgctcatcaacttcaacagcatcatctggccatgagccagcttgcgtgtaaaagtacatatttgctgatttaacagggatttttgtggatcggacttcagattgataaaggggacgccccgtagctccgacgacagcataaaaataatgctttttcaccagcccaatcagcgagccgccatcggcgacgaaatcgcgcattagctgcgcttcattcagaccgctgacgacctggcgatgcagggcctcaatcgcgctcgatgcaccaattttatgtgcggaaggggcgattttttccagcaatcgcaaggtatcttccgttagcggtcgacgatctccagtgtgcggatcggtgatgacgccttcaagcccatagcgatcgacagccgtaaagccatgtgagatgccattgtgacatgatttgtacagcctttgtgatgcgttacggtagttgagcatcacggtacgataatctttggcatcggcataggtgtctaccaggcggcccagcgtttcataggcaaggtatggataaatagccgtcgcgccgaagcccagcaacacggcgaagtggtgcggatcgcgggcgctggcggtttcgacgatgatgttggcatcgcaacgcaggctttgatcgaccagacgggtctggatcgcgccaaccgccatcggggctggaaccggcaggcgatctttagcgatattccggtcggagagcaccagcagcacggtgccgctacgtaccattttttcggctttgacgcacagctctttgactgtcgcttcgagcgtggttttagtgacgtcaaaggtgatatccagcgtatctgcgcggtagtgctcctctttcatcgtcgtgagctgtttgaaatcggagtagagcagaatcggcgatttaaagcttaaacggtgcgcctggccctctgcttcgcaaaagacgttcatttcacgaccgatactggtggcgagcgacataacatgcgcttcacgcagcgggtcgattggcgggttagtcacctgggcaaactgctggcggaagtagtcgtaaataatgcgcggctgactggagagcacggcgaatggggtatcatcgcccatcgaaccgaccgcttcctgaccgttttcgcccagtacgcgaattacggagtccagctcttccgcgctgtagttaaactgtttctggtagctggcaagccgggtcgtcggccagttcgcgggtacccacttcttcatcgggcagatcttcaaacggtaccagtcggcggacgtttttctccatccactctttatatggatggcggcttttcagatcgtcatcggtttctgccgagtgcagaatacgcccactgcgggtgtcgataaccatcagttcgcctggcccgacgcggcctttttcgaccacttcgtcaggctggtaatcccagataccgacttcagaggcgcaggtgatgagcaatctaatgggcaccaacggagtgttgcgtccagcgagggcatacaggaacgaggcagttttatcgtgagcactggtttctgcgatgtattcgcagactttcaggaacgcgtcttttggcgtaccacagatgttttcaaccacatctggcgtgtagcgggaaacgtg

SEQ ID NO: 129986 - DNA, 1466 bp, Homo sapiens
atgaaagaggagcactaccgcgcagatacgctggatatcacctttgacgtcactaaaaccacgctcgaagcgacagtcaaagagctgtgcgacaaagccgaaaaaatggtacgtagcggcaccgtgctgctggtgctctccgaccggaatatcgctaaagactcgcctgccggttccagccccgatggcggttggcgcgatccagacccgtctggtcgatcaaagcctgcgttgcgatgccaacatcatcgtcgaaaccgccagcgcccgcgatccgcaccacttcgccgtgttgctgggcttcggcgcgacggctatttatccataccttgcctatgaaacgctgggccgcctggtagacacccatgcgattgccaaagattatcgtaccgtgatgctcaactaccgtaacggcatcaacaaaggcttgtacaaaatcatgtccaaaatgggcatctccaccatcgcctcttaccgctgctcgaaactgtttgaagcggtcggtctacacgatgatgtagtgggcctgtgcttccagggggcggtcagccgcattggtggagcaagctttgaagacttccagcaggatctgctgaatctgtcgaaacgtgcctggtggcgctgcagattgtctgcgaccatcgggtgctgtgattgtacccgtggctacttgggtggtgcgcgcattaccgggcaaatcagtagcattaccgtgtggggggtcattattccggtcgtcggtctgtgcattattggctggttctggtttagcccgacgctgtacgttgattcctggaatccgcatcatgcaccgttcttcagtgcggtaggttcttccatcgctatgacgctgtgggcttttcttggtctggagtctgcgtgtgcgaatactgatgtagtggaaaacccggaacgtaatgtgccaatcgcggtactcggcggtacgttaggtgcggcggtgatttatatcgtctccaccaacgtgattgccgggattgtgccaaatatggagctggcaaattcaacggcaccatttggtctggccttcgcgcagatgttcacgccggaagtgggtaaagtcattatggcggttgatggagatgtcttgtgcgggttcgatacttggtggcaagttcaccattgcacaggtgtttaaatcttcatctgatgaagggtacttccttacaattttctcccgtgtaaccaaagtggatgcaccggtgcagggaatgttgaccattgtgattattcagagtgaattggcactgatgaccattagcccgtcgctaaacagtcagttaaaggagatggttaacctggcagtggtgaccaatatcattccgtatattctgtcaatggcggcattagtcattattcagaaggtcgctaatgtgcccccgtcaaaagcgaaagttgcaaactttgttgcttttgttggcgcgaggaatagcttttatgcgctgtaa

SEQ ID NO: 129987 - DNA, 3669 bp, Homo sapiens
atggggatcgtcaacgccgggcaactggcgatttacgacgacctacccgctgaactgcgcgacgcggtggaagatgtgattcttaatcgtcgcgacgatggcaccgagcgtttactggagcttgccgagaaatatcgcggcagcaaaaccgacgacaccgccaacgcccagcaggcggagtggcgctcgtgggaagtgaataaacgtctggaatactcgctggtcaaaggcattaccgagtttatcgagcaggataccgaagaagcccgccagcaggctacgcgcccgattgaagtgattgaaggcccgttgatggacggcatgaatgtggtcggcgacctgtttggcgaagggaaaatgttcctgccacaggtggtcaaatcggcgcgcgtcatgaaacagggcaaagagcagggcaaaaccaacggcaagatggtgatcgccaccgtgaagggcgacgtccacgacatcggtaaaaatatcgttggtgtggtgctgcaatgtaacaactacgaaattgtcgatctcggcgttatggtgcctgcggagaaaatttctcgctcaaaggccactgccgagcgggaaccactgccagtgcaactcaccggagagcgagtgcgaagaaggaaagcaaaagtaccacaacaaccagccggttatggtgccgaccagcaggccataacgggcaaaacgttgcggcaggaagataatcatcgccagtaccaggcacatcaccgccaccgagagcgcgaacggcgcccgagcatacctttgaaaaagatagtggtcagctgcgcgcccagcatcaacataaacaagaccatcaccgacggcgtaaataaccgtgccaggcgatggcctaatccgctaaaaccaatcaacatcgtcagcacgccggagagtgcaatccccactgccaggctggtggcgatatcgttgatcggtgtcccgcgcgatgcttcaccaagggtgataatccttctcggcttcctctgcaacctgaatgaactctttgccacggtgactcacttccatcaccgacgtaccaagaccgttccagtcgcgcagttcctgttgagcctgtttaagcacctctgccggttcaagacgatatttcctagcttccacataacattgaaaaacgccactgagcactacagctatctcaatagcctacgactggtggcggcaaacagctatacgtcagtggcttttcctgcaatcagtactggggtttatggttaccctcgtgcggcagcggctgaaatcgcagtaaaaaccgtttcagaatttattacccgtcacgctttacccgaacagatgtcatggcataagacccgtggtagaggacgtgccgatgatttcgcctgctactggtatgccaaatcggatatactatgtgacatgtgctctaaagcgcagcacgatcaactgtatcagctgtcgtcatcaggcgtgaccaaagtctcagcattacctgactcgctcaccacgccgttagggagtttgtggaaactgtatgtttacgcctggctggaggatacccatcaaccggagcagccctaccagtgtcgcggaaactccccggaagaggtttattgttgtcaggctggggagagcataacgcgcgataccgcgctggtacgttcctgtgggctctattttgcgccgcagcggttgcatattggcgcagatgtgtgggggcaatactggcaacagcgtcaggcacctgcgtggttagcgtctctgactacgctgaagccagaaacctcggtaacggttaaatcgctgcttgattcattagcgacgttacccgcgcaaaacaaagctcaggaagtcttactggatgtggtgctggacgaggcgaaaatcggtgtcgcatccatgctcggtagtcgggtacgggtgaaaacctggagctggtttgccgatgataaacaggaaatccgtcagggtggttttgctggctggttaaccgatggtctggttgcccgtttcctcgggagtttgctcatcgcgccccgcgtcagcgatccttcccgcctgatttccgccttgcgcgtgctggcactgctgacacttctctttgctgtcgccttctgggcgggggcgcacgtagcgtggctgatgctggtgatgattggctttaaccctctttttctcaccactgtgcgactgtggggctcggtggcgtttgtcattggctcggcgctgacgggcaaactggtcactatgtttgattatcgggtgatcctcgcgctgttgacgttgggcgtggcatccatgctgctcggctttctcatccgtccgacgattcagccacaaggggcaagtcgccagcaggagagcaccggcctgtaccgccagtacgacatgttcgcaaagtgtgccttcaatacaatcacaacgggcgaaacgaatactgctgcgggaataaaaacgcacatcgctcatcggccattgcacatcatcaacaactcgaacagcaggcactggcatcgctgcaaaactggggagttttccatgtctgaactgaacgatcttctgaccacccgtgagctacaacgctggcgattaattcttggcgaagcggcagaaacgacgctttgtgggctggatgacaacgcccggcagatagaccacgcgctggagtggctgtatgggcgcgatcctgaacggctccagcgtggtgaacgttccggtggattaggtggctcaaatctcaccacccctgagtggatcaacagtattcacacgctgtttccgcagcaggtgattgagcggctggaaagcgatgccgtgctgcgctacggcattgaagatgtggtgacgaatctcgacgtgctggaacgtatgcagccttctgaaagcctgctacgcgctgttttgcacaccaaacatctgatgaaccccgaagtactggctgccgcccgccggatagtgtgccaggttgttgaagaaattatggctcgactggcgaaagaagttcggcaggctttttctggtgtccgcgatcggcggcgccggtcatttattccactggcgcgaaactttgatttcaaagtactctgcgcgccaacctgctacactggcacccgcaacacgcgaacaagggcgcgcgacggggcttctccggacaaacctgtctacaccgaatggtgtgtagatatgagcaaaccgggcatcaaagtgaccaaacttgaaaagctcggtctgcgtatggatagctgctgtgaaatcacctttgacgacgtggaactggacgagaaagacatgttcggtcgggaaggtaacggctttaaccgcgtcaaagaagagttcgaccatgaacgtttcctggtagccctcaccaactacggtacggcgatgtgcgcctttgaagatgcggcgcgctacgccaatcagcgcgtgcagtttggcgaggctattggtcgtttccagttgattcaggaaaaattcgcccacatggcgatcaaattaaactccatgaaaaacatgctgtatgaagcagcgtggaaagcagacaacggcaccatcacctctggcgatgcagcgatgtgcaaatacttctgcgccaatgcggcatttgaagttgtggatagcgcaatgcaggtgctgggcggtgtcgggattgcgggcaaccaccgcatccagccgcttctggcgtga

SEQ ID NO: 129988 - DNA, 2067 bp, Homo sapiens
tcaactgcagtgaggtccagcgtacatatcttcgtgcgcgcacacgttgaacggatagactgatgtgccatgaggcgtttgatgaatgtctgcggcatgtcggctatcagcctgtccagctcgtagagcattgccgtcgtctgtggtgtgccggttgcgggcaagtccatcgtcagccggagcggcctcgacagctccactaatctggtcctgacgttctagatcagagcttcgttgagcggctgtccagtgttcggcgtcgcgagagatcgcgagcaatagcatgtcgcgatagctccagaatagagccaggtgtccggtgtactggggcctggcgacgttgcgatattgccctgtcaaggcgtaggcatttccgtcctctttggtgtgaccttttgcagtacgtccatcgtagccggaccggcgctggccctccccaaccaggtctcggcccgtggcggacgataggccccgatttatggccccgtttaccgttggtacgggagccttgccactttcgcgaatgacggctatggacgacagcgccacttcccgtggcggtaccgcaattggaattctgcggaagaatggctgtaattccgccagttttgccttaatggctttcgcggtatcgagagcattcgcgccggttgccagcttaactcggacaacgccgccagttggtcggcctgatgttccttccatcacttcatccaggcggtagagcgtcaggttgatgcggtgatcggtaacgcgccctttcaccgctttctggtagcaaaccggaagcaaatccgcaaaaggaattaccactaagttgatgctgccagttgacggaaaccgtggcgtgtttgaacgctttgttccagttaatattaaggttgcttgagtcattgtcaccgtcgtaactatatgttttatagccatgttaaatcgggcaggggaaccagactcgaccggattgatgccgcctgataattttctgctacgataacgccgccgttcattgcactccagcgtgtcagattccatccgctcgatgcattgctgctgtttgttatcagtctctggctccagttgggattgccggacgaactgtcgcgctttacgccattctgtctggcgctgccgattatcgcgctggcctggcactatggttggcaaggggcgctgattgcgacgttgatgaacgccatcgcgctgatcgccagtcaaacagggttgttgcttggcgctggcatccagcggttgcgtgaacttaaccagtcgctgcaaaaggaactggcgcgcaatcagcatctggctgaacggttgctggaaaccgaagagagcgtgcgccgtgatgtggcgcgtgagctgcatgatgatatcggtcagaccatcactgctattcgtactcaggcgggcattgttcagcggcctggagcaggccatccgctcactgatgcgggaaatggagctggaagggcgcggtattgtcagccatctcgaatggcgaatcgatgaatcagcgttaagcgaaaagtcgtagagcatcggtgcttcgtcgatttcaccttcaccaatgacgatggtgccgtcaatgttgaccgccgcgccgtccgcggtgtttttatcgccgcgtcctaaccatttgtagccagccagcgccgctgattcggtgacgcgggaaaattcgatggcaagttctcgtctcatagcaaactgctcagtggtttcgatgcctggacggaactcgcgctcaatcaccgctttctcttgcagctcgtcgaggttctgccagaagccaaccgccagcttcgccagtcgggcgcaggcgatggtggtcagcaggccgttttctgatttcaccgctttctcgccagtgttcatcagcataaagcagccagtgcttctccgccgtacctgttccgcataaaatgcccagtcccacggctgcgcgctaaacccgccctgctgcttatcgataaccgcctgtatggaggctaattcatcgctcgcacgttgacgcgccgctggaacaatttcccgcataaagttaagtgctgcttcaggtgtttttgccat

SEQ ID NO: 129989 - DNA, 666 bp, Homo sapiens
atgtcagcaggacaaaggaaggagcaaaagttgatacccgtagagcgtcgccaaatcatccttgagatggtagctgaaaaaggcattgtcagtattgctgaactaacggacagaatgaatgtgtcacatatgaccattcgtcgggatttacaaaaactggagcagcagggagccgttgtgctggtgtccggaggcgtccagtctccgggacgcgtggcgcatgaaccttctcatcaagtaaaaactgcgctggcaatgacgcaaaaagcggctattggcaagctggcggcaagtcttgttcaaccgggaacatctgattcacatggagtcactgactgtggtccaaacagtgtcatgggagtcgtctcagatgagatgtcatactatgtgaatgctgaacgagatcacgacgaacgtgaaacgagcttgaacggcagtatcagtcccaatctccattacacccaagtcagccttgccgcaggagcaagcggcagtgatagccgtacttacaacgacacacgacgatcgtcaagaatgagttcatcgcagcgcactgcaaattgcacactctctgataacgcctgtaatgaagaagtatcatcacgttggatcccaagacaagccccgagtagccctaataacccgcttcgggtcggaaatcttccg

SEQ ID NO: 129990 - DNA, 1137 bp, Homo sapiens
atggggaaatttggacacacagaaattggtgaagttgatgtcagagactggagtgatgctttacaagccaaggaactccaaaagttgccaggacactccaggaagctagaagaccctcctaccagcctcttcatgctcctgaaccctcactccgaccagttctccagcaatgcccatcaccacctccacgctacagcgattgatgatgattataccgatccgactaaaagcacttatgcgcttggtttaaactggtctaactccattctgggtggtttcaacatcagtggctataaaacatatagttacgacggtgacaatgactcaagcaaccttaatattaactggaacaaagcgttcaaacacgccacggtttccgtcaactggcagcatcaacttagtgcttcagaaaataatgaagacgatggtgatctgttctacgtcaacatcagtattccatttggcagatcaaacaccgccacactgtatactcgccatgacgatcataaaacccactatggtactggtgtcatgggagtcgtctcagatgagatgtcctactatgtgaatgctgaacgagatcacgacgaaccgacgttacccgcgcaaaacaaagctcaggaagtcttactggatgtggtgctggacgaggcgaaaatcggtgtcgcatccatgctcggtagtcgggtacgggtgaaaacctggagctggtttgccgatgataaacaggaaatccgtcagggtggttttgctggctggttaaccgatggtacaccgctgtgggttactggcagtggcaccagcaaaacggtactaacccgttatgcgacggtgcttaatcgggttttgccagtgccgacgcaggttgccagtgggcaatgtgtagaggtggagctgtttgcccgctatccgctgaagaaaatcacagcggaaaagagtacgacggcagtaaatcccggcgtacttaatgggcgctatcgtgtgacgtttactaatggtaaccacattacgtttgtcagccacggtgagacgaccttactgagcgaaaagggcaaactgaaattgcagtcgcatctcgatcgtgaagagtacgttgccagagttctggatcgcgaggcaaaaaagtacgccccctga

SEQ ID NO: 129991 - DNA, 695 bp, Homo sapiens
tcaccaaatatgagcaacgtttttgtaattcagaatttggcgatctgaactgagcgcagcggaagtggcgttaatcaccacgttgttattgcgtggtgccagacgccaggtgaactgcgcagccgcgccgcgcgaatgtatgaattcgcgatatggcggaagtggagtcgacgctggaacaactggcaaatcgcgagatggtccttttgtggtgcgtctggcccgcgaaccgggtaaacgcgaaaccgctacatgcatcttttcagtggtgaggttgaagatcagccggcggtgcggatatgtcgaacgcggttgacggtgatttacaggcccgcgtcgaagcctggaaatcgaagtggcagaactgaaacagcgtcttgattcgttgctggccatcggtgctggcggcagcgtctgctggacgttacaaggagcctggtcgcctacgcgcgcgaaagccggtgagttaaaaacgcaactcgccaccgcagcctcgctaagaatgataaacatcgtagcaatagcgtcgggccacacgatctttatttcacgttgctggatgattatctgcatgtggtggataccgcgctgtggttgtcgggcggcaaagcctctctggatggcggtacgctactgactaacgacgctggcgaaatgctgtttgccgagcaccatttttcggctggtcctttgca

SEQ ID NO: 129992 - DNA, 235 bp, Homo sapiens
cagatcctgagcgacaaacgaggtcaccagcatggtggtggcattactgctctgtaccagtgcggtaacgccgatccccgcgcaaaaggcgagcggctttttttcgacgctccggcccagattcggtgccagccagcgctcaacttcggtaacgctcatacctttacggcgggcataatcttcaacctgatcgcgctgaatttgtgctacagcgtagtacttgctgtccgggtgg

SEQ ID NO: 129993 - DNA, 593 bp, Homo sapiens
atgatcgataacggtcatgccgctcggttggcagggttttatcaccgctggtttcgttattcgccatgtgaatggcgtgactatcttgctgaactaaatgagcaaggtcaggcttatgcgcaatttgtcgccagcaccgccgaatgctgtggcgaagggggaatcaaagcctgggattatgtccggatgggttttttaagccgaatgggcgtacttaataactggttgagcgaagaagaaagtctatggatccagtcgcgcattcatctacgggctctacgttattatagtaactggcggcaatactttgccggttatacctttggtcggcaatattggcagtctcccgaagatgatcatctgcctttattacgcgaattcttagcgcgccacgagtatatgcagaagtatctgctggggaccgaaagcgggattcagggcgaggaactcggtgccagcgacgggatcaaaccggaagaagtcgagtggcaaactgcagcgattgaaggcaagctcgacctgctggtgacgctcgacttccgcatgtccagtacctgcctgttctccgatatcgttctgcccaccgccacctg

SEQ ID NO: 129994 - DNA, 4106 bp, Homo sapiens
agaagttcgccacagcaatccgaaaccactggcacgtggagaataagctgcacaggcgtctggacgtggtaatgaatgaagacgactacaaaataagaagaggaaacgcagcagaattattttcagggatacggcacattgctattaatattttgacgaatgagaaggtattcaaggcagggttaagacgtaagatgcgaaaagcagccatggacagaaactacctggcaggaattcgcccggaagcgcagaaagaatcgacggcttaccacgaagcgggtcatgcgattatcggtcgcctggtgccggaacacgatccggtgcacaaagtgacgattatcccacgcggtcgtgcgctgggtgtgactttcttcttgcctgagggcgacgcaatcagcgccagccgtcagaaactggaaagccagatttctacgctgtacggtggtcgtctggcagaagagatcatctacgggccggaacatgtatctaccggtgcgtccaacgatattaaagttgcgaccaacctggcacgtaacatggtgactcagtggggcttctctgagaaattgggtccactgctgtacgcggaagaagaaggtgaagtgttcctcggccgtagcgtagcgaaagcgaaacatatgtccgatgaaactgcacgtatcatcgaccaggaagtgaaagcactgattgagcgtaactataatcgtgcgcgtcagcttctgaccgacaatatggatattctgcatgcgatgaaagatgctctcatgaaatatgagactatcgacgcaccgcagattgatgacctgatggcacctaggggtcccaccccagacctgtgtgggaccccgcgcctttatcgcggaaacgtggaaagcggcataaacggccgccgcacacaggtgaacgcttcaagtgattcgctgcacgggttaaacccgggggacaacgccgcgggtttctccgcagaagagcgcgaaaccgccaaaccggcactggtgatggcctgtgttggcgttactgaaggggcgattcctttcgccgctgccgatccgctgcgtgtcattccttccatcatggtcggttcagtttgtggtgcagtaactgcggcgctggtcggtgcgcagtgctatgcaggctggggtggtctgattgtgctgccggtggttgaaggcaagctgggttatatcgcagcagtggctgtcggagcagtggtgacggctgtttgtgtgaacgtgctgaaaagtctggcgcgtgttgcccatacctatatggcagcagaggcgctggaaagtgccgcgaaagcgaaaggctgggaagtgaaagtagaaacccaggggtcaattggtctggaaaatgaactgactgcggaagatgtggcgagcgctgatatggtgattctgaccaaagatatcggcatcaagtttgaagagcgttttgctggcaagaccatcgtgcgcgtcaacatcagcgatgcagagttcctaatgacgatggtaccggcggcctttggcgttccggcaacggtgcacattttattggcggcgctggtaggtatcgcacctatttatatcgccattcaggcaatccctgacggtacgggcaaaaatgctgccgatggcacccagcatggcgaaaaaggcgtacctttttatcgcgatatccagttgctgctgataggtgttgtggtgctggcgatggcctttgccgaaggttctgccaacgactggttacccttattaatggttgacggtcacggttttagccctacttccggctcgctgatttatgccggttttaccctggggatgaccgttggacgcttcaccggcggttggttcatcgaccgttacagtcgcgttgccgtggttcgggccagtgcactaatgggggcgttgggtattgggctgattatttttgtcgatagcgcctgggtcgctggggtgtctgttgtactctggggactgggtgcctcgctgggcttcccgctgaccatttctgccgccagcgataccgccccgagcaccaacccttttgatacgactttagctcggtacccggaaggctgttcaatcgtgattaagccttcggaaaccacgccactgacgatgttgcgcgtggcggaactggccagcgaggctggtatccctgatggcgtttttaatgtcgtcaccgggtcaggtgctgtatgcggcgcggccctgacgtcacatcctcatgttgcgaaaatcagttttaccggttcaaccgcgacgggaaaaggtattgccagaactgctgctgatcacttaacgcgtgtaacgctggaactgggcggtaaaaacccggcaattgtattaaaagatgctgatccgcaatgggttattgaaggcttgatgaccggaagcttcctgaatcaagggcaagtatgcgccgccagttcgcgaatttatattgaagcgccgttgtttgacacgctggttagtggatttgagcaggcggtaaaatcgttgcaagtgggaccggggatgtcacctgttgcacagattaaccctttggtttctcgtgcgcactgcgacaaagtgtgttcattcctcgacgatgcgcaggcacagcaagcagagctgattcgcgggtcgaatggaccagccggagaggggtattatgttgcgccaacgctggtggtaaatcccgatgctaaattgcgcttaactcgtgaagaggtgtttggtccggtggtaaacctggtgcgagtagcggatggagaagaggcgttacaactggcaaacgacacggaatatggcttaactgccagtgtctggacgcaaaatctctcccaggctctggaatatagcgatcgcttacaggcagggacggtgtgggtaaacagccataccttaatgacgctacttaccgtttgtgggatgaagcagtcagaacgatttttttcattaaatttagagatccctgggcgtagacggtgccaacgaagtgataacgagattcgtcagggccagccgattggtctgggcgaagcatctaacgatacgtggatcaccaccaaagtgcgttcgcagctcttaaatgagccattgttccccaactacctgtttgtggaatttgacccagaagtgattcataccacgactatcaacgcgacccgcggtgtcagccacttcgtgcgctttggcgcgtcgccagcgatagtcccatcggcggttattcatcagctatcggtatataaaccgaaagacattgtcgatccggcaaccccttatccgggtgataaggtgattattaccgaaggcgcgttcgaaggctttcaggccattttcaccgaacccgatgggtgccaaaaaaggttattaagcgcgctcggcaaaagttgcctgagctggaaagcatttcgccgaccgccgccgctacgcaagtggatggtacgcaaatgtctttgctgtcagtaccagaagaaacttcgcctgcggtcgaagctctggaaaatcttgatccggattcactcaccccgcggtaaaaccatgccatctacacgctatcaaaaaatcaatgcccatcactatcgccatatatgggtcgttggtgatattcatggtgaatatcagttattacaatcccgcttacatcaactctcttttttccccaaaatcgacttacttatttctgtcggcgataatattgatcgtggaccggagagtcttgacgtcctgcgcctgctaaaccaaccctggtttacgtcggttaaaggcaaccacgaagcgatggcgcttgaggcattcgaaactggcgatggcaatatgtggcttgccagcggtggtgactggtttttcgatttaaatgattcagagcaacaagaggcaatagatctgttgctgaaattccatcaccttccacatattattgaaatcactaacgacaacataaaatatgccatcgcacatgcagattatccggggagtgaatatctctttggtaaagaaatagcggagagcgaattactctggcctgttgatcgtgtgcagaaatcgcttaatggcgagttacaacaaataaacggcgctgattattttatatttggatggcgcacacatcctgaccatcgatttacactctaa

SEQ ID NO: 129995 - DNA, 1361 bp, Homo sapiens
atggagatgagttccttggagtttcttcacagcatctgtagccatctgaagtgtcatcttctgtactatattgccagtgcctacaattacgactggtatactcaaccagccaaactaagcttcataagtgaaggagaaataaaatactttacagacaagcaaatgctgagagattttgtcaccaccaggcctgccctgaaagagctcctgaaggaggcagtaaacatggaaaggcgcaacaggtgggttgatatcggccccggtaccgagctcgattgtatcagtcaggcttatgcgcaatttgtcgccagcaccgccgaatgctgtggcgaagggggaatcaaagcctgggattatgtccggatgggttttttaagccgaatgggcgtacttaataactggttgacgcgaagaagaaagttgctatggagtgccaggtcgcgcattcatctacgggctctacgttattatagtaactggcggcaatactttgccggttatacctttggtcggcaatattggcagtctcccgaagatgatcatctgcctttattacgcgaattcttagcgcgatatgagcgacctatgaaaaagttggctggaagatcctcgatagccattttggcgttccggggccacgaccagcgcgattacgagttcccctctaaatccgccttgaacatcaaccggtttatcttgccagctgacgtctctgacccagatctttctcagcaagccctgactgaaaaaggcgtgctgttcaactctggcgagttcaacgttctggaccatgaagcggccttcaacgccatcgccgataaactgactgcgatgggcgttggcgagcgtaaagtgaactaccgcctgcgcgactggggtgtttcccgtcagcgttactggggcgcgccgattccgatggtgacgctggaagacggtaccgtaatgccgaccccggacgaccagctgccggtgatcctgccggaagatgtggtaatggacggcattaccagcccgattaaagcagatccggagtgggcgaaaactaccgttaacggtatgccagcactgcgtgaaaccgacactttcgacacctttatggagtcctcctggtactatgcgcgctacacttgcccgcagtacaaagaaggtatgctggattccgaagcggctaactactggctgccggtggatatctacattggtggtattgaacacgccattatgcacctgctctacttccgcttcttccacaaactgatgcgtgatgcaggcatggtgaactctgacgaaccagcgaaacagttgctgtgtcagggtatggtgctggcagatgccttctactatgttggcgaaaacggcgg

SEQ ID NO: 129996 - DNA, 1100 bp, Homo sapiens
gtaacggttccatcaacggcatggtccgtgctggagcatgaaggcggaatcgctgcaactctgtcgcgccgactgtcaacgccgattccagccgatgtcgtttggcggtcattttcgccattaccgcttgtctgtctgctggcgttatcgcttcattcggcctgaacacaaaacggcgttcacagctcgctttccagtcgataaccgcctgggtcagatggtcgccaaaccctttcacttgcttaacgccacgacgggtaacatctgcggctgtttcaataccaaaagaccgtaacgccgctttacgcgcagggccaacgccgggaatagaggcaacatcaataaaaaatccctccagaaacttctgcttctgccgttcccttgcagtgtcatgaagtgctgccagagcgcgtttctcttcttccggtaacccgagaatttcgtccttcattttttcgagcatcgtccgtttggcgataaaaccttccaggccgcctacctgctggatctggcggactaaatggtcatagtccattttcgcacgattaaatgcctcacggcgttgctgaacttctgctttgtacgctttgcttgtcagactgccaataatccagataaccgccaagggaatcctatagacaccgctggcaagccacatattgccatcgccagtttcgaatgcctcaagcgccatcgcttcgtggttgcctttaaccgacgtaaaccagggttggtttagcaggcgcaggacgtcaagactctccggtccacgatcaatattatcgccgacagaaataagtaagtcgattttggggaaaaaagagagttgatgtaagcgggattgtaataactgatattccccatgaatatcaccaacgacccatatatggcgatagtgatgggcattgattttttgatagcgtgtagatggcatggttttaccctgtaaaataagctttcctattatacagggtgtttttattttattcgtcagtggtcgttaatattcccgatagcaaaagactatcgggaattgttattacaccaggctcttcaagcgataaatccactccagcgcctgacgcggggtgagtgaatcc

SEQ ID NO: 129997 - DNA, 952 bp, Homo sapiens
atgtatttaggtgcctgcctttttgcccctttcttcctcatggggaattgatgaccgtgatgacctgctgcgcacaattcaccgaatgatcgataacggtcatgccgctcggttggcagggttttatcaccgctggtttcgttattcgccatgtgaatggcgtgactatcttgctgaactaaatgagcaaggtcaggcttatgcgcaatttgtcgccagcaccgccgaatgctgtggcgaagggggaatcaaagcctgggattatgtccggatgggttttttaagccgaatgggcgtacttaataactggttgagcgaagaagaaagtctatggatccagtcgcgcattcatctacgggctctacgttattatagtaactggcggcaatactttgccggttatacctttggtcggcaatattggcagtctcccgaagatgatcatctgcctttattacgcgaattcttagcgcaggaaacgactgacgtcgatattatccgccgcgcttatctggcgctgttaccgtcctttcatacagaaaccgatccgcagggttttaaacaacttcgtcatgcgtatgatgatgcgctaccgattgcgcagtcgcctgctaaatctgttttgcaaccagaagaatatgagtgggaagcgttgctggtggaaatgctcggcctgttgcatcgtattgcgatggtacaactttcgcctgctgcacttggcaacgacatggccgccatcgagctgcggatgcgtgaactggcgcgcaccataccgccgacggatattcagctttactatcagacgctgttgattggtcgcaaagaattaccgtatcgaacctgccaacttcatgcctgcacgtctgcagacacacctcttcgtaaaatcccgcgcttcagtggcaaactccatttttatgcgttttgccctaatatttattcttcttatcac

SEQ ID NO: 129998 - DNA, 1585 bp, Homo sapiens
atggctgacagggtagattcaaagtgttctcgttcgaggccgggcgcggtggctcacaactataatcccagcactttgggaggccgaggcgggcggatcaccttctggttgttgagtgccaacccgtcgatcaaccgcggtacgctggagaaagagagccgcaccgtcgcgcaacgtctctccgtgctgcacggcatcaacgcgccggagttcttcgacaaggcggtgttcagttctctggtgctgacactgcgtgatgaagggtatatcagcgatagcggcgatgccgaaccggcagaaacgatgaaggtttatcagttgctggcggagttgattacatcagacttaatgatctttaacatcagcgccaccgttctctacatcaccgccttcatcgcctgctctgcggcagttgacctgacatccctgaggggcacccggccttataaccagcgcgcggctgcctcgaaagaaatagaagacctgaaaaagaagctcacagaaggggaagaaatatcaggctgtgatgtcagtgggtcggacggagatgacaatgaagagggtaagattggagaagatgaagagaaaaggaacaccgggggaaataaagtcttcccagagaggacggttgaaacgccggcgacagcggatgcggagagaaaggcacttgaaacaaagcttgacgtggaagaagaaacaaggctgcagcttaattcgagaaacaggaaaaaagatcttaaaacccgacaagagcatcagtctttgcccgaaaagttctctggcctccagaagaacgtactgttggaggcggtgattgacccggctctgattgcacaacttcgtcaggcgtatgaggaggcgctacaggattgcgcaagcgcctgctaaatctgtttggcaaccagaagaatatgaggaagcagaacatgaaattctgctcgcctttcgtgcgttacttgcctctgatagtgaacgatttctgccctccgcctggcagcgattcattcagcaattaaattattgctcgatggaggagattgacgaattacgctggtcgctgtgcacaatcgccatgaacactgcccatttatccttcgagtgcgtggtgttattagcagaaagattgcggtggttacaggaggaaaataccggggaaatagacgaagaagaactggaatcctttttatatgccattgcgaaggggaatgtttttaacttccagaccattctgcatctgcccgttgccgtgcaaaatgacaccatcgatttttaccaaatgttcgctcggatttggctaccaggagccccaggggcatactgtgacgggctacacacaagcaagcgcactacctgcaccacctcaacccaccagcgtcagaggaaagacactcccccagcactcaacccacacacggctacttgcactccaccgcacacctggctgggagcaccacccccggccagcatgagaagtggcccccacaatgcaccaacaccaccattcactggctccacacccagacatacccacgaccacacaaacatcaccaacgccaacatcccacacaacgtcaactccaactaa

SEQ ID NO: 129999 - DNA, 1229 bp, Homo sapiens
atgggcgtacttaataactggttgagcgaagaagaaagtctatggatccagtcgcgcattcatctacgggctctacgttattatagtaactggcggcaatactttgccggttatacctttggtcggcaatattggcagtctcccgaagatgatcatctgcctttattacgcgaattcttagcgcgatatgagcgacctatgaaaaattgctggaagatcctcgatatagaggaaacgactgacgtcgatattatccgccgcgcttatctggcgctgttaccgtcctttcatccagaaaccgatccgcaggattttaaacaacttcgtcaggcgtatgaggaggcgctacggatttgcgcagtcgcctgctaaatctgtttggcaaccagaagaatatgaggtagcagaacatgaaattctgcatcgcctatcgtgcgttacttgcctctgatagtgaacgttttctgccctccgcctggcagcgattcattcagcaattaaattattgctcgatggaggagattgatgaattacgctggtcgctgtgcacaatcgccatgaacactgcccatttatccttcgagtgcgtggtgttattagcagaaagattgcggtggttacaggaggaaaataccggggaaatagacgaagaagaactgggatcctttttatatgccattgcgaaggggaatgtttttaacttccagaccattctgcatctgcccgttgcccgccgtcccgacatctgcacccagcacaatgaccagagccggtgcgagggctaccagatcctgagcgacaaacgaggtcaccagcatggtggtggcattactgctctgtaccagtgcggtaacgccgatccccgcgcaaaaggcgagcggctttttttcgacgctccggctaaggacagtacgcaaacgcgcgccgaagacgcgcattacgccggttcgaacaatatgagtcccccagaccagcagggcgacggcagaaagcagatttgggaatcagtccgcgtccataccccagttcggtgccagcagcggtcacttccggtaacgtcataccttaacggcggggaaatcttcaacctgatcgggctgatttgtcgaacacggagaattgcggcccggtgggtgaagtcccaccggaaccgtgcccggagtttcgaatgcctcaagcgccatcgcttcgtggttgcctttaaccgacgtaaaccagggttggtttag

SEQ ID NO: 130000 - DNA, 507 bp, Homo sapiens
  misc_feature (1)...(507): n = a,t,c or g
cgcccccccccttgaaatcgagacctataccagngcggtggaattcgagagacagaggcagcgtgtttgagctgctggtgcggtggtcagcgcgatgcccaaggccaagggcaaaacccggaggcagaagtttggttacagtgtcaaccgaaagcgtctgaaccggaatgctcgacggaaggcagcgccgcggatcgaatgacctggaggcagaagccagccttccagaaaagaaaggaaatactctgtctcgggacctcattgactatgtacgctacatggtagagaaccacggggaggactataaggtgagcggctcangccccgtgggctggctgggaaggcgccctggaccattcgcggcttgatctgcttgcgcagcacctgtttcctgaaaccgagtgcaaagaaagggaggcaaaagagactctaggaaatggatcccattgacagggatctaacttgaatgaatgcttatgggcaggatagactgagtgaccttgggtn

SEQ ID NO: 130001 - DNA, 722 bp, Homo sapiens
cggcacgaggttacacgaggtctgagagacagaggcagcgtgtttgagctgctggtgcggtggtcagcgcgatgcccaaggccaagggcaaaacccggaggcagaaagtttggttacagtgtcaaccgaaagcgtgatgagccggaatgctaaacggaaggcagcgcgcaggactcgaatgctcccacatccgacatgcctgggaccacgctaaatcggtacggcagaacctggccgagatggggttggcttgtggaccccaacagggccggtgccctcccgtaagagaaaggtgaaggccatggaaggtggacatagaggaagaggcctaaaagaacttgtaccggaagccctatgtgctgaatgacctggaggcagaagccagcctttcagaaaagaaaggaaatactcttgtctcgggaccttcatttgactatgtaccgctacatggttagagaaccacggggaaggactataaggccattgccccgtgattgagaagaattactatccaagatacccccaaacagatttcggagttaagatcaacgtctataaacgcttttacccagcagagtggcaagacttcctcgattctttgcagaagaggaagatggaggtggagtgactggtttacatcacagctgccccaggctgaggcgtcccccggaccagtgaagctggagccagggtgtaaggcaaagaggtgctgtgtggctcca

SEQ ID NO: 130002 - DNA, 1409 bp, Homo sapiens
  misc_feature (1)...(1409): n = a,t,c or g
tttttttttttttaaatacaagtggatttttagagtttattaagcaggggagtggaggggagatgtggcacaaatagaagtatgtaacattcaaacaacagcatctaggatttttgaaaaaactttcggttacagnttacacaaggggtcactgctcctccccagcgacagcagtgggcctctcaaaggagaggagggagtaattccccacggtaagggccagtggttgctcccctgggtttttggaaatccatttctgcggactttttcaagggccagaccgctggggctttagggtcgagactttcatagcagttgaccagccagaccccagcaaaaatggctgcgaaccgtgaaaacccctgggggcggcgatcgcgggtgccgcaatcaatgaagctgaaaagcgcctggcctgtttgcccccggtgggaaaggagtaagaggccgtaaggtgaagggcgggccgccgtggcccaggcaacctatgggtaccaccgggttctcgcggggtctttgcgaacgaacttttccttgaaactctctggattcctgtaaacagtggggctcagcccctcaatgactggaggcttcgatggttcaaaggggacctccggaattcacagggccgggagtcgccatgtccgggccacagcagcaggagaaaatcgggactccgacctcagcctcccggtgaaggtcatgaaaggggcggggaaacgaataaattgagccttgtacgcaggcgcaaatgctcgttgcatcctggggagtcgtagtgctcagcacgggtagttaaccaaaaaggactacatttccccaaatgcccgcaaagcctttgtgcaacgccttccggaaaggaatttgttaacacgaggtctgaaaagacagaggcaaccgtgtttgagctgctggtgcggtggtcaagcgcgaatgcccaaggccaagggcaacaacccggaggcagaagtttggttacagtgtcaaccgaaagcgtctgaaccggaatgctcgacggaaggcagcgccgcggatcgaatggtgagggggctggggttccgggtggccgtgggcctcggccgggacggtccgcgagatgacggatccgcgatgtctctctttgccggtagctcccacatccgacatgcctgggaccacgctaaatcggtacggcagaacctggccgagatggggttggctgtggaccccaacatggcggtgcccctccgtaagagaaaggtactgacatggcagggtctcggtccttgtcttctttactcttcccccgccatactgacctaggtgtcagaacgtggtactgcccattccttccctcaggcccttccgagttttcgacctccccacagtcagatacgtcaactgacgttgagcaagggtctctttacgac

SEQ ID NO: 130003 - DNA, 675 bp, Homo sapiens
atggcgtttcaccatgttggccaggctggtctcctgacctcagactcagcatcgtactcacgtagctcttcgtctctgactgctccactctcccccttgagcagtgggcgatggctcttgggaaagagtggactcatcctccaccctgctactggacttgtctttgtactctcaaagcagtgtgaggagattcatcaaccggtggtgtggacatgtgaacagcgtgaggcagagagaacccacttccagcgggtgatcccagaagatggccctgcagctcagaacccagaaaatgtcaaaaggcttctcttctgcaccggcaaagtgtattatgacctcacccgggagcgcaaagcacgcgacatggtggggcaggtggccatcacaaggattgagcagctgtcgccattcccctttgacctcctgctgaaggaggtgcagaagtaccccaatgctgagctggcctggtgccaggaggagcacaagaaccaaggctactatgactacgtgaagccaagacttcggaccaccatcagccgcgccaagcccgtctggtatgccggccgggacccagcggctgctccagccaccggcaacaagaagacccacctgacggagctgcagcgcctcctggacacggccttcgacctggacgtcttcaagaacttctcgtag

SEQ ID NO: 130004 - DNA, 717 bp, Homo sapiens
atgcatggagtaagaaagaaaccatcctacaatagcaccaaatccagcatggatggactcatcctccaccctgctactggacttgtctttgtactctcaaagcagtgtgaggagattcatcaaccggtggtgtggacatgtgaacagcgtgaggcagagagtttaaaatctatcaagaacgacaactcaatgtctcctgcatttttagcttatgttaatacttatgtatttttagctactggccccgtgcccccggcccacccggccgcccttaccatgttctcggcgccgactccgcctccgctcggccgcgcgccctcccgctgccgacccgcgccgccgccgccgctctcgcagcaccgaccgccgccgccggagccggacaataccccgtgcccgcctcgcgctgctgtggccaatgcccgcttgtcttgctggttcgaaccccagcggctgttcaatcgcgcgcctccttctagccagaccccgcccccccggcaccgccttcctaacggctgtttgtttttgcacacggcacgcggaggcggggcctccagccccaatagtgacgcgctctctgcctttcaccaggcgcccaagcctgacgaacagaaaggcaaaccaatgagattggacgcctcgcagacgaaagccaataaaaatatcgcccgcgagcaagggaggcgggccactgggaaggacagcaaaattagctaa

SEQ ID NO: 130005 - DNA, 1387 bp, Homo sapiens
cggccgcggaccgacttccttcgccggccacgcggagggaagggggcgcccctaccccgggagggggctgggcgagccgggagacggtcaagttggggtcgggggagcgcgggcgctccgcactctggggcacgcggggacgagcccggccgcattgtctgcgcggcctcggaacaagcacggccggcggtggcaccggcgggcgcggggaggagttgccgtcccctttcgccgccgccgcccaccgcgttctttgtgtgtctttcgccggcctacagccgttttcgccgattgcctgacagctgatgggctcaccgcgccgggtcccgcgtcctctcggccgcagccggcggagcccggcccggcaggaggaggaggggagaagaggagcgttgacagatgctgtcttggagcgggcaccgccgggggaaaagtctggactgcctcggcgagaagcggccggtaggcaaccggccccagcctcgcattcgcctcaaagaccccaattggctaggagcccttccctccgcagcggctcgcgcagctccgctcttgcgccccgcgcccggctcagcggacggactagcgcgcccggtcaagaatcctggggaacccgctccgccccctggctccagcgccctccaatgatgtcggcgtacagagggctgttccgcccaatcaggtgtcggaaagcccagccagtccccgggagtgtagccaatagaaggcgactccggcaacacacccgccctgatccactaggaacaaaccgctccgagcccgggtggtgggaccgatcctggagcccagatcaagccaagtccggccaaagctgtgtcgcaaaaattaaaaacaaaaatcatatgatcatctcaacagactcagaaaaagcatttgacaaaatccagcatcgctttatgattaaaactctcagcaaaatcagcatacaagggacacactttaatgataataaaagccatctgtgacaaactcacagccaacattatactgaatggggaaaagttgaaagcattccctctgagaactgaaatgagacaaggatgtccacgcttatcacttcttttcaacatagtactagaagttctagccaaagcaattagacaagagaaagaaataaaggacatccaaattgctaaagaggaagtcagactgtcactgtttgctgatgatatgattgtttaccttgaaaaccctaaagactccttcagaaagctcctagaactgataaaagaattcagcaaagtttctggatacaagattaagaatcaatattgtgaaaatgaccatactgctgtgtccggagttggttccttccagtggatttgtggtctcgctgatgtcaagaatgaagctgcagaccttcgca

SEQ ID NO: 130006 - DNA, 3204 bp, Homo sapiens
agtcggagcggggcttccgcgccggggaccttcgctacccgacccactttctcagcaccaactctgtccttgcctctgtcacagcctcgctcaaggagcacccccggggcaccctcctgtccgatggcagcccggccctgtccaggaatgtcggtatgacggtctctcagaaagggggtccccagccaacaccgagcccggctggccctgggacgcaactcggaccaatcacaggagagatggatgaagccgattctgcgtttttaaaatttaagcagacagctgatgactctctgtcccttacatctccaaacaccgagtccatttttgtagaagatccctacaccgcctcgctgaggagtgagattgagtcagacggccacgagtttgaagctgagtcctggagcctcgccgtggatgcagcctacgccaagaagcaaaagagggaggtggtgaaaagacaagatgtcctttatgagctgatgcagacagaggtgcaccacgtgcggacgctcaagatcatgctgaaggtgtactccagggccctgcaggaggtgctgcatgttcatcagcacggccattggccgcctcttcccatgcgctgacgacctgctggagacgcacagccacttcctcgctcggctcaaggagcgccgccaggagtccctggaggagggcagtgaccggaattatgtcatccagaaaatcggcgacctcctggttcagcagttttcaggtgaaaatggtgatagattgatagaaaagtacggtgtgttttgtagtggccacaatgaagctgttagtcattacaagttgctgcttcagcaaaacaagaaatttcaaaacttgatcaagaaaattggcaacttctccatcgtgcggcggcttggcgtgcaggagtgcattctcctggttacacaacgcataaccaaatacccagtgctggtggagcgcatcatccagaacacggaagctggcactgaggactatgaagacctgacccaggccttgaacctcatcaaagatatcatctcacaagtggacgccaaggtcagtgagtgtgagaagggccagcgcctcagggagatcgcagggaagatggacctgaagtcttccagcaaactcaagaacgggctcaccttccgcaaggaagacatgcttcagcggcagctccacctggagggcatgctatgctggaagaccacatcagggcgcttgaaagatatcctggctatcctgctgaccgacgtacttttgctgctacaagaaaaagatcagaaatacgtctttgcttctgtggactcaaagccacccgtcatctcgttacaaaagctcatcgtgagggaagtggccaacgaggagaaagcgatgtttctgatcagcgcctccttgcaagggccggagatgtatgaaatctacacgagctccaaagaggacaggaacgcctggatggcccacatccaaagggctgtggagagctgccctgacgaggaggaggggcccttcagcctgcccgaagaggaaaggaaggtggtcgaggcccgcgccacgagactccgggactttcaagagcggttgagcatgaaagaccagctgatcgcacagagcctcctagagaaacagcagatctacctggagatggccgagatgggcggcctcgaagacctgccccagccccgaggcctattccgtggaggggacccatccgagaccctgcagggggagctaattctcaagtcggccatgagcgagatcgagggcatccagagcctgatctgcaggcggctgggcagcgccaacggccaggcggaagacggaggcagctccacaggcccgcccaggagggctgagaccttcgcgggctacgactgcacaaacagccccaccaagaatggcagtttcaagaagaaagtcagcagcactgaccccaggccccgagactggcgaggccccccaaacagcccggacttgaagctcagtgacagtgacattcctgggagctctgaggaatcgccgcaggtggtggaggcgccaggcacggaatccgatccccgtctgcccaccgtcctggagtcggagcttgtccagcggatccagacactgtcccagctgctcctgaaccttcaggcggtaatcgcccaccaggacagctatgtggagacgcagcgggctgccatccaggagcgggagaagcagttccggctgcagtcgacgcgtgggaacctgctgctggagcaggagcggcaacgcaacttcgagaagcagcgggaggagcgcgcggccctggagaagctgcagagccagctgcggcacgagcagcagcgctgggagcgcgagcgccagtggcagcaccaggagctggagcgtgcgggcgcgcggctgcaggagcgcgagggcgaggcgcggcagctacgcgagcggctggagcaggagcgggccgagctggagcgccagcgccaggcctaccagcacgacctggagcggctgcgcgaggcccagcgtgccgtggagcgcgagcgggagcgcctggagctgctgcgccgcctcaagaagcagaacaccgcgccaggcgcgctgccgcccgacacactggccgaggcccagcccccaagccaccctcccagcttcaacggggaagggctggagggccctcgggtgagcatgctgccatccggcgtggggccagagtacgcagagcgccccgaggtggctcgccgggacagcgcccccaccgagagccggctggccaagagcgatgtgcccatccagctgctcagcgccaccaaccagttccagaggcaggcggccgtgcagcagcagatccccaccaagctggcggcctccaccaagggtggcaaggacaagggcggcaagagcaggggctctcagcgctgggagagctcagcgtccttcgacctgaagcagcagctgctgctcaacaagctcatggggaaagatgagagcacctcacggaaccgccgctcgctgagccctatcctgcccggcagacacagtcctgcgcccccaccagaccctggcttccccgccccgagcccaccgccagctgacagcccctccgagggcttctctctcaaggccgggggcacagccctcctgcccggccccccagctccctcgccactgccggccacaccactcagcgccaaggaggacgccagcaaagaagacgtcatcttcttctaa

SEQ ID NO: 130007 - DNA, 2286 bp, Homo sapiens
atgcgcactccaaaagcggggacaggcacagcgcgctccccggccgccccgagctgtctttttacggctctttccccaggaaatggagcgagacgtcttcttggataacgagctgctgacctccaagatcctgtctgtgctcggccgcagtcggagcggggcttccgcgccggggacctccgctacccgaccactttctcagcaccaactctgtccttgcctctgtcacagcctcgctcaggagcacccccggggcaccctcctgtccgatggcagcccggccctgtcaggaatgtcgaaagggggtccccagccaacacgagcccggctggccctgggacgcaactcggatccctacaccgcctcgctgaggagtgagattgagtcagaggccacgagtttgaagctgagtcctggagcctcgccgtggatgcagcctcgccaagaagcaaaagagggagctgatgcagacagaggtgcaccacgtgcggacgctcaagatcatgcgaaggtgtactccagggccctgcaggaggagctgcagttcagcagcaagccattggccgcctcttcccatgcgctgacgacctgctggagacgcacagcacttcctcgctcggctcaaggagcgccgccaggagtccctggaggaggcagtgaccggaattatgtcatccagaaaatcggcgacctcctggttcagagcctccccgactactggcagcatcccatggtgcatttgttacaactgatgcccctccatggatccatcatcacccaaaatcaaatggaattgttcacggccatcgaagtcctgtgtgccccgcctgctgcggcattcttgttcgggcatgtggtttttcatcatttctctggatttgcatcacaacccggcacacccacggccgaggctggagagtgcaggtgcctggtggactggcccgggtggtgccatgcacggctgcagagcctgctgggagcacagaggctgcccacgggtagccccttcctcagcctgcagatgccagccctgggggcccaggggtcatccagacaggtccagccaatgtccggggtcccttggatgctgctgaaactgagacagaggctgcggagccccacggcgcccttcaccagcccgctgccccggggcaagcggagggccatggaggcgcagatgcagtcggaggcgctgtcacttctcagcaacctggccgacctggccaacgccgtgcactggctgccccggggcggctgtgggccggccgcttcccgccgtggctacatgtaccaggcggcccgggccggcggccaggcgaggccactaccccctgacactgccggaagagcacagggacacagccaggcccacggagggcccttcccgcaaagcagaagccgccagggcaggggccgggctctcatggagctgcctgtggtgaaacccatgggcagggacggacccaaagttggaaaccacactaccccagcccaccttcagaatgccctcagcccgcaagaccccgtattacatctcggaaacggaaagcaagatcccgcattaacaccgtggaaacggaagcaagatcccgcattaacatctcggaaacggaaagcaagatcttgcataacatctcggaaacggacagcaagatcccgcattaacatctcggaaatgacagcaagatcccgtattaacatcttggaaatggaaatggaaagcaagacccatattaatgtcttggaaacagaaagcaagatcgacattcacacctcgaaatggaaacagaaagcaagatcctgtattaacatctcggaaatggacgcaagatcccgtattaacatctcggaaacggaaacggaaagcaagatccgcctcctccggagtggagctgggagactgcaagatcagctatggatcaacgtgttcggagcagaaaacaagctacaggccccaggatctgcctgaagatagcctcccgggcagctctgcacctgttccgcttctggcagagccttttgttcttcacacgatcagactccggagtcgcacatcctgaaaggaaattggtgccccggcccggcagtctggacaccttcatgcagtacttctacggccagagactagagaccgaatggggcactggttgtcgggcaactggtccccaggtcagagcagagtccaggggcaaattgacaaagccatcaagatattatgaggtccaggggggtataattcctaaattagtcaagactgtcacggatgcaaagaacagacatcactaa

SEQ ID NO: 130008 - DNA, 444 bp, Homo sapiens
  misc_feature (1)...(444): n = a,t,c or g
tcctcggaaagtgcggtggaattctctgaacccgcttccgggtcctcgccgagctgggagttaggatccgagggggccattagggataagaaaacttctctgggtgcccacgtgggactgagcgcccttgggagggctctggagaataccatcgccttccaggggaaggaaactgatgtccagaaaagttatgactcgccccaaggggattgcctggcaggacgtgaaggggaagaggcccaccctggagtaaccctcactggagaatccagagacacgccgctttttggatgcctcctatgcctggcgggagtcttgtctgagctggcaccaccacacggcccacgacatcttcgcagggaagcctgtggaccctctgccaggctccacaagaggtcaggacagtgcagtgtgttcacaaggccagtttctgatcgtccgccn

SEQ ID NO: 130009 - DNA, 395 bp, Homo sapiens
atccgagggggccaagagggataagaaaacttctctgggtgcccacgtggtactgagcgcccttgggagggctctggagaagaccatcgccttccagggtagctccctccctcaaagggaaggaaactgaggtccagaaaagttatgactcgccccaaggggattgcctggcaggacgtgaaggggaagaggcccaccctggagtaaccctcactggagaatccagaggtgagatgagccttgtacctatctcagcagagggagtaggataatatttaaatattaagggtggggagaaggaatgaaggcaagaaataaaatgcccaaaatgccccaaacgccatccggaccataaaagtgatggcgatagtgttggacttaagagctcaaagatg

SEQ ID NO: 130010 - DNA, 459 bp, Homo sapiens
aagaaggtgggcaattactacacaaccccgatctacaggttccggatgaaatgccacctctgtgtcaactacatcgagatgcagacggaccccgccaactgcgactacgtgatcgtgagtggcgcccagcgcaaggaggagcgctgggacatggcggacaatgagcaggtgctgaccacaggtgagcgccacccacttacctgcctgggggccctggccctgagtctgcgctggggcccccaaagcccagccgagctctgatcgttgcagagcatgagaagaagcagaagctggagacggacgccatgttccggctggagcatggcgaggccgaccgcagcacactcaagaaggcgctggcgcacactgagccacatccaggaggcccagagcgcctggaaggacgacttcgccctcaacagcatgctgcggagaaggttccgggaaaagaaaaaagct

SEQ ID NO: 130011 - DNA, 1190 bp, Homo sapiens
agctgggagttaggatccgagggggccattagtgataagaaaacttctctgggtgcccacgtggtactgagcgcccttgggagggctctggagaagaccatcgccttccagggtagctccctccctcaaagggttgagatcatggtccagttctcgggtctcccagcctcagtttccccatttgtaggaaaggcgttcacagcctctatctcagaggaggctttgaggattcagagagctcacaagagggtaggctttgtgggaaggaaactgaggtccacaaaagttatgactcgccccaaggggattgcctgccaggacgcgaaggggaagaggcccaccctggaataaccctcactgtagaatccagagacacacccgctttttggatgcctcctatggcctggcgggagtcttgtctgagctggcaccagcacacggcccacgacatcttcgcagggaagcctgtggaccctctgccaggctccacaagaggtcaggacagtgcagtgtgttcacaaggccagtttctgatcgtccgccccgaggctgaggaccagtaggcagctcccaagatgggtgaaaggaaaggggtcaacaagtactatcctccagacttcaaccctgaggaagcatggctctcttcaaccgattaccacaacagccacccgtttcgggagcgggcttcgggaagctgttcacagggcatctctcatcatccgattcgaaatgccatataacatctggtgcgaagggtggcagaaccaacttcggcatgggtgttcgttacaatgcagaaaagaagaaggtgggcaattactacacaaccccgatctacaggttccggatgaaatgccacctctgtgtcaactacatcgagatgcagacggaccccgccaacttgcgactacgtgatcgtgagtggcgcccagcgcaaggaggagcgcttgggacattggcggacaatgaacaggttgttgacccacagaggcattgaggaagaagcagaagcttggaagactgacgccatgtttcgggctggaacaatggggaggccgaccgcagcacacttcaagaaagcgctgcccaaacttgagccacattcaggaaggcccagagcgccttggaaggacgacttcgccctcaacagcatgctgcggagaaggttccgggtaccatccaagccctag

SEQ ID NO: 130012 - DNA, 1047 bp, Homo sapiens
tttcgtagacggcaagctgcatgggagaggttcgactgatgatattggcccggtggccggctggataaacgccctggaagcgtatcagaaaacaggccaggagactcctgtcaacgtccgattctgcctcgaaggcatggaggagtcaggctctgagggcctagacgagctgatttttgcccggaaagacacattctttaaggatgtggactgcgtctgcatttctgacaattactggctgggaaagaagaagccctgcatcacctacggcctcaggggcatttgctactttttcatcgaggtggagtgcagcaacaaagacctccattctggggtgtacgggggctcggtgcatgaggccatgactgatctcattttgctgatgggctctttggtggacaagagggggaacatcctgatccccggcattaacgaggccgtggccgccgtcacggaagaggagcacaagctgtacgacgacatcgactttgacataaaggagtttgccaaggatgtgggggcgcagatcctcctgcacagccacaagaaagacatcctcatgcaccgatggcggtacccgtctctgtccctccatggcatcgaaggcgccttctctgggtctggggccaagaccgtgattcccaggaaggtggttggcaagttctccatcaggctcgtgccgaacatgactcctgaagtcgtcggcgagcaggtcacaagctacctaactaagaagtttgctgaactacgcagccccaatgagttcaaggtgtacatgggccacggtgggaagccctgggtctccgacttcagtcacccctcattacctggctgggagaagagccatgaagacagtttttggtgttgagccagacttgaccagggaaggcggcagtattcccgtgaccttgacctttcaggaggccacgggcaagaacgtcatgctgctgcctgtggggtcagcggatgacggagcccactcccagaatgaaaagctcaacaggtataactacatagagggaaccaagatgctggccgcgtacctgt

SEQ ID NO: 130013 - DNA, 1390 bp, Homo sapiens
ggccggattcccggtcgacgatttcgtcggcgccgcgcttgctgctggtaacagggccttgcctagtgggccttccttacgcagggcgccgctcaccctccactactaacaggactgaccagacgctcttctgtccgagaaccttcaacatctgcactgtgaagactggttgaaagatggcggccctcggggaccctgtttaagtacatagatgaaaatcaggatcgctacattaagaaactcgcaaaatgggtggctatccagagtgtgtctgcgtggccggagaagagaggcgaaatcaggaggatgatggaagttgctgctgcagatgttaagcagttggggggctctgtggaactggtggatatcggaaaacaaaagctccctgatggctcggagatcccgctccctcctattctgcttcggcaggctgggctctgacccacagatgaagaccgtgtgcatttacgggcacctggatgtgcagcctgcagccctggaggacggctgggacagcgagcccttcaccctggtggagcgagacggactcacgtggtgttcctcgtgtcgtggcccttattgcagagggagcagcacaggctttcctggaagctcccctcggtcatgtggggtgactccagagagccccaccttgcgagactggaccagtccaagtggcctggagccacagcggcctggcagtacctggggagggggtgatgacaggcgaggaggccgggcactcagcaggcagctgccctacgctgggtatgcagctgctcagtgcaagggcgaggtccgaccccaggtctccagctccaggcttgtggtggagtgcagcaacaaagacctccattctggggtgtacgggggctcggtgcatgaggccatgactgatctcattttgctgatggaggagcacaagctgtacgacgacatcgactttgacatagaggagtttgccaaggatgtgggggcgcagatcctcctgcacagccacaagtcgcacctgcacctggacctcctgcctgtggttgtcaggctcctgggccaggccctgtttcataccgctcatttcccagacaacattcccagctcctcgaaagacatcctcatgcaccgatggcggtacccgtctctgtccctccatggcatcgaaggcgccttctctgggtctggggccaagaccgtgattcccaggaaggtggttggcaagttctccatcaggctcgtgccgaacatgactcctgaagtcgtcggcgagcaggcatgtggggctgggacacgggaatccatgtcctcacttgggtaccccagcagagcagaggatgacagtggcctgagcgccctgccttctcagccccagcccttcattctctatgccacgtga

SEQ ID NO: 130014 - DNA, 433 bp, Homo sapiens
  misc_feature (1)...(433): n = a,t,c or g
acttcgaaacgctattctcacaggttcagctcttcatcagcacttgtaatggggagcacattcgatatgcaacagacacttttgctgggctttgcattcagctaacaaatgcacttgtggaaagaaaacagcccctgcgaggaattggcatccttaagcaagccatagacaagatgcagatgaatacaaaccagctgacctcaatacatgctgatctctgccaggctataactactcctgccatggcggtgcagtcatatcatgttggaatcatataaaaagtatattttagtgtctttgatattacttggcaaagtacaacagctaccaaaatatacatctncaaattngtgggtagattcattgaagcctcttagcaatgcatgaccacgagttnaggcacaagttgtatttcaaccaacaacccctgcag

SEQ ID NO: 130015 - DNA, 1481 bp, Homo sapiens
caacagtaacgggtgggcagctaggtatagtctcgcggtgcttgaaccagcggaagtgacgtcgccgctcgcgaggacctcaggtggatcgccgcggcccctcctcccagagcggcagccttttcccgcgcgtgctgccttcgccgctcgggccgcccgggggaaaacatggcgtctgccctggagcagttcgtgaacagtgtccgacttctcttatctcaagtgctgctcctgttttccagggcaaatgacacagctttgtgaactgatcaacatgagtggggaactccttgcgaagaacttatcccatctgggacactgtgctcggggctctgggatgtacaagaacactccttgggcgtccttgctgttttgtttgtgaagttttctatgcccagtgttcctgacttcgaaacgctattctcacaggttcagctcttcatcagcacttgtaatggggagcacattcgatatgcaacagacacttggcaggaaacagtccttttgaaatctatggtgttagttttggtagtaatttactaccagcccctgcgaggaattggcatccttaagcaagccatagacaagatgcagatgaatacaaaccagctgacctcaatacatgctgatctctgccagctttgtttgctagcaaaatgctttaaggctgcccttccatatcttgacggggatatgatggatatctgtaaagagaatggagcctatgatgcaaaacactttttatgttactattattatggagggatgatttatactcgggctgaagaacttttgaaagagctctctacttttatggacacggctataactactcctcgccataggcggtcagacatatcatagtgtgggatcatataaaaagtatattttagtgtctttgatattacttgggcaaagtacaacagctacccaaaatattccatctcaaattggtggggtagattccattaagcctccttagcaatgcataccacgagttagcacaagtgtattcaaccaacaacccctcagaactccgaaacctggtgaataagcacagtgaaaccttcactcgcgataacaacatggggctggtgaagcaatgcttgtcatctctttataagaagaatattcagaggctaacaaagacctttttaactctatcattacaagatatggcaagtcgtgtgcagttgtctggacctcaggaggcagagaaatacgttctgcacatgatagaagatggtgagatttttgcaagtattaaccagaaggacggtatggtcagtttccatgataaccctgaaaaatataataacccagccatgcttcataacattgatcaggagatgctgaagtgcattgagctggatgagcggctgaaagccatggaccaggagatcacagtgaaccctcagtttgtacaaaagagtatgggctcacaagaagatgattcaggaaacaaaccatccagttattct

SEQ ID NO: 130016 - DNA, 3411 bp, Homo sapiens; identical to SEQ ID NO: 128472

SEQ ID NO: 130017 - DNA, 1410 bp, Homo sapiens; identical to SEQ ID NO: 120525

SEQ ID NO: 130018 - DNA, 453 bp, Homo sapiens
ggctcggcgccgcagtcctgcgcctctcccgcccctgtctcccgctccgcagccccgggcacggcggaggcagcggagccctgggccatcgtacctggagtagaacagaaaaattattatgtctgtgttcccttgggactcattggaaattgtacagtgacatcttctgggatttagtctggattgtgcagactggtgcttaaaatggaagtcgatattaatggagagtctagaagtaccctgaccaccttgcccttccctggggctgaggccaactccccgggaaaggcggaggcagagaagccccgctgctccagcacaccctgctccccgatgcggaggaccgtgtcaggctaccagatcctacacatggactctaactatttggttggcttcacgactggcgaggaactcctgaagttagctcataagtgcacaggaggtgaagagagc

SEQ ID NO: 130019 - DNA, 1417 bp, Homo sapiens
gtctttgccttctgccgtgattgtaagtttcctgaggcctccccagaagcagacgctgccatgcttcctgttcaacctgcggaactgtgagccaattaaacctctttacaacctccaacactggctgtacgatccggaaaaaggcatgttcctgccggaccgttttgtgaaaggcacctgcccgaaatgtaaatccccggatcaatacggcgataactgcgaagtctgcggcgcgacctacagcccgactgaactgatcgagccgaaatcggtggtttctggcgctacgccgttaatgcgtgattctgaacacttcttctttgatctgccctctttcagcgaaatgttgcaggcatggacccgcagcggtgcgttgcaggagcaggtggcaaataaaatgcaggagtggtttgaatctggcctgcaacagtgggatatctcccgcgacgccccttacttcggttttgaaattccgaacgcgccgggcaaatatttctacgtctggctggacgcaccgattggctacatgggttctttcaagaatctgtgcgacaacgcggcgacacgcccatttataaccgagctggtgccgttcgcccatcgtaatggtgcaaaaattttcgtcacgcttaacaccattttgcatgatgatgagctggaacccgcgcaacggctgattactgacctctaccagaccggtgtcgatgcgctgattgttcaggatatggggattctggaacttgatattccgccgattgaactgcacgccagtacgcagtgcgacattcgtacagttgaaaaagcgaagttcctctctgatgttggcttcacgcagattgtgctggcgcgagagctgaatcttgatcagatccgcgcgattcaccaggctacggacgcgaccattgaattctttattcatggggcactgtgcgtggcctattcgggtcagtgctacatttctcatgcgcaaacagggcgtagcgccaaccgtggcgattgctcgcaggcgtgccgtttgccatacacattgaaagacgatcaagggcggtgtttgcaggtccgggaaggccggagggtgattcgccgcctgatcgccacgcaaaaaatccagactcgctttacgctcaaagcgcccattgatggcgtgatcaccgcgtttgatctgcgcgcgggaatgaatatcgccaaagataacgtggtagcgaaaattcagggtgtggacccggtgtgggtcactgctgcgatcccggagtctatcgcctggctggtgaaagatgcctcgcagttgaccctcagcgttccggcgcgaccggtgaaaacactcaccatccgcaaatggacgctgctacctggcgtggatgccgcgacccgcacgctgcagctgcgtctggaagtcgacaacgccgacgaggcgtag

SEQ ID NO: 130020 - DNA, 862 bp, Homo sapiens
attcaatggtcgcgtccgtagcctggtgaatcgcgcggatctgatcaagattcagctctcgcgccacgacaatctgcgtgaagccaacatcagagaggaacttcgctttttcaactgtacgaatgtcgcactgcgtactggcgtgcagttcaatcggcggaatatcaagttccagaatccccatatcctgaacaatcagcgcatcgacaccggtctggtagaggtcagtaatcagccgttgcgcgggttccagctcatcatcatgcaaaatggtgttaagcgtgacgaaaatttttgcaccataacgatgggcaaacggcaccagctcggcaatatctttcaagctattactggcattatgacgggcaccaaaaccagggccgccgatataaacagcattcggcaccgtgcaaaattagcttcgcgtggcaatagcgggcatcggttgccgggcttaaacagtttcaagtcgatgagaagatacggtcacattcttatccagtagctgaaaaatggcggctattttagccacaagcgcgacgttgcgaaatagttttcccgcagcaaggaagatcttccgttcaatctgccttagctgagccagactgattcccagaatacgctggtcaacatcagccacgacgggcatcccttccttgtcatagaagcgaccacaaatgacacctactgcgcctaaatcccgatacgtctgcatttccttcttattcagcacgcccacccgaatcaggggattttcatcaagcgcgttacccacgacaaaaaaggctttcgtacagcgagtcagaacgtcaaaattcgatcgaataataggctctgctgtaaactcatggccagtctggcg

SEQ ID NO: 130021 - DNA, 5814 bp, Homo sapiens
gattctgggaaatattttaattaggttccactttaaaaaaaaagtagcttccttatgacctccacagtgagtacattaactacattttcacaaacagaaaacttacatacattcaactgtttacaagacatgtctccatataacacatttacattcgtgtgaaatctatgaacttctttaattgcatatatttatgactcttacatctggtaccttttaaaacagctaacatatagtatgcttatttcctataagttaattaatatatgactatttaaggtgagaagagtctcatttgaagaattacaatagttatattcataccatgggaaatcaatagtttttctaaacataaatttcaagctaaagctttagcaatttaagttatttaactaccaatgcatgaaattcttatcagattgtcccatttggattacagtttaagtcatttcaagctgttcacaattatttgtgcattggtgggggggaaagcaccaaggataataaattgatttttcacatcacagatgaaatcacagcgcaatgatttcaatatcccttcaaaaatctaatcatttataaagagcatttatttcaaatgctcaatctttaagctttcttagtgtgatcaactgatacactagggataagaatggaaatggttaaaaacagatgctatacataatacttactaacttaacagaattcagatttctcctaacattgttgatttccatttttgaactgacttctttagatctaaaaagaactctgaaagtaagtgtaacatttatacacttgtcaactatacttaaaaagaaactctgaaggtgcctttcttgtcaaaatacaaaacaaaagttttcctgatgaacaaggcaccttgtatggtaaggaaatatataaagaaaatattttctacaaattaatatataaatctatgtgcacaaaggtgtagttctcccagctgcatatgtaatattttaaataacacacaataaaaaaattcaaaacacagattgaaaaaataacccatgtggctaatactccagttgttaaatattgcagcatatatgtcactgtaacaattgggaaagatattctaatctaaacggttaatgaaatctctttggaaagacactttaaaagtccccaatatgtaaccctggctgtcaaatttcaatctagaagttttaacagctaagatgcaatcccatgaaaataaaagtgtgcacaaaggccagctcatcagactctgcagtacatagcattactgctgtgactttggtacgagcctgctgggcttttatgttccttttcattactatgtgcacatggtaaacatcatattaacaacaatcgatttttatcactataagttttgctgctcacagaatgctaacaaacattgttttaaacatttccagatcatgacaacagttccttacctgaacataaacaaagaaaaccttagatttaaaaacatttttaagtgaacacataaatgcataaggagaaacataagaacacactatttttataagtataaaaagttccagcttctgctaagatttcatttctttttcccagtgttttttttgtgttcatgcgtttctgttttgctagttatattctttttccgagatgaggtattaggaacaactgcactagaaggtccacttgtagctggtttgctgcttgctttagtgctctttaaggtagctggtggtgttgggaggatctttgcaggtgtatacgtatttaaagatactttttttctcattattggactggaacgtaaagctgtagaggaaatttcagcggtcttccgtggaacgtcagatgatggagaagcaatggaagcaagaaattcatccacttgctttaaagatagggcattatgaagagtttctagaggacaaatagatggcaccatggaatacaattcaaagccattggttgggtgtcgagcaaatgagatagaaaaccttttaacagcagaaccgcgtgtggcgtcatctatgcagccagaagaggtcagctttttacgatgagtacgagcataatcctgtaggttaggtgcgcttgaagaacccccgagcaccgaggtgctaaacaggcccgcacagtgagaccctacagtaggattctgcttctgttccacaagagttcttggtgttcgcaggtaattagcattttcagatacaacctgttgccatgagccaaaaatactggatgtgaaagccaatgatttgggggagacaggggaagaagtgatttgttcccctgatctgcgtcttcgacgcccagtacccacaccactggtataatgcagccaggtaccagtaccctctgggctagacacactcagggggctctcttcatcatttgtagccgtcttcctagatcttggaagtggagacttcctgtgtatatgaattggctctgataccattggtttaaacaatatcacagctcgatcaacttcatctcttttagaagtatgtggttcatcatcattatcaattttaaaaggtctcctgccttcattctctctggaagctggtctatatccatagccagatggcaaatttttgtcttcttcacaacctttggctcccggactaaagtgtaattcaacatgaaagcgttcttctgaggaaagatccttattaggatcctcataaagcatgataacaatctgagtcatgtagttgagctcattgacaacgtttaaataatccatagctcgtttccactgttcatcctttgattcattgcataaggcaccatagcgaagaatagacagcaaagaatgtacatgactttcactggtaaaatataatctagtacgaacatgacgttcaggagacagaacacctctagaatacacaggatgaagtttatttacagtgtcatcatcttgtgtcctctgaaggtctgagcgaatttttctaaccagaggagtacagtagcctttggcaatctccagtttttcagctttagttataccatattcctgagggataacaatatctgctaatgccttcgaaagcctatataattccattgtgttttctaatttcaaggaaccattatgctggacatcatattttatacagtcatatatgtcagggattttactaatatcatatcttccattctttgttttaaagtctttctctaacttggaccatctacgtagcataagctccaatgtttcactatggtaaagctgaatatctgatgatttaggatcttccattcgatgtctgatttgagaagtcaaactctgaattaaggaataaactttatcacaggtcttcacagggtttttaattaaatgcattgatttgataagagaaatgcttccagatggagtaagcttttcataatcttcagcagtaaaatctctgtctttctgaagtatttcatgaagccttgccttcacacgttgctgacaactgctcagagagtcactatcactatccaaaagaccgttcatatttgcacttttcaccatttgaacaagaatgggtgtaagctctccttccaaagctaaaagcccctttgcaaaagcagctgcagtcatctggactcgtccttcatcagaggcatatattttgaggtcatgtctgtaggtgctatgtaatctaagtaaaccacaaccaggaaatcctgcataatctccttgacctccaggatacatacacctgaaggctcttccaagttcttcagcctggaccctgcctgcaggagttaattcacctccccattttagaaccaaaagtaaagatggttcttctcttcggctgtcctcctcttcactagatgttttaggacaaccatgagggagataggtcaactgaaccttacgatttattccagaaaaatgaccatacatctctaatacagtcttaagttgttcaagttttggcttgttttcttcaatttcagaatcattattttgccctagctccataagaagctgtcgtgcaatatctagcacttcctgtaactgttttggttttttgagttttaatttccctgatttatatccatcacacttttcaaaaagatcaaaaaatttctgatgtctcacttccattttcattttttgttttggtgttcgatccccatgacgtataacagctatgacacatctaagttccatcatagttccagatgtagttggtacaattgggatatcttcagcttctaagggtattgaccatggaatatgaaattgtggagcaagttctcgcattacaatatttccaagtatttttgcacagtcatcataatacttcatggaatttttcacaaaactgaagccattgacatcacagacataggactgtccattggcccgtaacaaatcaaagccacaaactgtttgcttaaaagcaaggcagactttccaagcaattaatttctctcgtgcattgagaataacagggtatcttacttcttttccttcactgtctcgttccaccttgccatcaagtgctggagattttcgagcttcagcatgggcataatctggacccactgtataaaccttaacatcagtaccatctgtgggcataaactcttcatatatatatgagcctgtttttcgtacattgctttctggagaataaacactacttctactgccaatctttctaaagagtctttgacttccaccaccagcagaagttgggtaataaatgtaaacattgtgatcttctgcactgactggcttttctacaaatggcttttgaaaaacttccccatttacttctacatgatcttccccttcaatcagattacattctttgggattatttgggtcacggttcaaaatagcataacgaggaagtaaaataccttcagcttgaagaatactatatacttctctcctatcttgtatgagatactgcatattcaagtcattgattacaaatggattcctgagttttgcataggcaaccgctttgtccagtggaaatcctttagaatggaaagaaataagacaatcacataaaggccagttttccactggttcattcaaaataacctcctcttcaaatactactactgtgatatatttaaataaggagatccgttcaagaatttccttcattggtttggatttggatttctttgccatggaacatattccaaccacaatctgcctttctggtggagaatcatcttcctcctcatcgtcttcatctgcatggtggaagaaatgtcgataatttccaggatttatttctgtatcttctggtccaacgaagaatctgggggcttcactcatttttattttatttgatgtagatataattgaaatgatttatattaaaactgcctctaagtaaatagtatcagaagaaagcattctccatatattagctgacgcacaggtctgtgacagcttgtttctgcttatacaatcacttgatattatgatgactgttggcaaatactcttttgttcttagatatcattgcttcattgttgatatcaaagttgttgttgcaattcaaaatacaaagacagtgaagttactgctttcttgagttgatacagcaatcttcttacctgccacgaatgcggtcgtcacgcgagcagttgtgagatggtcaagcccattcaggtctaggttaccccctttcatcccggaggcaggggtgaggtgtttgtcaagagacttcagttgtaggcgtggacgtaggctacttccttcagtaacagctatagggccacataagggaacctcaggctactacacctcaggaatctccgtcacgcctcttccccgccctc

SEQ ID NO: 130022 - DNA, 1472 bp, Homo sapiens
atgaaagatttggcaacgtttatagatgcttctatattgctgaaatttacgtggatccaactagatgacatcagacaaagtgccaagccaaaaatagaatataaacacaatgtccaagggagcaacacaagaaaaccaaggtgcagaagctccattacattctcactttttctaattttgactctgcttcctgctttgtgggaggaggaggaagagcaggaggaggaggaggaagagcaggaggaggaggaggaggaggaggagtccacccgcgacaggtggggcgagggtggcaatgcccgacatctgccgcttaagcttctggctcggaccgggccccaatccacacgcgcacacacggccacagccggccagtccacccccactgcaccggcagacactcggagggcgcgggcggcctcgcacgcgggttgcaaccaggacgaggagggtcggcgagatcagaccgccggggctcgccctgagcacaaaaggttacagacggagccgtcgtccccgtgcaacctaccgatggcccagggctccgctgcctccgccgtgcccggggctgcggagccgggagacaggggcgggagcaggcgcaggactgcggcgccgagatccaggcagaggccgccagccgagccagccgggtgcaggaaggatcttacccgaggcccccgaatggaccctttagtaccgatctaacaggcctaatgcagttcacaaaactgctggttctgaaggtagagagccagctgacaaggagaattagaaaatgccacaatctgcgtgaagccaacatcagagaggaacttcgctttttcaactgtacgaatgtcgcactgcgtactggcgtgcagttcaatcggcggcccgatagtccagggtattctagaggtgttctgtctcctgaacgtcatgttcgtactagattatattttaccagtgaaagtcatgtacattctttgctgtctattcttcgctatggtgccttatgcaatcgcggcggcacactctgctgtcgggcgatccacacgctccatcgtcataccatcgtactcaatggtgttaccgtcacgctcaacctcgtacagctcacgttttacggtaacgttagtgagatcatcagacatcaatgtcaacttacccggcacggcaatcacccgctgccactgacggcaatccagggtatcgccctctttagtgacaatcaggctgcctatcgcttccgggctgaccagcgcacgttgcggccctttggtctgccagtagcccgccagccagtccggcgcgggggttttcacgacattgttatagttttcgacttcggcacagcccgccagcaacaagagcgcgcctgcaattgcgagttttttcatcattcgtcctgcatgagaagaaaagaggattgtggcattaaagccctgatgtcgccagcctttcaaggttcagagagaaatttgatctaa

SEQ ID NO: 130023 - DNA, 1619 bp, Homo sapiens
tcagagaggcttgaggttcgggtagtcggtgacatggcggaggccgcggcgctggtgtggattcgcggccctggcttcgggtgcaaggcggtgcggtgtgcctcgggtcggtgcaccgtccgggattttatccaccggcactgccaagatcagaatgttccagtggaaaacttctttgtgaaatgcaatggagcactcattaacaccagtgacacagtgcagcatggagctgtttatagtttggaacccagactttgcggtggaaaaggaggttttggatctatgctccgagcacttggtgctcagattgagaagacaaccaatcgagaagcttgtcgggatctcagtggaaggagactacctccatgtccaacatgaaaaagcaatggctgaatgggtaaaacaacaagccgagcgagaggctgaaaaggagcaaaagcggctggagcgactgcagcggaagcttgtagaacccaagcactgcttcaccagccccgactaccagcagcagtgccatgagatggctgagcgtctggaggattccgtcctcaaaggtatgcaggctgcctccagcaagatggtttcagcagaaatcagtgagaatcggaaacggcaatggcctactaaatctcaaacagacagaggagccagtgcgggaaagaggagatgcttctggttgggcatggagggactagagactgcagaagggtccaactctgagagttcagatgatgacagtgaagaagcaccaagcacttcaggaatgggtttccatgctccaaaaattggtagcaatggtgtcgagatggcagccaaatttcccagtggttctcagagggcgagagtagtgaatacagaccatggatcaccagaacaactgcagatcccggtgactgactctgggaggcatattttagaagactcatgtgctgagctgggggagtccaaagagcacatggaaagcaggatggttacagaaacagaagacgacccaggagaagaaggcagagagtaaagctcccatagaagaggagcccgctggggctggattgaataaggataaagagacagaagaaaggtctgatggggaaagagttgctgaggtagcacctgaagaaagggaaaacgttgccgttgccaaactgcaggaaagccagccaggaaacgcagtaagctgtagcgggggaaggaggaaagaagacgaaagggaggactggggaaaacggactcagaggacccacccacctgcagctgcccaggctcctgggcagtgccctccaggaagcacagaagtaggggctggaggcgggcttcggtggaccccgagcccgggccggcagccagcaggggtcgctgcagacatgggaatcacggtgctgaccgtgcctctgcagcgctgtcttcagaactcctgggccaaggagccagtgctggtggtctccttcgtcatcgggagcctcactgtaattctgcccccactcagcccctacaccaagtattccatcatgatcaatgaggccacaccctacaactatccagtgcccgtccacgatgatgggaacatgcggacatgtgcagccacccccagggcccccagggccccagcttggagtggctga

SEQ ID NO: 130024 - DNA, 568 bp, Homo sapiens
atgggccggcctattagagctgaagctgtggggcagtggaaagcaagcagcggctttaatgcagtggaaggaaatggagtcagtgggggtgggacagaaaggatcatgtgcagagagcagccaagttggtgcagagcaccttctctggggccacattctgcccctttcctgcttttccacagtttcagttccaggaccctgactgcacctgccccatttgctgatgaaaccaactgccagtgtcaagcaccccatgaaaaactgaccattgctcaggcccgcttaggaacaccaggccctttcacaacatggcagcttgcttcttcaaagccaccagtgcagaaagacactgacaggcctgtcagagtatacgccgatggaatatttgacctcttccactcaggtcatgcaagagcccttatgcaagcaaaaacactgtttcccaacagctacttgttggtaggaggtttacacagaatttcagatattcccttaatggctattacatgggttgtggaagtcaagggcatattgaactacttggatgaccatgagactgtatcctttg

SEQ ID NO: 130025 - DNA, 1308 bp, Homo sapiens
cttttctttttttttttatttttttattgtaaacaaatttaatttaccaaatgatagactggtaaaaaatgtgcctatcaccaagggctgatacctttcctgtggcccaggccctctgctctttaaaaatggggcacaaatacaggcaggtaagagacagacagctctcatcctgcactcttggctttctgagagatatgaccccaaggtcctgggagtctagctggctgcttcctcctctgggaaatagaggagtgatattggtagtacctagggcatagcactgctgggacaattcagtgatttggggaactgatctccatattcaagatgacctgatcctgtctgtgtgcgggacagtggctaggcacgggagcccttgttagggcccgcctaccatcttgaccctttttcaaaccttcccgtctgagggacatctgcatgcacacttgtccctccaatgctgtctcactctggatggccctgacacctgagaggccagacagccaagtggtttctaggacctttgtgattttagagcagtgggttcccgtttcatttctgcctctgatggccgagtggccttgcaggaagcaccttctttccaggcctcctttgacccacttcactagttcatggggccatctgaggatccaacccggtgtcaggcacttcgctcgggcctgacagaggacagaagcgctccgtagcagaggcttttttttctttaatagtcgctctgagcatcttgtctgcctccatccagctctcactttccctgtctggctctaattctggttgacccagagggcatagctgaggctcggaggtcaggaaccgtggactccaggaggcagttttgagggtccttcaggcttggccacggcaggataccaccattccatctcagaggcatgaaggagtccctaggccccgactttggtgacccttgccctgtgtgccccctcaacagtgggccagggcctcctgtgtgtgtctgctgggggagcaggagccgggtgtgggggcatgggaaggcgggacgcctgggttcccacaggcccggtggctgagtcaccaggcggccatctggctcccattagcccagggcggcagggggctccatggggcgggccctgcggccagctgggggcagggacgctggggcaggctgtgtgtgggatgactcaggacccatgataacagcctgtgcgcatatggggagtgtaaacaggagagggagaggaaggcggaggaagggaaaattgtggttgggcgaattccaccacacggactagcgcgctgcaa

SEQ ID NO: 130026 - DNA, 444 bp, Homo sapiens
atggggcaaggcctgtgcacagttttatccaagtatgaagatcagattactattttcactgactacctagaagaatatccagatacagatgagctggtatggatcttagggaagcagcatctccttaaaacaggtggaacgggcccttcatcagatgctggttggggatgtatgctacgctgtggacagatgatgctggctcaagcccttatctgtagacacttgggaagggcacaaatgggtgtaggagaagggaaatcaattggagaatggtttggaccaaatacagttgcacaggtgttaaacaagaggcaaggtggagaggtcaggaccaactttttgaaagcaaacagggtgagtgatgttagtacttacacctgcagaccaccttacctgttgtcactctccttcctaacaacctatcactggatggaaactccatga

SEQ ID NO: 130027 - DNA, 462 bp, Homo sapiens
ctgaattcggcacgagggcccaggatgacagctggagaatggagtcagttttatccaagtatgaagatgggattactattttcactgactacctagaagaatatccagatacagatgagctggtatggatcttagggaagcagcatctgcttaaaacagattgggaaagaaagaccttttaacctgaaactgctaacagcccagcacccagataaagccagagcttggaaagaggcagctcttagatttgtgattttcctgaagagaaattcccttcagaggccctcacttagcgtggaggaaggaacaggaagaggctgatgaaaaggcaggagaggaagttaggcattgtggagctcctcctgagcctggcttcattattttgattggagaattctgaacagtggaaagcctggagctagcaattaggagaccttttgtattcagactcttctaactcag

SEQ ID NO: 130028 - DNA, 475 bp, Homo sapiens
cggtggaattggcccacgatgaccgctggagaaaggacgtcagttttatccacagtatgaagatcagattactattttcactgactacctagaagaatatccagatacagatgagctggtatggatcttatggaagcagcatctccttaaaacagaaaaatctaagctgttgtctgatataagtgctcgtctatggtttacatacagaaggaaattttcacccaattgggtggaacgggcccttcatcagatgctgggttggggatgtatgctacgctgtggacagatgatgctggctccaagcccttaatctgtagacacttgggaagggactggagctgggagaaacaaatagaacaaccccaagaataccaacgcatcctacagtgcttcttaaatagaaaagattgttgctactctatccatcaaatggcacaaatgggtgtaggagaagggaaatcaattggagaatggg

SEQ ID NO: 130029 - DNA, 418 bp, Homo sapiens
ctccttgcaggtgcagccctttgcctccctcatcagcaaggcacccctctccacccctcgcctgctcatcaacaaggagaaagctggccagtcggaccctttcctggggatgattatgggcctcggaggaggcatggactttgactccaagaaggccttgctgagctccttggatggaagaaggagctggaggaccttgtccggagggagcacgccagcatagatgcccagtcgggggcgggggtccccaaccccagcacttcagcttcccccaagaagtccccgccacctgccaaggacgaggccaggacaacagagagggagaaaccccagtgacagctgcatctcccaggcgggatgccgagctcctcatggacagctgagccccaaccgggcctggccccctcttaaccagcag

SEQ ID NO: 130030 - DNA, 1220 bp, Homo sapiens
tgctggggttgggaccccccgcccccgactgggcatctaatgctggccgtgcctcccctccggaaaaaggtcctaccagctcctttcttccaatcccaaggcagctcagcaaagggcccaggcagcccctggtcgcattcacccaagccaggccacgtcccctgtaggcctttcttggaagtcaaagtcccaatgcctcctccgaggccccataatcaatcccccagaaaagggtcccgaactggcccagctttctcccttgttgatgagcaggcgaggggtggagaggggtgccttgctgatgagggaggcaaagggctgcacctgcaaggaggtacccatgacccaggaggaggtccaccttcaggaagtctgactgcatacaggagaagaaacgcgctgggaggctctcaccaaaaaaagacgatatcaggcttcaccaggctctgacagtcttcacacttgggcgtcacctcagagaagatcttctctttcatccagcttaacgggtattcgtgccggcagctggcgctgacgcaatgtgatgtgtagaaggtgccgtgcgcctccaccaagtcctcctgttccagcccggctattcgctccagggtatctatgttggtgtcgtggcgcacgtcttcggtgaacgcactctggccacactggagcgtcttctgagcctgctgtcggcctttgaggtcgtggtatagatgacggatggctggccgctgctctttgctagtggtgctggggacacagagtgaggcttgtcctggctgcaggtccttcgagccgtggtgttttgttgctgctggtggtcctgccgtcgtgggcctcgtttctggtccgcgtttgtgcctgggtgggggtgttgggggacgacggtgtgctgggtggttttctgctgtggctgggggttgtcggtcggccgctggccgttctgcgtgccgatctggccgtttgtgtcggcgttgtttgcgcttgcgtgccgtttgtggtgctgccgatttgtgccgcgttggttcgtgttggttgttcgctggtggaagcggcgctggggtctcggtgcacgaccgctgaagacgttctttgctgtggtcgtgccgctgactaaaggtggggttgttgccggatcgatgctggtgtttgtcccggctgtgggcgagtttgtgatcccggaactgctcggtggcccggacagcatcgtgatcgggcgcgtg

SEQ ID NO: 130031 - DNA, 3492 bp, Homo sapiens
cccggaagcacaaggtgggcatcctctattgcaagcccggccagagctccgaggaggagatgtccaacaatgaggaggccggccccgcctttgagaagttcctctccctcatcggcgagaaggtctgcctgaagggcttcaccaagtacgctgcccagctggacgtcaagaccgactccacgggaacccactccctctacacgatgtaccaggactacgagatcatgttccatgtctccaccctgctcccttacacccccaacaacaggcagcagctgctacggaagaggcacataggaaatgacatcgtgacgatcatcttccaggagcctggcgcgctaccgttcacccccaagaacatccgctcccacttccagcacgtcttcatcattgtccgagtccacaacccctgcactgataacgtctgttacagtatggctgtgacccgatccaaagacgctcctcctttcggcccccccatccccagtggaaccacattccgcaaatccgacgtcttcagaggacttcttgctggccaaggtgatttaacgcttgaggaacgccgcggaacaagttccgacaagtttcacaccatgggccaccaggacccgccaggagtatctcaaggacctggccgaaaactgtgtctccaacacccccatcgactccaccggcaaattcaacctcatctccctgacctccaagaagaaggaaaagacaaaagcacgggctggcgctgagcagcacagtgcaggggccatcgcctggagggtggtggcccaggactacgcccagggggtggaaatcgactgcattttgggaatttccaatgagtttgtggtgctcctggacttacgcaccaaggaggtggtgttcaactgctactgcggggatgtcattggctggactccagactcctccacactcaaaatcttctatggacgaggagaccacatcttcctacaggcgacagagggttctgtggaggacataagggagatagtgcagagactgaaggtgatgaccagtggctgggagacggtggacatgacgcttcggcggaacgggctcgggcagctgggcttccacgtgaagtacgacggcacggtggccgaggttgaggactatgggttcgcctggcaggccggcctccggcagggcagccgactagtggagatctgcaaggtggccgtggtcacactgacccacgaccagatgatcgacctgctgcgcacctctgtcactgtgaaggtggtcatcatcccgccttttgaggacggcactccccggaggggttggccggagacctacgacatgaatacctcggagcccaagacggagcaggaaagcatcactcctgggggccggcccccctaccgcagcaatgctccctggcagtggagcgggcccgcatcccataactctctaccagcctccaagtgggccactccaaccactcccggccatgcccagtccctgagccggcccctgaagcagacccccatagtccccttccgggagtcccagccactgcacagcaagaggcctgtcagcttcccagaaaccccttacacagtatcaccagcaggggccgacagagtccctccctaccgacagccttctgggagcttctccacccccggttcggccacctacgtgagatacaagccatccccagaaaggtacacggctgccccacaccccctgctatctcttgatccccacttcagccacgatgggacgtccagcggcgactcctcttccggcggcctgaccagccaggagagcaccatggaacgccagaagccagagcctttgtggcatgtgcctgcccaggccaggctctcagccatagccggaagcagcgggaacaagcacccgtccaggcaggatgcagcaggcaaagattctcccaacaggcattccaaaggagaacctcaatactcaagtcattccagcagcaacaccctctccagcaacgcatccagcagccacagcgacgaccgctggttcgaccccctggaccccctggagccagagcaagaccccctctccaagggtggctctagtgacagcggcatcgacaccaccctctacacctccagccctagctgcatgtccctggccaaggctccacggcccgccaagccacacaagccccctggaagtatgggcctttgtggcgggggtcgcgaggccgctgggaggtcccaccacgcagacaggcggcgggaggtctcccctgcccccgcagttgccggccaaagcaagggctaccgaccgaagctgtactcctccggctccagcacccccacgggactggcggggggcagccgagacccaccgaggcagcccagtgacatgggctcgagggttggctaccccgctcaggtttacaaaactgccagtgcagagactcctcggccctcccagctggcccagcccagcccctttcagctctccgcctccgtccccaagtccttcttctccaagcagcctgtacgcaataagcacccaacagggtggaagagaacggaggagcccccaccacggccactccccttcagtgacccaaagaagcaggtggacacgaacaccaaaaatgtctttgggcaaccgaggttgagggcatccctccgagacctccggtcaccacggaagaactacaaatccaccatcgaggatgacctgaagaaactcatcatcatggacaacctggggccagagcaggagagagacacgggacagtcaccgcagaagggcctgcagcggacgctgtcggacgagagcctgtgcagcgggcgccgggagcccagcttcgccagccccgctggcctagagccagggctgcccagcgacgtgctcttcaccagcacctgcgccttcccgtccagcacgctgcctgcacgccgccagcaccagcacccccacccgcccgtcggccccggtgccacccctgccgccggcagcggctttcccgagaagaaatccaccatctcagcctcggagctctcgctggctgatgggcgggaccgccccctgcggcgcctggaccctgggctgatgcccctgcctgacacagctgctggcctcgagtggtccagcctggtgaacgcagccaaggcatacgaagtgcaaagagccgtctcactcttctctctgaacgacccggccctgagcccggacatcccgcctgcacacagtcctgtccacagccacctgagcctggagaggggacccccgacccccaggaccacccctaccatgagcgaggagccacccctggatctgacaggcaaggtgtaccagctggaggtgatgctgaaacagctgcacactgacctgcagaaggagaagcaggacaaggtggtgctccagtcagaggtggccagcctgcggcagaacaaccagcggctgcaggaggagtcgcaggccgccagcgagcagctgcgcaagtttgcggagatcttctgcagggagaagaaggagctc

SEQ ID NO: 130032 - DNA, 2884 bp, Homo sapiens
ccggggcgtccagatgcacagtctctgacatcagctctcctgggaccctccaagagcatatagtgtctagaaggcactaaggcatggcgaggacaacatccttgctgcctccagctggcgggcgaccacagctactgcctgctctgcgctactgagccactcggtctggagcccccaggacagcacctgcttcctgaggttgtcctggctcagctgtgcacagcgatggtggagaactgggactccacagggttcacaaccttcctgtcaggtttcagggcccagcatccttcatccttgggccttggcttgccctggaacaattggcttgattggctgggggacccagtagagtgacaccacagcgtacggggccagcagcactccagtgctcgtggactatgaccacctatcgggccatccccagcgatggtgtggacctggcagccagctgtggcgccagggtgggcgatgtcctccctgggccacacacaggggactacgctcccttgggattctgggcccagaatggcagcatgtcccagcctcttggcgagagcccggccaccgccaccgccaccgccaccgccaccacccgccccagccccaccactcccgcaatgcccaagatgggcgtgcgcgcaagggtggccgactggccgcccaagcgggaggccctgagagagcacagcaacccaagcccctcccaggacacagatggcacaaaggccaccaagatggcccattccatgaggagcatacagaacggacagccccccaccagcaccccggcttcctcagggtccaaagccttccaccgactctccaggagaaggtccaaagacgtggagttccaggacgggtggccccggtcccccggcagggccttcctcccccttcggcaccgcagcagcagcgagatcaccctcagcgagtgtgacgcggaggacgcgggggagccgcggggggcccggcacacgggggcgctgcccctcttccgcgagtacgggagcacctcgtccatcgacgtgcagggcatgcccgagcagagcttcttcgacatcctgaacgagttccgcagcgagcagcccgacgcccgagggtgccaggccctcaccgagctcctccgggcagatcctggcccacacctcatggggggcggcggcggagccaagggggactcccacaacgggcagcccgccaaggacagcctcctgccactgcagcccacgaaggagaaggagaaggcccggaagaaacctgcgcggggcctcggcggcggggacacggtggactcgtccatctttcggaagctaaggagcagcaaacccgagggggaggctgggcgttccccgggggaggccgacgagggccggagccccccggaagccagcaggccgtgggtgtgtcagaagagcttcgcccacttcgacgtgcagagcatgctgttcgacctcaacgaggcggccgccaacagggtgtcggtgtcgcagcggcggatcactcaccacgggtgcttcggccgcttccgccgcctcggccataggctaccctcacggcctcgcgggcacacagcctcggaggcctggacccggccttcaccagcacagaggacctaaactgcaaggagaacttggagcaggacctcggcgatgacaacagcaacgacctgctgctcagctgcccgcacttccgcaatgagatcgggggcgaagtgtgagcgcaacgtgagcttctcccggctttccgtgggctccccgagcagcggcgagggccactggggcagagcccgccctgagcgcctaccgcaccaacgccagcatctcggtgttggaagttcccaaggagcagcagcggacgcagagtcggccccggcagtaccagcatcgagcatgtggacctgggcgcccgctactaccaggattacttcgtgggcaaagaacatgccaattacttcggcgtggatgagaagctggggccagtggctgtgagcattaagcgggagaagctggaagaccacaaggagcacggacctcagtaccagtacaggatcatcttccggacccgcgagctcatcaccctgcggggctccatcctggaagatgctacgcccacagccaccaagcatgggaccgggcggggcctgcccttgaaggatgccctggagtatgtcatccccgagctcaacatccactgcctgcggctggccctcaacacccccaaggtgacggagcaactgctgaagctcgatgagcaagggctctgccggaagcacaaggtgggcatcctctattgcaaggccggccagagctccgaggaggagatgtacaacaatgaggaggccggccccgcctttgaggagttcctctccctcatcggcgagaaggtctgcctgaagggcttcaccaagtacgctgcccagctggacgtcaagaccgactccacgggaacccactccctctacacgatgtaccaggactacgagatcatgttccatgtctccaccctgctcccttacacccccaacaacaggcagcagctgctacggaagaggcacataggaaatgacatcgtgacgatcatcttccaggagcctggcgcgctaccgttcacccccaagaacatccgctcccacttccagcacgtcttcatcattgtccgagtccacaacccctgcactgataacgtctgttacagagccaaaatcaccagccaggcctgggcactgggcttcaaggaccaagaggcacgagtgatggcccagaggaaagtcggagggaagcagggcctacctgtggaggcagctcctctctggacagacctgaccctgcctctaccctgtggagggagcccggacacagctctccagcttaccatctcctga

SEQ ID NO: 130033 - DNA, 2556 bp, Homo sapiens
aagaggaaactggttcagaactgtgggcagccagcccaagagcacgcagctgtccaggggcagagtccacgtctggcttctttgtctggagttgaaagccagatcaccaccttctggtatctttcatttgtgttaaaggggtggaacctgagcctccaacagcagcctcaggtcattcataggtcaagccccaggcctgaactgccactagacaaggcttttggctcccttcctgccctctcgccaatctcccagccatccgcagagccatcctgtgcaaaggaaggagctaggctgtgcgccctgggcgtcatgatccttctgcgggcctccgaagtgcggcagctgcttcacaataagttcgtggtcatcctgggggactctgtgcatagggcagtatacaaggacctggtgcttctgctgcagaaggaccgcctgctcactcccgggcagcttagagcaaggggggagctgaacttcgaacaagatgagctggtggacggaggccagcggggccacatgcacaacggccttaactaccgtgaggtccgcgagttccgctccgaccaccatctggtacgtttttacttcctcacccgcgtgtactccgattacctccagaccatcttgaaagagctgcagtcgggcgagcacgcccccgacctggtcatcatgaattcctgcctctgggacatctccaggtatggtccgaactcctggagaagctacctggagaacctggagaacctgttccagtgcctgggccaggtgctgcccgagtcttgcctcctggtgtggaacacggccatgcctgtgggcgaggaagtcaccgggggttttcttccgcccaagctccggcggcagaaggccaccttcctgaaaaacgaagtggtcaaagccaacttccacagcgccaccgaggcacgtaaacataacttcgatgtactggacttgcatttccacttccgccacgcgagggagaacctgcactgggacggggtgcactggaatggacgtgtgcaccgctgcctctcccagctgctgctggcccacgtggccgacgcctggggtgtggagctgccccaccgccaccccgtgggcgagtggatcaagaagaaaaaacctggcccgagagtcgaagggccgccccaggccaacagaaatcacccggccttacctctgtccccacccttaccttcccccacataccgccccctgcttgggttcccaccccagcgcttgccgctgctcccgctcctgtccccacagcctcctcctcccattctccatcaccagggaatgccccggttcccacagggtcccccagatgcctgtttttcctcagaccatactttccagtcggatcaattctattgccattcagatgtcccctcatcagcccatgcaggtttcttcgtcgaagacaattttatggttggtcctcagctgcctatgcccttcttccccacaccccgttatcagcggcctgccccagtggaccaacaacagcccttcacggtcagccacagagctcttgctcttgctgccaggaggcaacatttacggttaaatctggagttgtacaaagcggccgcccgtctcttcgacaattttatgttcacgacttctgcaaaatacagccgcagcagctcctggtcagccatgccaccacgaaggcaacaactgatagatattctacagcgtcctgtgttgccagatgattttgcccaattggaggctaatacaagtgttctgagcacatttaagatgagaaaactgaggactcagaaattaaataacttgcctaagatggtagagctctcttcaaacagggatccactgagagggtggccagagatgcagggggtaaaactccacagggagaaggaatgctctagccgaaatttgtaccaatttgaacaggagcctatccaaatgagaaggagccagaaaaccaatccttgtaatatgacaaaacaaggcccttcaacaccccccaaaaatcacactagttcaccaacaatggatccaaaccaagaagaaatccctaatttacctgaaaaagaattcaggagaacaatcagtgttcccaaggaagaagagaattctaaaagcttagaaaatatatttgggagaataattgaggaaaacatccccagcattgctagagacctagacatccaaatacaagaagcacatagaacacatcagaaattcatcacaaaaagatcttctcctaggcaccttgtcatcaggttatccaaagctaagatgaaggaaagaattttaagagctgtgagacagaagcaccaggatgaacctgggcacttagctgtgcaggaacaatggcaagcctttagcccgatcgggggcggcaataggcaactcgctggatcagaagcacagtggacaccctgcctgatctggagggatggaagtcagcggcaggtctgcgacggtggcagacagcagtggtggatggtgatcgaaagctcagctcgagcagtaacaaacatggaccagaagagagtgcagttgcaagatttaatagagtga

SEQ ID NO: 130034 - DNA, 1269 bp, Homo sapiens
tttttttttttttacttctgtgcaacttgtttatttccattttatttttacacaaaggcaaagagaataggagtgaggaggcaggaataacgctgggtcactcccaggaagtggggaagaggctgcagccaagaagaatgagtcaggctgctcttccttggctttcttggtaacagcaatgaacaaaaggaagacgaggcatggactccaggcttaagttaacaaggtcagtctgttcaggccaagcaatggaaaggaagtgtcagatctgtccaatccatgttcataaagaggaaataaggcctaggtccgtctattgaggccttggctcaggattggctggggcccttctctttgaaggtcgaggccgctgtccccagggcgtataggggccacggggacgatacctgccaaaacccctatgtaccactggggcaggccgctgataacggggtgtggggaagaagggcataggcagctgaggaccaaccataaaattgtcttcgacgaagaaacctgcatgggctgatgaggggacatctgaatggcaatagaattgatccgactggaaagtatggtctgaggaaaaacaggcatctgggggaccctgtgggaaccggggcattccctggtgatggagaatgggaggaggaggctgtggggacaggagcgggagcagcggcaagcgctggggtggaacccaagcagggggcggtatgtgggggaaggtaagggtggggacagaggtaaggccgggtgatctctgttggcctggggcggcccttcgactctcgggccaggttttttcttcttgatccactcgcccacggggtggcggtggggcagctccacactccaaggcgtcggccacgtgggccagcagcaggttgtgccgcatataaggccaattgccaaatggacaaactcgtaaatttcgccatacgcgcgccgaacaatggaggcgaataattgatataccaattacccaacgatacccaaaaccagccgctgactcgaaggaaacgccaacacacgcagctgcccactgaatccccatccccttccccaccaccgcctccacccacccaaggcggtgccaatcttgcggatcaaatctctttctgtccgccatccccaccacaatgcctactcttttcaccaagttgagttctgcagctctcagtgaccatggtgggctgaagttggttcccagaggctcctgagagccaattgctaaatatttaggagttttgccagtcagttgtagag

SEQ ID NO: 130035 - DNA, 197 bp, Homo sapiens; identical to SEQ ID NO: 118893

SEQ ID NO: 130036 - DNA, 4205 bp, Homo sapiens
  misc_feature (1)...(4205): n = a,t,c or g
gcaggacgcctgagagcttgaggccacacgaggctgtggagcggcgtgactcaaacgtggcgcgcatcagctcgcacacttccaaacctcgcgatagctactggccctgggcgagccgttgggattgcgcttgcgcacagcgtgtcttctggatcgccatacctaccctgtggtcctcatcttcctggcctcatagctcctcctcgccaagcatgtccaccccgttgcaaagagctgtgggagataccaagagggccttgtctgcatcttctagttcctctgccagtctaccctttgatgacagggactcaaaccatacctcagaggggaatggcgactctttgttagctgatgaagacactgactttgaagacagcttgaatcgcaatgtgaagaagagagcagcaaaacgaccaccgaaaacaacaccggtggcaaaacatccaaagaaagggtcccgagtggtacatcgtcatagccggaaacagtcagagccaccagccaatgatcttttcaatgctgtgaaagccgccaaaagtgacatgcagtctttggtagatgagtggctggatagctacaagcaagaccaggatgcaggatttctggagcttgttaactttttcatccaatcttgcggatgtaaaggcattgtgacccctgagatgttcaagaagatgtccaactcagagatcatccagcacctaacagagcagtttaatgaggactcgggggactaccctctcatagctccaggtccatcctggaagaagttccagggcagcttctgtgaatttgtgaggacattggtctgtcagtgccagtacagcctcctctatgatggcttccctatggacgacctcatctccctgctcactggcctctcagactcacaagtccgcgccttccgtcacactagcaccctggctgctatgaaactgatgacctccctggtaaaagttgccctccaactgagtgtgcaccaagataacaatcagcgtcagtatgaggctgaaagaaacaangggccanggcagagggcacctgagcggctggagagcctgttggagaaaccaaaagagctccaagagcatcaagaggagattgagggggacatgaatgccctcttcaggggtgtctttgttcatcggtacanggatgtccttcctgagatccgtgctatctgcattgangaaattgggtgttggatgcaaagctacagcacgtctttcctcaccgacagctatttaaaatatattggttggactctgcatgataagcaccgagaagtccgcgtgaagtgcgtgaaggctctgaaagggctgtacggtaaccgggacctgaccgcacgcctggagctcttcaccagccgcttcaaggactggatggtttccatgatcatggacagagagtacagtgtggcagtggaggccgtcagattactgatacttatacttaagaacatggaagggttgctgacggacgcggattgtgagagcgtctaccccgttgtgtatccttntaatngaggcntggcttctgccgcaggcgaatttctgtactggaaacttttctaccctgagtgcgagataagaacgatgggtggaagagagcaacgccagagcccaggcgcccagaggactttcttccagcttctgctgtccttctttgtggagagcgagctccatgaccacgctgcttacttagtanacagtctgtgggactgtgcaggggctcggctgaaggactgggagggtctgacaagcctgctgctggagaaggaccagaacctgggtgatgtgcaggagagcacactgatagaaatccttgtgtccagtgcccggcaagcttcagaggggcacccgcctgtgggccgggtcactgggaggaagggcttaacctctaaggagcgcaagacccaagccgatgacagggtgaagttgactgagcacctcatccccctgctgccccagctcctggccaagttctcagctgatgcagagaaggtcactcccctgctccagcttctcagctgctttgacctccacatctactgcactgggcgcttggagaagcacctggagctgttcctgcagcaactccaggaggtggtggtgaagcatgcagagccagcggtgcttgaggctggggcgcatgccctctacctgctctgtaatcccgaattcactttcttcagccgggcggactttgcccgcagccagctagtagatttgctgactgaccgcttccagcaggagcttgaagagctgttacagtcgtccttcctagatgaggatgaggtatataatctggcagccactctgaaacgcctctctgccttctacaacactcatgacctgactcgctgggagctctatgagccatgttgccaactcctgcagaaggctgtggacacaggagaggttcctcaccaggttatcctgccagccttgactcttgtctatttttccattctctggacactaacccacatttctaaatcagatgcttcccagaagcagctgtcgagtttgagggacagaatggtggccttctgtgaactctgccagagttgcctctcagatgtggatactgagatccaggagcaggcttttgtcttattaagtgatctacttctcatctttagccctcagatgatagttgggggccgtgatttccttaggccacttgtcttttttcctgaagctactctccagtctgagctagccagcttcctcatggaccacgtcttcatccagccgggagacctgggcagtggtgattcccaggaggatcatttacagatagagcggctacaccagcggcgccgcctcctagccgggttctgcaagctgttgctttatggggtgctggagatggatgcagcctcagatgtttctaaacactacaacaagttctacaatgactatggtgacattatcaaggaaacantaactagagcaaggcagattgaccgaagtcattgttcccgaatcctgctgntgagcctnaagcagctgtacacagaactgctgcaggagcatgggccccagggcctgaatgagcttcctgccttcatcgagatgagggacctggcccggaggtttgccttgagttttggaccccagcagctgcagaaccgtgacctcgtggtcatgctacacaaggaaggcatccagttctccttgtctgagcttcctccagctggctcctccaatcagcctccaaatctggcattcctggagctcctttcagagttttccccccgactcttccatcaggacaagcagcttttgctgtcctatctagaaaagtgcctgcagcatgtctcccaggcacctggccatccctggggcccagtcaccacctactgccactccctcagccctgtggagaacacagcagagaccagccctcaggtcctccccagctccaagaggaagcgcgttgaagggcctgccaagcctaacagagaggacgtctcctcgtcccaggaagaaagtctgcagctgaacagcatcccgcccacgcccaccctcacctccacagctgtgaagagcaggcagcccctgtgggggttgaaagagatggaggaagaagatggctcagagttggattttgcccaggggcagcccgtcgcaggcaccgagaggtcaaggttcttgggtccacaatatttccagactccacacaacccttcaggtcctggcctgggcaaccagctgatgcgactcagccttatggaagaggacgaggaagaagagttagaaatccaggatgagtcaaatgaagaacggcaggatacagacatgcaagcaagtagctactcttccaccagtgagcgcgggctggacctcttagattctacagagctggatattgaggatttctgacaggactctgggcccctccccagctccactccctacctcaagaatgtgaccatttggaaaaggcttcagccctgggctctgaggggaaagagttgggcattgtttttctaacctaacctttccctctggggtagagaagccgagagaccctgtcctccctaatgcactgtggcccagtccccttgcctttttcctgttctgtttggagtggagaagggcagcacctctgtgtttaatggaaatagcccatagtctcctggatttttggaacatctttctcagcctattttgtgtcctaatgattcgctcaataaa

SEQ ID NO: 130037 - DNA, 497 bp, Homo sapiens
aagggaaaaaagttaataaacttcataatataaaaatcaattatttcaggactaactcagactctgccatggaagtggcagcataagcctacttgtgtgataatgatgagaccaagtgttaatgtcattgttacctttttttcatatttctgatctttttatacatattagatggcaaacatccagagaaagggtcccgagtggtacatcgtcatagccggaaacagtcagagccaccagccaatgatcttttcaatgctgtgaaagctgccaaaagtgacatgcaggtaaagcagtgtctcacctctgttgataccatctcactttttgtaaggtggtaaggacaagtgtctacaaacttgatttgatgtgaacgttttagtgaatgtaacatatcaagaaagataagattatggagtgaatccttgggagtgataggaagggggtaaccttgaatgagagagcatgttcctttttttttttttttgagacttagc

SEQ ID NO: 130038 - DNA, 474 bp, Homo sapiens
tttttaatgtcattgttacctttttttcatatttctgatctttttatacatattagatggcaaacatccagagaaagggtcccgagtggtacatcgtcatagccggaaacagtcagagccaccagccaatgatcttttcaatgctgtgaaagctggactatgttgacatggaaattcaccttccattatccacggctcctctccctgctccacttccttcacctccactccatgatgatgtttggcttggtgataatcataccccacagaaactagatggctgtagttctccaacatcacatccccgtatgctatcttctcatcagggtccagttgctgccactcctcctgggtgaaatccacagccacatctttgaatgacactggcccctgcaatgtgttcattttctgctgctcttggaaacttgcagagactgtggctgatagaccgtacagcgacggccgggggccagc

SEQ ID NO: 130039 - DNA, 1098 bp, Homo sapiens
gagtgtcgtggaattcagcagggtcagaagggaggtggtcgccctccgtcgtggtctggcgtgtattccgagccttggtgtctggcggtttccgagcgttggtgtctggcggtttccgagcgttggtgtcttggcggtttccgaccgttggtgtctggcggtttccgaccgttggtgtctggcacgcgccaccctctcttgctttggttgcgccatgccgatgtaccagacaagaagacaagaaaatgatttgaggacagcttcaatcgcggtgtgaagaagaaagcagcaaaacgaccactgaaaacaacgccggtggcaaaatatccaaagaaagggtcccaagcggtacatcgtcatagccggaaacagtcagagccaccagccaatgatcttttcaatgctgcgaaagctgccaaaagtgacatgcagcaccgagaagtccgcgtgaagtgcgtgaaggctctgaaagggctgtacggtaaccgggacctgaccgcacgcctggagctcttcactggccgcttcaaggactggatggtttccatgatcatggacagagagtacagtgtggcagtggaggccgtcagattactgatacttatccttaagaacatggaaggggtgctgatggacgtggactgtgagagcgtctaccccattgtacttttctaccctgagtgcgagataagaacgatgggtggaagagagcaacgccagagcccaggtgcccagaggactttcttccagcttctgctgtccttctttgtggagagcaagctccacgaccacgctgcttacttagtagacaacctgtgggactgtgcagggactcagctgaaggactgggagggtctgacaagcctgctgctggagaaggaccagagcacgtgccacatggagccagggccagggaccttccacctcctaggagaatctccaggaatttctgccattgtgcagggagcaattgaaaaatcaggcgagaggagctcgcccccacccaaacgtattggttcgatgaaggaagggcccatggttctgccactggccctggacacccagtgctggtttcccgtggaagtccccctggactga

SEQ ID NO: 130040 - DNA, 870 bp, Homo sapiens
gtcgcagttttttttttttttttttttttattttttgagacagagtctcactctgtcacccaggctggagtacagtggcgcgatcatagctcactgcagccttgaactcctggactcaagcagtcctcccacctcagcctcctgaatagctgaatacaggcatgcgctaccatacctggctaattattattattgtttttgtagaaatggggtcttgctctatagccccaggctggtcttgaactcctgggctcaagccatcctcctgccctggcctcccaaagtgctgggattataggcatgagccacggtgcccagcctttgtcttagtttttggtccccctcacccgaccccagagttctagaaccattcccttgcaaagaaagggactgctcacggcctggggatggagaagtgctgtggtaggagccctttcttctctttcttccccagctggattgccaaacctaccctgcggtcctcgtcttcctggccccatagctcctcctcgccaagcatgtcttccccactgcagagagctgtgggagatacccaagagggccttgtctgcatcttctagttcctctgccagtctacccttcgatgacagggactcaaaccatccctcagaggcatgtacaacccctggtgggggctgggaggtggcagatgggaatactgactctttattagctgatgaaggcagtgactttgaagatagcttcaatcgcaatgtgaagaagaaagcagcaaaacgaccaccgaaaacaacaccggtggcaaacaaccaaagaaagggtcccgagtggtacatcgtcatagccggaaacagtcagagccaccagccaatgatcttttcaatgctgtga

SEQ ID NO: 130041 - DNA, 475 bp, Homo sapiens
  misc_feature (1)...(475): n = a,t,c or g
ggggtncnnaaactgagacctattgaagngcgctggaaacgaacatcggctcctcctacaactacggcagcgaggaccaggcagagttcctgtgtgtggtgtccaaggagctccacagcaccccaaacgggctgagctcagagtccagccgcaaaaccaagctgttacaagccagaggcacccggatgtgaggccccagatcacctccagggacttggggttcccatctgaaatcctttatttttgtaccatggggtgggccccgggcctgagaaggaagaagcaccctctccccggcctcctctgtctgcacccgtggggctgtgacttactcctgcctccaggggccgggcggggcccccctgggacctcttaaggcccaaggtgggccccaggacctctgggcagagtggactgctcatggcatatgtgtggcaatgtctggctgtgtctctccggcacctgcgtcccctct

SEQ ID NO: 130042 - DNA, 930 bp, Homo sapiens
atggacgtcgtccggctgcagctgaaattcacggagcatctatttcatactgatgcacacaggcagctttacagtcgtctgcgactatcttgtctacctagagctggccgacggctcttcatctactgtgcccttctagcccgcgtaagctctgttcgctggttctcgctccgtatatctggtagtgctcgtgtcggagcagagagcttccttacaattttttctgacgagcttgctcagcacccaggacccctcggcactggccacccccaaaacctcagccccttacccaacctgtctcgcggtacactagttcatcaatgtgccccaaagcagtgctgggccttcgcacacgttgtttcccgttcatcaagaaggggcgaatttttttcattcgacagatggaagaagcaccgctcagaagtcagggaatctgcccaggttcctacaactaaaagggagccaggatgccagtcaaatgctgacgatcatgctgccgatgtttatcaaaccgatcaactgaataccaaacaagaaactaaaaccgttaatattatttccattcttcccgcaaaagttgccgtagacaactcccaaaataaacggaacgcacaagccttcggcgcgcttattggcgcagtcgctggcggtgttatcggccacaacgtcgggtctggcagcaattccggaacgacggcaggtgcagttggcggcggagctgtaggcgcggcagcgggttctatggtgaatgataaaaccttaatggaaggtgtttctttaacctataaggaaggcaccaaagtgtatacctctacccaggtgggtaaagagttccagtttacgacaggtttagccgttgttattaccaagacgtataacgaaacgatcacctgcggtcaggaatttgagaacacctgggcagcatggtga

SEQ ID NO: 130043 - DNA, 612 bp, Homo sapiens
atggtgacagccgccctgggtcccgtctgggcagcgctcctgctctttctcctgatgtgtgagatccgtatggtggagctcacctttgacagagctgtggccagcggctgccaacggtgctgtgactctgaggaccccctggatcctgcccatgtatcctcagcctcttcctccggccgcccccacgccctgcctgagatcagaccctacattaatatcaccatcctgaagggaaaggcaaccacgggggacccccggggggggggctatcggctgcgtattatcaccgtgcctttttgctactttgtgcctgctccatccagggaagagctctccctccactctccttccctccctgatgagaccggggcctacctcattgaccgtgaccccacctacttcgggcccatcctgaacttcctccggcatggcaagctggtgctggacaaggacatggctgaggaggccgctgagcaattcacgtccagggctctctgggctgcctggtttgggaaatgtcacgttgattcccgcacgtgcccagggccatctccgctgcccccgctacccccgcccctgctgtgggcgcgtcagactgcggggctgcggtga

SEQ ID NO: 130044 - DNA, 1044 bp, Homo sapiens
  misc_feature (1)...(1044): n = a,t,c or g
atgaggatggaggccggggaggcagcgccgccggcgggggcgggcggccgcgccgcaggcggctggggcaagtgggtgcggctcaacgtggggggcacggtgttcctgaccacccggcagacgctgtgccgcgagcagaagtccttcctcagccgcctgtgccagggggaagagctgcagtcggaccgggatgagaccggggcctacctcattgaccgtgaccccacctacttcgggcccatcctgaacttcctccggcatggcaagctggtgctggacaaggacatggctgaggagggtgtcctggaggaagccgagttctacaacatcggcccgctgatccgcatcatcaaagaccggatggaagagaaggactacacggtcacccagggtcccacccaagcatgtgtaccgcgtgcttgcagtgccaggaggaggagctcacgcaaatggtctccaccatgtctgatggctggcgcttcgagcagctggtgaacatcggctcctcctacaactacggcagcgaggaccaggcagagttcctgtgtgtggtgtccaaggagctccacagcaccccaaacgggctgagctcagagtccagccgcaaaaccaagagcacggaggagcagctggaggagcagcagcagcaggaggaggaggtggaggaggtggaggtggaacaggtgcaggtggaggcagatgcacaggagaaaggttcccgtccgcaccctctcagacctgaggctgagcttgcagtgagggcttctcctcggcccctcgcccgcccccagagctgccatccctgctgttacaagccagaggagnccggatgtgaggccccagatcacctccagggacttggggttcccatctgaaatcctttatttttgtaccatggggtgggccccgggctgtagaaggaagaagcaccctctccccggcctcctctgtctgcacccgtggggctgtggacttactcctgcctccaggggcggggcggggccnctggggaacctgcttgaaggnccaaggtnggctcnaggg

SEQ ID NO: 130045 - DNA, 2448 bp, Homo sapiens
atgagaagaggagaaacccgctctcggcgccccccacagtgctgggccttcgcacacgttgtttcccgttcatcaagaaggggcgaatttttttcattcgacagatggaagaagcaccgctcagaagtcagggaatctgcccaggttcctacaactaaaagggagccagtgttatttcaacataaaatcaatataaaaattgttatcgcgttggttgacatcctgtttgcacttggccttggaaacctggtgtgcgtctcccccgtgcagcttttctcagttcagactgactcaagagccacgggtgaccagcggctaccgtcatggacagcacagcgctacggaaccaggactctagggcctgatggtttcactgaaagatgcccctatggccctagcccagagtccctgctctgctctgctctgccctggctgagggacctcgggatgcccgtggccgaggccccccaggtggctggcgggcagggggacggaggtgatggcgaggaagcggagccggaggggatgttcaaggcctgtgaggactccaagagaaaagcccggggctacctccgcctggtgcccctgtttgtgctgctggccctgctcgtgctggcttcggcggggctggagatgctgtcagaccctggctccaggtcctatggctcgggtctgcttcctgcttgggcaaagtgccccaaagctccccaccagaggagtttaattccccctgattatgctcctggggtaaatcaccccccaccccaggagaggtgctccatggggctgaggacccaagggactttgggccgccaccgggtcctttccgctcagcaggttgctttttctgtgtccctgctgatggccaaaatagcctttgcaaaacagaagtctgatgacatcattcctgattttaaacttttcatggttacccttgttcatcggccaaacaggctttcagcccgggtcctcaccatggtccccgtgctaccggccccgtgccccatgctgctccctctgctggaagggtacaaggcggaggtgatggtcagccaggtgtactcaggcagtctgcgtgtactcaatcgccacttctcccaggatcttacccgccgggaatctagtgccttccgcagtgaaaccgccaaagcccagaagatgctcaaggagctcatcaccagcacccgcctgggaacttactacaactccagctccgtctattcctttggggagggacccctcacctgcttcttctggttcattctccaaatccccgagcaccgccggctgatgctgagccccgaggtggtgcaggcactgctggtggaggagctgctgtccacagtcaacagctcggctgccgtcccctacagggccgagtacgaagtggaccccgagggcctagtgatcctgggtcagtactgcgagtggaaaccgcccgggaggaggatgcagacgccgcggccggcgatgaggatggaggccggggaggcagcgccgccggcgggggcgggcggccgcgccgcaggcggctggggcaagtgggtgcggctcaacgtggggggcacggtgttcctgaccacccggcagacgctgtgccgcgagcagaagtccttcctcagccgcctgtgccagggggaagagctgcagtcggaccgggatgagaccggggcctacctcattgaccgtgaccccacctacttcgggcccatcctgaacttcctccggcatggcaagctggtgctggacaaggacatggctgaggagggaagccaggtgtggacggtcacatccggaggctggggtgacaggaacgcagtgttgacaggcatggggagagctctgtctctctttctctggctgatccagtatctcaaattctgcctggtgagggcttgggtcctggaggaagccgagttctacaacatcggcccgctgatccgcatcatcaaagaccggatggaagagaaggactacacggtcacccaggtcccacccaagcatgtgtaccgcgtgctgcagtgccaggaggaggagctcacgcaaatggtctccaccatgtctgatggctggcgcttcgagcagctggtgaacatcggctcctcctacaactacggcagcgaggaccaggcagagttcctgtgtgtggtgtccaaggagctccacagcacccccaaacgggctgagctcagagtccagccgcaaaaccaagagcacggaggagcagctggaggagcagcagcagcaggaggaggaggtggaggaggtggaggtggaacaggtgcaggtggaggcagatgcacaggagaaagcccagtcatctcaggatcccgctaaccttttctcccttccaccactgcctcctcctccgcttcccgctggagggtcccgtccgcaccctctcagacctgaggctgagcttgcagtgagggcttctcctcggcccct

SEQ ID NO: 130046 - DNA, 576 bp, Homo sapiens
atgccgggcctgctgagccgcccccggcgggggtcgctccgggccaggccgtgcgggggcggcgaggcgctgcctgagcatgtggccatcgacgtgtgccccggccccatccgccccatccagcagatctctggctacttcccccacttcccgcgggacctgccccatgacgcccccgcgcgcccagccactgccagcgccggccgccgccgcccctctgacggcgcccgcgaccacgacaaggatggcgaccatctcttcggaagcctaacgatccagcacaggccctggcagctccatcccccgatttcccattcacaccctttgctgttctctacccgggacctgaagcccatggaccacaatgggctggcagacccctgtgtcaagctgcacctgcggccaggagccaggaaggttcccgaggcatgccagctagcacctgacctacaagattccagctgtttaactgccatcacaaaggctcatgatgtgttgacagtatttctgcctgctgctctgaaaattcaaggaaataaatacctgacatttattgaatgccagaagctgttctaa

SEQ ID NO: 130047 - DNA, 2025 bp, Homo sapiens
gtggctgccccctgcgttcctccatccaaccatgagctggtgtgctgcccagccctgctgctgcagatgtggagtgttattcatacggagcccagtggagggtcatctggcaacagcgggggctggggggtggagtgcagtcgggcttggaactgccagcaagaaatcgcgcttggattgcagagggacaccatgggagtccgaggagggcgggcggggagggcggtaaagagcgagggagttagaccacctccttctgcatcccagctcccccgctccctggtgtacgaccctgacattgctaacctccctggacctccgtttctcttcttcataatggacgttagtgacggtacctatgctgtaagcctgccaaaagaccaaactgacttgaggaggaaggaaaagaagagcctgcagggaggcaccagctcaccctgccagcaggatggctgggggccaaggcccatcaccactgagaatgcaccaaagaatgtagtggacaagggagaaggagcctcccggggtggaaacacacggaaaagcctcgaggacaacgctgggcctcagcctttggtgctgcctccatctaagcgagatccagagctcattcatcagcgactgcgccaggcctcggtgctcagggcggctccctgggtctggtcccatgctcctggccacacctcacgtcttggctaccgttgtggcttccagttgttcaaagcagctgtggtggcttcctccaaaagtggctacggatcagcaacagatgaaactcaaggggctatttatagcaggggctccaccagggtcaccccgagtgtccagccccacctccagcccatcagaaacatgagtgtgagccggaccatggaggacagctgtgagctggacctggtgtacgtcacagagaggatcatcgctgtctccttccccagcacagccaatgaggagaacttccggagcaacctccgtgaggtggcgcagatgctcaagtccaaacatggaggcaactacctgctgttcaacctctctgagcggagacctgacatcacgaagctccatgccaaggtactggaatttggctggcccgacctccacaccccagccctggagaagatctgcagcatctgtaaggccatggacacatggctcaatgcagaccctcacaatgtcgttgttctacacaacaagggaaaccgaggcaggataggagttgtcatcgcggcttacatgcactacagcaacatttctgccagtgcggaccaggctctggaccggtttgcaatgaagcggttctatgaggataagattgtgcccattggccagccatcccaaagaaggtacgtgcattacttcagtggcctgctctccggctccatcaaaatgaacaacaagcccttgtttctgcaccacgtgatcatgcacggcatccccaactttgagtctaaaggaggatgtcggccatttctccgcatctaccaggccatgcaacctgtgtacacatctggcatctacaacatcccaggagacagccagactagcgtctgcatcaccatcgagccaggactgctcttgaagggagacatcttgaactctgagatcctgtttggtgttgatgagctctccctcaccgggtttgggctgaagtgctaccacaagaagttccgaagcccagcccgagacgtcatcttccgtgtgcagttccacacctgtgccatccatgacctgggggttgtctttgggaaggaggaccttgatgatgctttcaaagatgatcgatttccagagtatggcaaagtggagtttgtattttcttatgggccagagaaaattcaaggcatggagcacctggagaacgggccgagcgtgtctgtggactataacacctccgaccccctcatccgctgggactcctacgacaacttcagtgggcatcgagatgacggcatggagggggcccagcaccctcagattggccaagacaccccaccaggcccctccgaccccccaggctgcttgtga

SEQ ID NO: 130048 - DNA, 1166 bp, Homo sapiens
tttcgtcctgggaccaggtgtgctgcttgcaccccgctccctgcctggacacaggctcactcgctgccttcttctgggggaaaccaactttttgccagcccacagctgctgtctccgccactggccaccgcccctgtcctgggagtcccttggcccagacacccacctgacttagtggctcctctgcaggaaaggtggctgccccctgcgttcctccatccaaccatgagctggtgcccatcaccactgagaatgcaccaaagaatgtactggacaagggagaaagaccctcccggggtggaaacacacggaaaagcctcgaggacaacggcttcaacagggtcaccccgagtgtgcagccccacctccagcccatcataaacatgaatgtgagccggaccatggaagacagctgtgagctcggacctgtgtaccgcacagagaggaacatcgctgtctccttccccagcacagccaatgaggagaacttccggagcaacctccgtgaggtggcgcagatgctcaagtccaaacatggaggcaactacctgcaaagaaatgtttccttaaaaggctctcgccttctctccggcaccctggcccctggccaccctctcaggagcccggaatgtgccagggagagccagggccccctgccactctatggcccatgccctgtggccccacagtcctggagtccccagggggcccaggtccctgagcacaatgccaacaacagggcacacccgtgcagactcccccaggacatgagggaaaaagcactagagagcagccagcccaggcagggaactccctgcatgacccaggctctgccctcctctccctcttcgttctatgctcagcccccttgtccgggacccgaagccacacacagagggaggctgggggacagggccggcagcacagagaacagagcttctaggaagttcctagaagagctgctcaaggaaagggctgtggtctgtggtcatggttctagtggaactggtgtgaaaggaggcagacctcagagatgcacgtatctgaaaccaggtctggaggggaaggaggagggcaaacggaggggcggaagaagacctggctctctgactcggaaaacactgagagattttaaacggatagaagacaaagctggcatcagctaa

SEQ ID NO: 130049 - DNA, 972 bp, Homo sapiens
atggaccccactttggataaactcatggggtgggagtttgagaacgcaagccttgaaaaagggcttgggagtggggcaagccccagagcgcagtccgtgctggtgggagcgtggcgactagttgcacagcaacggtccaggaagatgagtgcctgcgggaggaaggccctgaccctgctgagcagtgtctttgctgtctgtggcttgggcctcctgggtatcgcggtcagcaccgactactggctgtacctggaggagggtgtgattgtgccccagaaccagagcaccgagatcaagatgtccctgcactcaggcctctggcgggtctgcttccttgcaggtgaggagcgggggcgttgcttcaccatagaatatgtgatgcccatgaacacccagctgacatccgagtccacggtcaatgttctaaagatgatccgctcagccacaccattccctctggtcagcctcttcttcatgttcattgggtttatcctgaacaacatcggacacatccgtccccaccggacgatactggcctttgtctctggcatcttctttatcctctcaggcctctctctcgtggtgggcctggtgctctacatctccagcatcaacgatgagatgctcaacaggaccaaggatgcagagacctacttcaactacaagtatgggtggtcgtttgccttcgccgccatctccttccttttaacggagagtgccggggtgatgtctgtgtacctgtttatgaagcggtacaccgcggaggacatgtacaggccccaccctggcttctaccgccctcggctgagcaactgctccgattactcaggccagttcctacacccagacgcctgggtcaggggccgcagcccctccgacatctccagcgaggcctccctgcagatgaacagcaactaccccgccttgctcaagtgccccgactatgatcagatgtcctcttcaccctgctga

SEQ ID NO: 130050 - DNA, 1224 bp, Homo sapiens
atggcccgttcttacggcggccgggtgctggctgcaagaccctgctgggcatcgcggcggccgtgctggcggcgctgggcgcgcagtgctgtttcagctgcaggcgggccgcgccgagctgcgggggctgcgcgcgaggggctgggccaggagctgggcgccggccccgggctgccagaggacgggccgggacgctgctgccgctggccgccgcgctggccgcgctggtgctctgctggggttcacctgcttgctgctcgccgcgctctgtggccacctggggccgagctggcgcgggggcctggccccaggaggggaatggatctggctcagggcatcagagacacggggaccaagtggacccagacctgctctcatggggtcacagaaaataagaaacataacaaggacaaggcatgggcctttgcactggctgcattccggatgtaccacagcgactcccttttgcctcaccaggtcctgctcagatgccgcctgctctctcaagggcctcccctgcctctgcccttgcggtctctctgtgctgatccgcgtgcgcctggagctgcggcggcaccagcgtgccggccacaccatcccgcgcatctttcaggcggtagtgcagcgacagcccgagcgcctggcgctggtggatgccgggaccggcgagtgctggacctttgcgcagctggacgcctactccaatgcggtagccaacctcttccgccagctgggcttcgcgccgggcgacgtggtggccatcttcctggaggccggccggagttcgtggggctgtggctgggcctggccaaggcgggcaggaggccgcgctgctcaacgtgaacctgcggcgcgagcccctggccttcgcctgggcacctcgggcgctaaggccctgatctttggaggagaaatggtgcgggccccaccccccaatgctcaggccccacccctaacacctgtatctcctgcagatcgtcttttctacatttacacgtcggggaccaccgggctgcccaaggctgccattgtcgtgcacagcagtgccaggccttcgtgcccatcctcaaggactcttcgtgcggctcacagatgagttctatgtactgcgggcggctcagctgccctggtgtacgtgtcccaggactccacggaggagcagcaggacctgtcctcaaggacatgccaaagaaatggcttttcctgccctttgaggatgattga

SEQ ID NO: 130051 - DNA, 597 bp, Homo sapiens
ttaatttctgtctgtccatctaatggaagggcagttccatgagacagagatcttgactgtcttcttcatcacagtatcaccatcatctaaaacgttctgggcactggttagttgtagtaggtgatcagtaaatttccggggatgaatgaaggtcacataactcatgttgcattcagaaaagcatctgaaagtaaaaatgtgggccttgtcttcacgactgcgagcatctcgccagtttctcgctgcgagtttgtgaattcgccagtctttggtgactttcagagtgtgtttccattcacctgaactctgtgagaggcttcttccatccagaagcactttcctactatctttccttggagcctgatagaccaccaatggaatttgttccattgctaaagcatcaaatcccctgagatccattctccaagcacaaggatcagaatgggatgttcttctctccccacagaagaagcgcacgctgaaggggtcattgagctctcccgaatcaaatgtgttgagattgtgaaaagtgacatcgcatcccatgccactataaatacccgtttcaggtaagtccatcaggtggtagttccccat

SEQ ID NO: 130052 - DNA, 6401 bp, Homo sapiens
cgcggccgctatatataatgcagcatcacaccatgtagggcatttactcttattttatacattcagatatgtttgaaacattcttaaggctacaaaacagaacatagaaaaataaacaggaatatattcaacacttacaaaaagtgatatgataaagaatataaagtactagtttccttttaacacttcaaaagatatgtatatatacttttttttacaagtaacatcacaaatgctcacatcttcacatgctcttaaagtattatttgtactcagtgtaaggctattatcgtttttcatacataaaattttctagctctgtaacacaatgcaatttttaatccattcaagtaagttcaaccccaaagttgccgcttcccagcattaagacatgcacccacccctcttctaagattttctaaacttgtatttcggggagaaagacctcttttaaaaaataatccaattagtgggagagtaaatggctgacattagtagcaaaaccttagttatctgaaaataacatattggaaatgagacattattaggattttaaacaaacaatagcatttagacataaagtaggaagcaaaatacagtaaacagaaatagtgtagccaaatatcattctcttcagctaccttaagtaaaagacaaaacatttacctcatctaaaaatgaaggtaaaacgaaagaggcaaaaataaatattgctagtttctaggatggctgaatgttttctaaaccagaaatggttagaaaggaactttattgcaccaagtcaatcataagcaagtttgcagttcacaggcattttaattcaaccttgagtcacaaaggagaacaacacgctgcgagaatacagtctacagtctgcattaaataagaatatatcagcattgtggtctgggaaaacctatgcttgccaggacaaggcagggtgctgagcttaggtcatgccatgaaaatgaatttgtgggttatcagtaaacagtatgaggactacacagatgccagcatcctgctgccaaggagacatggggcaagagttgaagatttgagaggaaatgaagagacatacacaacaccaaaggaaaagggggctggaatcaagttcagccaaagcacctaacacaaaaaacaggtgagctttggtcagtctgttcttcaaaatatgtatgatcatatggtaatgaagtttcataatttccaactcaaaaatacaaatgatcctcagttctatacttttgcctctattctcttataaagaaatatgtcaacataacagtatgacataacagttaaaataaggacaaaagcttgcttatcttagtttgacctcagcataaggcaaaatcccctggagaatacatttaaaaacaaacttaaaaggaaaaaaagcgaaaccaacttcatgcaaagattccttttaaaactatcaaaagtcagttcttttattccagaggtcactgagaaaagtaccatctgctaaaattctctttcaagcacttcttccatcatatcctagaggtgagatatgggaaacagaaagcaaatcagtgttcctcaggagctatatctgttactcaattgagggtaagacaaagtgacaatgaagatatgagtagtatttccttccaatttttaaagattttcagaagctgagatcaaaccccactcaataaaatgcaggagactagaagcaacaacttattttggactcctgagatcaaacacattgaactttcaaatctgggtgtttctatcaaaatgtgattttcattaaaatcagtaagctagtcctacataaaaaagcatgagctgaaagtggaggaccctctatcttctcattccttaactgagccaccgatgttaagaaaaaaatggcttaagcggtaccttcaacaactattctagttaagaaggtgacaacaaattgaggccgcgaattcggcgaaaactctttcctttggttgtgctaagaggtgatgcccaaggtgcaccacctttcaagaactggatcatgaacaactttatcctcctggaagaacagctcatcaagaaatcccaacaaaagagaagaacttctccctcgaactttaaagtccgcttctttgtgttaaccaaagccagcctggcatactttgaagatcgtcatgggaagaagcgcacgctgaaaggggtccattgagctctcccgaatcaaatgtgttgagattgtgaaaagtgacatcagcatcccatgccactataaatacccgtttcaggtggtgcatgacaactacctcctatatgtgtttgctccagatcgtgagagccggcagcgctgggtgctggcccttaaagaagaaacgaggaataataacagtttggtgcctaaatatcatcctaatttctggatggatgggaagtggaggtgctgttctcagctggagaagcttgcaacaggctgtgcccaatatgatccaaccaagaatgcttcaaagaagcctcttcctcctactcctgaagacaacaggcgaccactttgggaacctgaagaaactgtggtcattgccttatatgactaccaaaccaatgatcctcaggaactcgcactgcggcgcaacgaagagtactgcctgctggacagttctgagattcactggtggagagtccaggacaggaatgggcatgaaggatatgtaccaagcagttatctggtggaaaaatctccaaataatctggaaacctatgagtggtacaataagagtatcagccgagacaaagctgaaaaacttcttttggacacaggcaaagaaggagccttcatggtaagggattccaggactgcaggaacatacaccgtgtctgttttcaccaaggctgttgtaagtgagaacaatccctgtataaagcattatcacatcaaggaaacaaatgacaatcctaagcgatactatgtggctgaaaagtatgtgttcgattccatccctcttctcatcaactatcaccaacataatggaggaggcctggtgactcgactccggtatccagtttgttttgggaggcagaaagccccagttacagcagggctgagatacgggaaatgggtgatcgacccctcagagctcacttttgtgcaagagattggcagtgggcaatttgggttggtgcatctgggctactggctcaacaaggacaaggtggctatcaaaaccattcgggaaggggctatgtcagaagaggacttcatagaggaggctgaagtaatgatgaaactctctcatcccaaactggtgcagctgtatggggtgtgcctggagcaggcccccatctgcctggtgtttgagttcatggagcacggctgcctgtcagattatctacgcacccagcggggactttttgctgcagagaccctgctgggcatgtgtctggatgtgtgtgagggcatggcctacctggaagaggcatgtgtcatccacagagacttggctgccagaaattgtttggtgggagaaaaccaagtcatcaaggtgtctgactttgggatgacaaggttcgttctggatgatcagtacaccagttccacaggcaccaaattcccggtgaagtgggcatccccagaggttttctctttcagtcgctatagcagcaagtccgatgtgtggtcatttggtgtgctgatgtgggaagttttcagtgaaggcaaaatcccgtatgaaaaccgaagcaactcagaggtggtggaagacatcagtaccggatttcggttgtacaagccccggctggcctccacacacgtctaccagattatgaatcactgctggaaagagagaccagaagatcggccagccttctccagactgctgcgtcaactggctgaaattgcagaatcaggactttagtagagactgagtaccaggccacgggctgcagatcctgaatggaggaaggatatgtcctcattccatagagcattagaagctgccaccagcccaggaccctccagaggcagcctggcctgtggcatcagtccctgagtcaccatggaagcagcatcctgaccacagctggcagtcaagccacagctggagggtcagccaccaagctgggagctgagccagaacaggagtgatgtctctgcccttcctctagcctcttgtcacatgtggtgcacaaacctcaacctgacagctttcagacagcattcttgcacttcttagcaacagagagagacatgacgtaagacccagattgctatttttattgttatttttcaacagtgaatctaaagtttatggttccagggactttttatttgacccaacaacacagtatcccaggatatggaggcaaggggaacaaagagcatgagtctttttccaagaaaactggtgagttaagtaagattagagtgagtgtgctctgttgctgtgatgctgtcagccacagcttcctgccgtagagaatgatagagcagctgctcacacaggaggccggatattctgagaagcagctttatgaggttttacagagtatgctgctacctctctccttgaagggagcatggcgagacccattggatggattggggtgaacagttcaggtcccatgcttggagcattgggtatctgatgtctgcaccagaacaagagaacctctgacggtggagaaccatgtggtgcaagaagagatcttaggtctcttctttataccaagctcatgttttataccaagctcatcttttataccaagctgtgcaggtgactatgcctcctcttctgcacagaatgcttccaccagcatcctgagaagaaatgattacttctgtaaaacatccttttttccagcctctgggaatcagcccccccctctctgcactatccgatcctcatcaacagagggcagcattgtgttggtcagtgttcccttggcgagcaattgaaacttgtttaggccctagggttgagcaattttaaggttgagactccaagtctcctaaaattctaggagagaaataaagagtctgtttttgctcaaaccatcaggatggaaacagtcaggcactgactggggtgcttccaagaggcatgagagtgcctactctggcttgagcacttctatatgcaaggtgaatatgtactgagctaggagacttccctgcaaaatctctgttcaccctgggttcacatccccatgaggtaatattattattcccattttacaaataatgtaactgaggctttaaaaagccaagacatctgcccaaagtgatggaactagaaagtctagagctggtattctagcccaaatctgtctgaccgcaatacacagattatttattcctattagacactggcttctactgaaaatgaaacttattgcagagggaataaatacaaagatggaaagccagtaaagaagtcagtatagaaccactagcgaatagtgttgctctggcacagaccactgtggttgatggcatggccctccaacttggaataggattttccttttcctattctgtatccttaccttggtcatgttaatgactttggagttattcagttaatgaccctttaattctcacaaccaaccagtcatgttgcttgaagccatttatagacgagcttcaaagcaactttaaaagattcttctgtagaagtatgagttcttcctttaattatcattccaactttcagctgtagtcttcttgaacacttcatgaggagggaggacattccctgatataagagaggatggtgttgcaattggctctttctaaatcatgtgacgttttgactggcttgagattcagatgcataatttttaattataattattgtgaagtggagagcctcaagataaaactctgtcattcagaagatgattttactcagcttatccaaaattatctctgtttactttttagaattttgtacattatcttttgggatccttaattagagatgatttctggaacattcagtctagaaagaaaacattggaattgactgatctctgtggtttggtttagaaaattcccctgtgcatggtattacctttttcaagctcagattcatctaatcctcaactgtacatgtgtacattcttcacctcctggtgccctatcccgcaaaatgggcttcctgcctgggtttttctcttctcacattttttaaatggtcccctgtgtttgtagagaactcccttatacagagttttggttctagttttatttcgtagattttgcattttgtaccttttgagactatgtatttatatttggatcagatgcatatttattaatgtacagtcactgctagtgttcaaaataaaaatgttacaaatacctgttatcctttgtagagcacacagagttaaaagttgaatatagcaatattaaagctgcattttaa

SEQ ID NO: 130053 - DNA, 1703 bp, Homo sapiens
  misc_feature (1)...(1703): n = a,t,c or g
cctctccgcaggtctttgtcactacagagtactgctgtcgttatgcccattttacagatgtggatgcagagtctcagagagggcctacagcagtgcctgtccttctggacgtgctacatgcgtcatttgccgagagaaccaatgagtgcctgctcaccaccaccctggtcaaatcctccatcacctcccgcctggacgattgcaggagactcctcctgagctccctgctacagtctgttgttcacacacagccagatggccccttaagaactcagatgagtaaaactgaggtcggcgaacgtagtgacctgcccagggatatgtggtccctgagtacacttgttttgatttctccagacaacttcgccattggccttggcactcagccatgcggccatcctggctggacggcagtggacaggcttgatgtggtgggaagttccgcaaagagaaaaagggaactgctgggtctgtgtcccgtggttggtggctggggcagtatttggggcattggagtgctgtcctcctatggcactgcttgggctggggcatctcttctgcagtatttattcagcatcttctgtctacctcaacccatgctgtggattcagcacaagcagccagagaccctcaccatcacggagctggcagtgcgcagagaggaggactctaaattagcaaaatgcatagaacaacactttgtgctacctgcattacagggaattaaaacagattatcgagatacacgcaatgctgtttgctccctgtgtctgctccacgtgaaacctgcctccacgtctgaccggggactgcctgtggttccgcagccacctcctctgaccttcagccctgcacatgtagagattttccccatcagctcagaagtattttggtgttttaacaggcagcgaggccgtcctgcccataccctggccctctcaagtttcaccatatgtctggtcctgctggccatcactgagggctgctcccaggcagtcttacttcttccgcacctctggcctgccctgcacatgagagcggggtcttcaggccaagagatgcaggtgctggcagctcgatgtggtgtgggggagaccatgtgctcacctggagcagcccccgtgtggacccccaatctgtcatccatcttggcagggcaggtgactgataggccccacagctccccgtggccctgtggctatgacagcaccatgaattccttttcccaggggtctccatgtggctgcttccaggcattcctgcatcgcatccggcagaacgtggccgactcagtggagaagggcctcacggaggagaatgtcaaggtcctgttctcgaacatcgaagacatcctggaagttcataaggatttcttggccgccttggagtattgtttacacccggagccgcagtctcagcatgaacttgggaatgttttcttaaaattcaacggacaagttctgccgtgtacgaggagtattgcagcaaccatggagaaagccctgagggctgcctggtggagctgaacaagatccctaccgtgcgcgccttccttttgagctgcatgcttctgggaggccgcgaagaccaccgacatccctttggaaaggctactgggtgcttccgatncagaaggatccttgcaagtaccccgtccctccctagggagcttggccaagagggacttcccggcaagctacccg

SEQ ID NO: 130054 - DNA, 415 bp, Homo sapiens
atggggcgagtccggaccttggcgggcgagtgctcggcgcaggcgcaagcgcagagtctcctcgcggtcgtccttttggcccctcccctctggggggacccccagtgccaggctgtcagtgcgcagcccccagcctgcgggacccctggggactctgggcgcctgttctgcaaatgaccggttcttacgagttcaagctgaaccagccacccgaggatggcatctcctccgtgaagttaagcccccacacccttcccagtcctgggttgtctccttcctgggagacgttccgtgcgtctttacgatgtggccgggcaacttcatggcggttaagtaccaagcacaccggggcccgtcctgggaatgggcctttttaatttcaatttacccccttggccggagagtcaaatgttga

SEQ ID NO: 130055 - DNA, 2851 bp, Homo sapiens
gtctaccctcgcacaacaatggcaggctggcgacagcatctggtcacgcccggctattcgtgtcttcgcaacctacgccaagtgggatgagaaatggggttacgactacaccggtaacgctgataacaacgcgaacttcggcaaagccgttcctgctgatttcaacggcggcagcttcggtcgtggcgacagcgacgagtggaccttcggtgcccagatggaaatctggtgctcgtatctcctcgcgctcagacagtgtcaggccgacatccatagcgctggctgcatctgccacggtgtagttctggtcaacgaccagtgtttgccgccagtaaagtgctggggccgctgtggagcaaagtctccattttgcgctatcacatttcgggtccgctggacgatccgcaaatcaacgaagtgttgcgccaaccgcgcctacaaacggaacataaccgtaggtcggataaggcgtttacgccgcatccggcagccgttgcctgatgcgacgctgtgcgtcttatcaggcctacaaacggaacataaccgtaggtggccaaattcagtgtgccacttcagccctgattcgactttttacaatgacttatctggacgcatgaagaacgtcaggctaatgttcaacggtatacacagggacaatggattctccaaacgacccacagacttgaactacacgcgtaaaccactcgtcctggctttccagacggcatggtttatcaccgtccgcgttgaaattgtgggttttcgcggtatcaaccgtttgtcgttgatgctggaacaaaacaacgtcctgattggggagaacgcgtggggtaaatccagcttgctggacgccttaactctgctgctatcgccagaatcagatctctaccattttgagcgcgacgatttctggttcccgccgggagatatcaacgggcgagaacatcatctgcatattattttgaccttccgcgaatcgctgccaggccgacatcgggttcgccgttatcggccgctggaagcgtgctggacgccatgcaccgatggctatcaccgtattttttatcgtctggaaggggagagtgcggaagacggcagcgtgatgacactgcgcagttttctcgataaagacggacatccgattgatgtcgaggatattaacgatcaggcacgccatctggtgcgtttaatgccggtgctgcgcttgcgtgatgcccgttttatgcgccgtattcgtaacggcacggtgccaaatgtccctaatgtggaagtcaccgcgcgccagctcgatttcctcgcccggggcggacaggcgcgatatcgtttaatgcggcggcgagccagcaatgagcaacgaagctggcgctatctggatatcatcaaccggatgattgaacgacctgaaacccgttacacgcgtgagattggttttacctccaccaacatcgacctgatttacggcctgccgaaacagacgccggagagtttcgcctttaccctgaaacgtgtggcggagctgaaccccgatcgtctgagtgtctttaactacgcgcatctgccgaccatttttgctgctcagcgcaaaatcaaagatgctgacctgccgagtccgcagcaaaaactcgatatcctgcaggaaaccatcgccttcctgacgcaatcgggctatcagtttatcggtatggatcactttgcccgtccggatgacgagctggcggtggcccagcgtgaaggcgtgctgcatcgtaacttccagggctacaccactcagggcgataccgatctgctggggatgggcgtttccgccatcagcatgattggcgactgctacgcgcagaaccagaaagagttgaagcagtactatcagcaagtggatgaacaaggcaatgcgctgtggcgtggtattgcgctaacgcgtgatgactgtattcgccgcgatgtgattaagtcgctcatctgcaacttccgtctggattacgcccctattaagaaacagggggatttgcacttcgctgattactttgcggaagatctcaagctgctcgccccgttagcaaaagatgggctgggggatgtggatgagaaggaatacaggccggataaggcgtttacgcgcatcaggcatctgagcatgatgcctgatgcggcctggtcgcgtcttatcaggcctacgactttctccgcatccggcataaacaacgagcttcagctaaacggcccaatcattgcggcacacagcacggcagcaacggcagtttgcggcatggaagcatgggcgtggaatactaagcatgcctgcaggtgcattctgaaaaagacgtcaaaccttgtgcaccagatgctgcactcggtcggtcttaatgcgctggcgacagctagcgacatgaaccgtaacgtactgtgcacctcgaacccttacgagtcgcagctgcacgcggaatcttacgagtgggcgaataagatttctgagcatctgttgcctcgtacccgcgcgtatgcggagatctggctcgaccaggaaaaagtcgccactactgatgaagaaccgatcctcggccagacctacctgccgcgtaaattcgaaaccacggaagtgatcccgccacagaacgatatcgatctgcacgccaacgacatgaacttcgtggcgatcgccgaaaacggcaaactggtgggctttaacctgttggtgggcggtgggctttccatcgagcacggcaacaagaaaacctacgcccgcgccgtgaatgattttgctatctgccgcggggacatacgctggcggtggctgaagccgtttgacactcaccgtggcggggaaccgaaccgatgtaaaatcccaacccaataa

SEQ ID NO: 130056 - DNA, 1195 bp, Homo sapiens
gagagttaagagaagcacaattaatggggagaacccaggggtttaacagaatacgacatgtaaagagagcgcaatgcccaaatttcgaaaccagcgagtagatcaaagaggagaaatgaagggcgcacacaattgtgtcttgagccaccgctaattggaatggaaaaggcgtttaacagggaatttgtgaaggttatgccgaattgggggggcatggaccccaaaagggcggatgaaatttaaaattaagctgcgcgtaaaagccccggtaccagcgcaaaggttgtattaatgagcggaaaaccatccagggccctttagtggtcgaaggaaaaatgacagcccccgagcgcatgaagcatgaaagcaattacctgcgcggcaccattgcggaaaaatttaaacgacggtctgaccggcggctttaagggcgccaacttcctgctgattcgcttccacggcatgtatcagcaggatgaccgcgacatccgcgccgaacgtgctgaacaaaagctggagccgcgccacgcgatgttgcttcgctgtcgtctgccgggtggggtgattaccactaaacagtggcaggcgatcgacaaatttgccggtgaaaacaccatctatggcagcattcgcctgaccaaccgccagacgtttcagttccacggcattctgaaaaagaacgtcaaaccggtgcaccagatgctgcactcggtcggtcttgatgcgctggcgacagctaacgacatgaaccgtaacgtactgtgcacctcgaacccttacgagtcgcagctgcacgcggaagcgtacgagtgggcgaagaagatttctaaacaactgttgcctcgtacccgcgcgtatgcggagatctggctcgaccaggaaaaagtcgccactactgatgaagaaccgatcctcggccagacctacctgccgcgtaaattcaaaaccacggtagtgatcccgccacagaacgatatcgatctgcacgccaacgacatgaacttcgtggcgatcgccgaaaacggcaaactggtgggctttaacctgttggtgggcggtgggctttccatcgaacacggcaacaagaaaacctacgcccgcaccgcgagtgagtttggctatctgccgttggagcatacgctggcggtggccgaagccgtcgtgacaactcagcgtgactggggataaccgaacc

SEQ ID NO: 130057 - DNA, 3258 bp, Homo sapiens
atgcaaaacaaaacgctgcttttctcactggatgacacgctggttaataacgcgctgcaaaaattaggcggtttacgagcggtgaaacattacatgcagcgaaccgctgttcagggtagtccgacgatgcttgccgctatcagtaaacagtgggtgcgcgataactgcgacctccacttcaaggtggcccgagatcggagtagtggctatccgctcacaattgagggctttgcatacctgtggtcaggagcccgtgccagctatggggtcagaaggggccgtgtatgcttcgagatgaaggtcgcgtcttcacctgattatcaacaaaaaagaattgcccgggcaacatgcggaggaaatatgaaactgttgattgtcgaagatgaaaagaaaaccggagaatacttgaccaaagggttaaccgaagccggttttgtggtcgatttggccgacaacgggctgaatggctaccatctggcgatgaccggtgattatgatctgataatcctcgatattatgctgccggacgtgaacggctgggatatcgtgcgcatgttacgctccgccaataaagggatgccgattctgttgcttaccgcgcttggcaccattgaacatcgcgtcaaggggctggagttgggggcagatgactacctgggtactttcgagttcctgttcgaaaacggcgagttctatttcatcgaaatgaacacccgtattcaggtagaacacccggttacagaaatgatcaccggcgttgacctgatcaaagaacagctgcgtatcgctgccggtcaaccgctgtcgatcaagcaagaagaagttcacgttcgcggccatgcggtggaatgtcgtatcaacgccgaagatccgaacaccttcctgccaagtccgggcaaaatcacccgtttccacgcacctggcggttttggccagagttggttttctccctgcgttagcgcacaatacgccactttctttttcccggatttttacgttatgtctcaccgcgacacgctattttctgcccctatcgccagactgggcgactggacctttgatgaacgggcacatgttttccctcgggatatgaacatccagagcgttcgcgggatataccttatagtatttacagtgatagggatggttatgccgattcgctacagttctaaccggggtaacgcagagtttaacgactctaggtggtgctggaagatgtcccacgaggccgtggttaagactggcggggatggcagcgcagttgattttgaccagcggcttgtcgcgtcgcgggctaagttgatggatcgctctggcgatcacctctttgccagttccggtttcaccacaaatcaacaccgtactgtcgctcttcgccacaatatctacctgctggagcaggtcttccattgcctggctttgatagataatgtcaccgatgcccagattcgaaaggagctgctcgctaagctggtggttttcttgctgcaaactttcctgcaaatcggtcatgctacgccagacattgcacaactgcgccagctactgaaacagctgaagcgttatttgcaggataaccgtatcgtgacgatgtcgctgaagccgcagaatatcctctgtcaccgcatcagtgagtcagaggttatcccggtcgtctgcgacaacattggtgaaagcacattgattccactggcgacctggtcgaagtggtgttgtctgcgtaagcaagagcggttatggaaacgatttatcgcccaaccggcgctggctattgccctgcagaaagatctgcaacctcaatgtgaatgtgaaccttccctgaatgtgccccctaggcatagagcaattgtgtactacccaaccttcacaaccatctatgagcacgatctggtacacgctattccgctgtatgcgatcaaacaaggtctgctgaccgttgagaagaaaggcaagaaaaacatcttctctggccgcatcctggaaattgaaggtctgccggatctgaaagttgagcaggcctttgagctaaccgatgcgtccgccgagcgttctgccgctggttgtaccatcaagctgaacaaagaaccgatcatcgaatacctgaactctaacatcgtcctgctgaagtggatgatcgcggaaggttacggcgatcgtcgtaccctggaacgtcgtattcagggcatggaaaaatggctggcgaatcctgagctgctggaagccgatgcagatgcggaatacgcggcagtgatcgacatcgatctggcggatattaaagagccaatcctgtgtgctccgaacgacccggatgacgcgcgtccgctgtctgcggtacagggtgagaagatcgacgaagtgtttatcggttcctgcatgaccaacatcggtcacttccgtgctgcggggaaaaaggacctccattggggtctggggtgtacctatctgtccacctcaccccatgtacgcgttacgtggggggttacgcaaaatattggtgcgcacgaaagcaaagcgccagaaggtgttttgccggtaagccagactcagcagggcgaagcgcaaatctggcgtcgcgaagtgagttcccgatacggccagtatccgaaagcgcaggcggcgcaacccgatcaattaatgtcggattattttttccgtgtgtcgctggcgatgcaaaacaaaacgctgcttttctccctcgatgacacgctggttaataacgcgctgcaaacactgaataaaacccgcccggcaatggtggatgtaatacccactgatggcatcgttccgctctatatcaatccacaaggaatagcgaaactgctgcgtaacgaaacgttgaccagtctgccgaagaatctcgaaccggttttttataacgccgcacaaactttattaatgccgaagctggacgctttatctcaacaaccgcgttatgtcatgaagctggcccagatggaacccggcggagtgtcccacgcccgctggcaggatgtctggcagctcttgccggtggtggtcactgcagtccctgtcgtgttgctgctggcgaatcaactgaacctgctcaacctcagcgacagcaccgcccatacgctgggagtgaacctgacgaggctacgtttggtcatcaatatgttagtgctgcttctggttggtgcgtgcgtcagcgtagcaggtccggtggcgtttatcggtctgctggtgccacatctggcggactctacgaggatccgatcgaccggtaccggggactattag

SEQ ID NO: 130058 - DNA, 3499 bp, Homo sapiens
tggtctttgcgcggctgatgaccggtgtcggcctgggggcggcgttgccgaatcttatcgccctgacgtctgaagccgcgggtccacgttttcgtgggacggcagtgagcctgatgtattgcggtgttcccattggcgcggcgctggcggcgacactgggtttcgcgggggcaaacttagcatggcaaacggtgttttgggtaggtggtgtggtgccgttgattctggtgccgctattaatgcgctggctgccggagtcggcggttttcggcacatccgcaatcaacggctggttaagcgtatgcaggtcgagattttcctgtttcacgccggagagcatcaccgcttttagcgctgcctctttggtgccgcgggcaaactgtagcccctgctcatccactggcgtttcgccacgatcgaggaagcagacgaccaccggcttgcggcaggcgcgcgcacgttccagcactttgcgggccaccgcaggcgcaggcggtttggagataagcgcaatgatttcagtttgcggatcgttttccagcatcccgatggcgtcgagcatcatcaggccgccgattttctcgctcaggtcgcgcccgccggtgccaatcagttgcgaaacgccgccgccaaattcatgaatgcggacgctcaactcctgactgccggtgccggatgcgccaacaataccgatgttgccgcgacgcacggcgttaccaaaacagagcgccgcgccgttgataatcgccgtgccacagtctggccccatcatcagcagccctttttcgtgggccagttgcttgagcgccagttcatcttcaactgagacgttatcggaaaacagcatcacgttgagatcgttttgcagcgcctgacgcgccagagggacctttcctccaactgtgaccacatggaattcagtcaagaacgtgaaaagaagcaagcgggccttaaataaatctgcaactattccataatctgccacatggaaaattggagcttctgggtctttattaattgccacaattgtcttaaataaatctgcaactattccataatctgccacttggaaaattggagcttctgggtctttattaattgccacaattgtcctgtcctggcagacgctgggtcgggccggcagcccgcgttgcgcccgcacgtgcacaagcagacggagaagacgacccgcgtgcggactgtgctgaacgagaagcagctgcacactctgcggacctgctacgccgccaacccgcggcccgacgctctcatgaaggagcagcctgccccttggcgcacttgatgcgaacaagcctgcgggcccaaggtgcgccggtgtcagcgctgggcctgcggccgccctcatctccctggctgtacgggctccggcgcgcgcccaggacactttgtggccaccaggagactgcggtgacccgcctgcgggcattcccgggcccgggggagcgctgcggcacccgtgcgggatgcggatggccttctccctgacatagtcccgcttgcagtaggtcttcccgtctctcacgaagcacgtgcacgtctcgtccaggtactggctgcactcggcacacttgaggcaggccgcgtgccactcgaggtcgggcgacacccgcaggataaactggtcgtggatctgactcccgcagcccacgcacatggccgtcccgggcttctccagtaaggggcacagaggaggtggccattcacttaattcagcaggtggagctgatgggctagtaaaacatactttttttagttttcctttcttttcattaatctcctccggtagctgtttctcacactcagaatctgaagttagtttttcccactcgtcctcctcttcctcatctttattagtgcccacactggccaaatgagggatcactcgagagtctcgtcgtgtatgtcggtgctttcgtgcgctcccgttgttgcgtggtgtcgtcgtcttcgtcgcgtgggtgtcgagtggcgctgctgtcgtttcgttattgtcgttcttggcgccggtccgtggtcgttgctgctccgtccgccgtggtcggcgttgggcctgtggcgcgcccggtgtcgcgtctcccgccgcgtgatgccttttttcgcgcgttttgcgtcgctttggcctcttgttcgccgtttggtggtcctgcgcgtgtttaccctgtctttgcgcttgtccgccttctccccttttgtgcctggtccgctttcgccgcgtatcctcgtttctgctgttgccctgttcgcgcctcgccgttgtcccgtttccttgtcctctgttggctgttgggcgcttgctgctggctcccttgcgctgtttgctgtctggctttcccgcctcgccctgtgccgttggggctttggccctgcgcctttccctttgtcccctgtccggttgcctttgcggctttgggcttcgctgtgttgttgcccctgttgctttgcccttcgcgtgtgtccttgtgcctttggcttcttctccgccctttttctttccgttttgtgtcgcgccgtgttccctctcgcctttcctctgggcctgtcgtcttcctctgtggggtttgccgtctcgttttggctttttgggtgcgtctttgtccttctgcctctgctttgtccgttgcctcttttgcctatctctggcgcttttgggtctgtggccctcggcgtgccgctttgctcttgcgccgttcccgcttcggggtttggggtgggccttcccccgttccccgataaaaccccgcccccttgtggtgctcggcctgctcgtctttggcaccaaaaggcgctctttctctctgtgtcgtgacggctttatcttcgccttccggccggaatagtcagtgtagaataaacggatttttccgtcagatgtaaaggttgcagaaccggaccattcttgcgtctgatctttcaggatcggatcgttggcgtcgaacttatcgctgtctttaaagacacggcccgcgtttttccagctgtcgattgagttgtcgccgaccttttgataaaacatgtagattgatgtgtcatcagcgtgtgaaatattttctgcatcagccagcgcagaaatattttcagcaaattcattctgcaatcggcttgcataacgctgaccacgttcataagcgcttgttgggcgataatcgttacccaatctggataatgcaggcatgtgctcatcatgcagcttgccagccagaccacgataatcactttcggtaagtgcagcagctttacgacggcgacttccatcggcaatttgtatgacaccagatactcttcggccgagcgccggtgtctgttgaccagtcagtagaaaagaagggatgagatcacccagtgcgtcctcagtaagcagctcctggtaacgttcaaggcctgaccatacccgagaggtcttatcaacactatctcggcggagcacttcaaaaggatcatgtgacagtcccggttttggtgcaccagaatccagcggcat

SEQ ID NO: 130059 - DNA, 1514 bp, Homo sapiens
gagttcctcatgacgaatcgtatctctcgcctcaaaactgcactgtttgccaatacccgtgaaatctcgctggagcgggcgctgctttataccgccagccatcggcaaaccgaaggcgaaccggtgatattgcgccgggcgaaagcaacagcgtatatccttgaacatgttgaaatttcgattcgtgatgaagaactgattgccggtaaccgcaccgtaaaaccgcgcgccgggattatgtcgccggaaatggacccttactggctgctgaaagagctggatcaattcccgacgcgttcgcaggaccgctttgctatcaacgaagaagaaaagacgatctaccgggaagagttgttcccgtacttgggaaaaacgttccatgaaagatttcatcaacgggcagatgacagatgaagtaaaagccgcgaccaacacgcagattttcagcatcaaccagacggataaaggccaggggcacattattattgattacccacgcctgttgaatcacgggctgggcagatggcgtattgggatctggcgctcttcctctttcactgacactgtctccttgggctctcgggtgcggctagcgcgatcagcttacatctacgcgagagtccggttaccgacatacacagaggataggttactggtggagattgaagaactgctcaacaccaaagcgcaaagcggctcgcacgaggcgcgttacgccactattggcagcgccaaaaagcatatcccggaaagtaacctggcggtgatttcggtcaacggtctgtttgccgctcgcgaagcgcgtcaggcgctgcaaaacgatctcaacgtgatgctgttttccgataacgtctcagttgaagatgaactggcgctcaagcaactggcccacgaaaaagggctgctgatgatggggccagactgtggcacggcgattatcaacggcgcggcgctctgttttggtaacgccgtgcgtcgcggcaacatcggtattgttggcgcatccggcaccggcagtcaggagttgagcgtccgcattcatgaatttgccgtcggcgtttcgcaactgattggcagcggggcgcgcgacctgagcgagaaaaccggcggcgtctatgatgctatgaggccatctgggatgctggaaaacgatccgcatcctggaatcattgcgcttatctccgcgccgcctgcgcctccggtggccctcaagcagaaccagacacatggagaaggtaaagtaaagcaagagtggttttgtatgggccttacccgcatcaccctgctgctggccgaagatcatgcttacggcatcttttactggctggcaggcggagtgtcccacgcccgctggcaggatgtctggcagctcttgccggtggtggtcactgcagtccctgtcgtgttgctgctggcgaatcaactgaacctgctcaacctcagcgacagcaccgcccatacgctgggagtgaacctgacgaggctacgtttgatccaagctcgcatgcctgcag

SEQ ID NO: 130060 - DNA, 1281 bp, Homo sapiens; identical to SEQ ID NO: 124526

SEQ ID NO: 130061 - DNA, 1673 bp, Homo sapiens
atgactcctatttgtacagtgttccgagcactgtcaagactgccagacctctggcacaggtccataggtactctcacggaggcattgcctcagacagacaagagacaggaacaaattgcagttgctttgacatcttacagtggcctatacgggttgggatacggcagtaaggagattcagctgacgtattcagggactgaaagtggaatttggccctttccttattcccccaatgccactcacaagggatgtggcagacatcgttttgcctgtccaatagccccccacttcctggtcatagaaccccagtcagctttgggaagctgcccctccccagtggaagtggatccagggggctgcgtttttggggctataaggcttctggtacttcgagatgcccctagtttctcgcggttgctaaacacacttgcgtcgggggagagtcttcagggggggcccggctttgtcggggttagcaaggtctacgcttttctcgtagttcggaatcccaccgggaccccaatgttcacagggactttcgagattccgaagtggccaacttttccaattcccccagtgtttggacggttgggttccttcgttctccagctccagggacctcgaagtcccgggcagtgcgagtacgaccgcgagcttgtgtccgggtctcgatcggtgtctagctgtctactggtgcttggtactctgcatttacttagctacaaagatgccggtgttgatattgacgcgggtaatgctctggttggaagaatcaaaggcgtagtgaagaaaacgcgtcgtccggaagtgatgggcggtctgggcggcttcggtgcgctgtgtgcattgccgcaaaaatatcgtgaacccgtgctggtttctggcactgacggcgtaggtaccagaagacggctggcattagtattaaaacgtttcgtcttcattggtattgatctggtcgccatgtgcggtaatgacctggtggtgcaaggtgcagagccgctgtttttcctcgactattacgcaaccggaaaactggatgttgataccgcttcagcgatgatcagcggcattgcggaagaaaaatcagaaatcctcgacggctctaaagtcagcgacggcgatgtgctgattgcactcggttccagcggtctacactcgaacggctattcgctggtgcgccaaattcttgaagtccaccgcgccgccgctgacgatgtactttctgacgccgatgctgtttcctggcgtgcgccatatcaaacatcgtccggtttacgtaaaaagatcaatcagggcgcggtgagtttcgttgacctgcatttgagcgaagtggcgcaaatggtcaattacggtttcttcggcgacattgatgttgccgtcattgaagcatcggcactggcaccggatggtcgagtctggttaaccagcgggatccgtaatgcgccgacctggctgctgcgggcgaagaaagtgatcattgaactcaatcactatcacgatccgcgcgttgcagaactggcggatattgtgattcctggcgcggcatcgcggcgcaataacgggtccatcttccatgcaatggatcgcctcggtaacccgcatgtgcaaatcgatccggaaaagcattgtcgccgtcgtgggaaaccaacttatccggacgccggtcataa

SEQ ID NO: 130062 - DNA, 807 bp, Homo sapiens
ctacggggtggagcacttcacagcggtgaggcctgataagacgcgcaagcgtcgcatcaggcagtcggcaccattgcggatgcggcgtaaacgccttatccggccgttgcggatgcggcgtaaacgccttatccggcctacggatggtgcgggaatttgaggcctgataagacgcgcaagcgtcgcatcaggcagttggcactgttgcggatgcggcgtaaacgccttatccggcggagggtgcgggaatttgaggcctgataagacgcgcaagcgtcgcatcaggcagtcggtaccgttgcggatgcggcgtaaacgccttatccggtcttctttgctgtcgtgggtgtccactccaattgtgaggggggcagtggttggcacgcgtctagtctcggccattatctgggggtacgttttgtaacgatccccgcttggcttgaggatctggttcgcgtcgccggcgtccgcccctggttggtcctcggcccttgttatcccgggggtccacaccacagccactgttgagcagggtaatctggcgagtgcctcctctccaggccgcaggtttattaaacatttgtggttagggtgactggcaggagttgtttcttgtctggagaaaactgctgtgtctgttgagttgttggctctgttgtgttgcggagagttggatgtgtcagtgtacggtgagtaaccccctcttgcctggtgctcagtgggcagcaggctccccctgtatcctggtgtggggctctttaggaacaccactgtgccccctgttggttcattgccaacactctccat

SEQ ID NO: 130063 - DNA, 1386 bp, Homo sapiens
  misc_feature (1)...(1386): n = a,t,c or g
ttacgcgataaatttattcactattttcagcaatggcgtgaacgccattaagccgtggcgaacactggctggcacaacacctggcggggcgttctcgcgtgaaaagggcatgttactggcagcggtggtgttcctgtttagcgtcgatattacgtcctcatctggcagccgttgagcgaacggattgagcaacagagacaatattgcagcagctggtggcgatgaacacccgactgaagaacgcgcgccggatattattgcagcgcgaaaatctgccacaacaacgcctgcgaggtatcgcgggtcatcagtgacagtgcttccgcgcactcggtggtcataggcggatagccgatcgtggggagaatattcaggtctggatagaacctgggtgtttaatgacctgctgaaatggttaaacgcactggatgaaaaatatcgctcacgtctggtatgtgccagaagcagtaaaaactcgctatgcgcatctgaagccaactggctggagatgaataatcggctcagcaagggcgatttgccgtgtatcaggccaatattaataattatgttaatcagatagacctgttcgtatggctttacagcactacgctgaacgcaaaatgctgctggtggtggcgattccctggctggcggcatcggtattttcacgctggtcttttttactttgcccgcatacgccatcaggtggttgccccgctgaatcagctggttaccgccgtcagcgtattgaacacgggcagttcgactcgccgccgctggataccaactgccgaatgagcttggtctgcttgcaaaaacctttaaccagatgtcgacgagctgcataaattgtaccgttcggaagataacggcatgtacatctgcccggaagtgcctacgaatggaacgacgcagaacctgcacaggaaagcgacgagctatcgttaaagatgctaacggcaatctgctggctgacggcgacagcgttacatcattaaagatctgaaggtgaaaggtagctcttcgatgcctcgtaggccggataaggcgtttacgccgcatccggcaacagtgccaactgctgatgcgacgctcgcgcgtcttatcaggccgcctctcatctgtataaattcgaactacacttaactggcttctcttaactgaggtcaccatcatgccgtaagtccctacctctcttttgccggtaactgttccgacgcgattgcgttgggcgcggaactgctctataaaatcagcttcggcgaatgccaaaatcagcgcaggacagcgccgagaactgcccttccggaatgaatttcccgataccgccatcgcccacgccaatgtgcgcattgccgngaacgacatcatgatgagcgatgccat

SEQ ID NO: 130064 - DNA, 999 bp, Homo sapiens
atgtcgatacgcggcggtagaaacgcttggtcctgttctggaaagccacgagcgttttcggagcgcgccaatatcggttttatgcaagtggttaagcgcgagcatattgtttacgcgtttatgagcgtggggcaggagaaacccaggcctgcggcagggcgcgtgtgcggcggttgcagtagggattcagcaaggtttgctggccgagaagtacgcgtggaactccccggcggtcgtcttgatatcgcctggaaagtccggccttggcactgtaaccgacaccggttgcatacactctatattttccataaggtccgccttaattccattttaggtagtgggcatcagatggtgacccctacgctgaccctcgccgccctgccttcacggcccacctgtaaggtatttagtcttgcaaggcattctccgcgcgcaaagggtgcaccggtgccactcgacgaacgcatcttcgtatgcaaatggtgaacgggtgcgactcgacgaacgcatcctcctacgcaaatggtgaacgggtgcgactcgacgaacgcatcctcctacgcaaatggtgaacgggtgcgactcgacgaacgcatcttcgtatgcaaatggtgaacgggtgcgactcgacgaacgcatcctcctacgcaaatggtcaacgggtgcgactcgacgaacgcatcctcctacgcaaatggtgaacgggtgcgactcgacgaacgctcctcctacgcaattggtgaacgggtgcgactcgacgaacgcatcctccacgcaaatggtgaacgggtgcgactcgacgaacgcatcctcctacgcaatggtgatcggacatatgctgatccggtcttcaggcacgttaaagttactccatgtcacgacgacttggcactattgatacttggcgaacacagaaccactcaggcagcacaatccagcagcacacgcagcctcggtgttgtccccagagtgaacctcacaatgttttctggcaactgg

SEQ ID NO: 130065 - DNA, 2529 bp, Homo sapiens
ggggcgcagtacggcctctttttcctgcaacttttggtgcgcgcgggcaacgttaatgctttcgaactgatccatgcgtctctctttctttacaaacaagtgggcaaatttaccgcacagtttacgtcgaagcggcagataaacgccataatgttatacatatcactctaaaatgttttttcaatgttacctaaagcgcgattctttgctaatatgttcgataacgaacatttatgagctttaacgaaagtgaatgagggcagcatggaaaccaaagatctgattgtgatagggggcggcatcaatggtgctggtatcgcggcagacgccgctggacgcggtttatccgtgctgatgctggaggcgcaggatctcgcttgcgcgacctcttccgccagttcaaaactcattcacggtggcctgcgctaccttgagcactatgaattccgcctggtcagcgaggcgctggctgaacgtgaagtgctgctgaaaatggccccgcatatcgccttcccgatgcgttttcgcctgccacatcgtccgcatctgcgcccggcgtggatgattcgcattggtctgtttatgtacgatcatctgggtaaacgcaccagcttgccgggatcaactggtttgcgttttggcgcaaattcagtgttaaaaccggaaattaagcgcggattcgaatattctgactgttgggtagacgacgcccgtctggtactcgccaacgcccagatggtggcgttggaaaagtgtaattcaatcgtcgcctttgtggtttgccacacgtcagatgagccgtgcaattgtttgccacaggtgtacggttctgatgagaacgcgtcgctaacagcgtactggtattctggtggtgttcagggcgtgtgcgcgctcctgccgggtcatcatcgcgtgcccgggcttctgtatgccggttcagccgcagcggtttcgggcctcctgcgccagtttggtatccgcctggacgttcaggttcgccttataccgatcctcgctcagttcgccggtatctctgtgctgctgggtgtgtgggcgtttagtcgtccgtggcaccagcctggtaaggcactggcgttggcgaagcgtaaagcagatgtcgcatttgagtttttccacaagttacatgtgccattttattgcttccacgatgtggatgtttcccatgagagcgcgtcgttaaaagagtacatcaataattttgcgcaaatggttaatgtcctggcaggcaagcaagaagagagcggcgtgaaagtgctgtgtggaacggtcaactgctttacaaaccctcgctacggcgcgggttacaaaacgctgttaaataccgacttgcgtcaggagcgtgaacatctgggccgctttatgcagatggtggttgagcataaacataaaatcggtttccagggcacgttgcttatcgaaccgaatccgcaagacccgaccaaacatcaatatgattgcgatgccgcaacggtctatggcttcctgaaacagtttggtctggaaaaagagattaaactgaacattcaagctatccacgcgacgctggcaggtctctctttccatcagggtaccaagctcgagcctttaaaaaaagggtggctcaactgtggaaaaggacgatcgttgcggtccttttggttattacgcaacgtggcaaaaggggtatgtgtgcaaaggcgattaagttggcaattcaaacacgcctggttgattaaattctgggcccccatccctgcggtcatcgcgtcgggtattctctctacctactattttggcataactggcaccttttggactgtcacgggtgaatttacccgttggggcggccagctcctgcaactgttcggcgtccatgctgaagagtggggttactttaaaattatccatctggaaggatcgccattaagccgcatcgacgggatgatgatcctcggtatgtttggcggctgctttgccgcagcgctgtgggccaacaatgtcaaactgcgaatgccgcgcacccgtacccgcattatgcaggccatcattggcggcattatcgccggttttggcgcgcgtctggcaatgggctgtagcctggcggcgttctttaccggtattcctgggtaccgagctcgaaattcgaatcccggtaaagaattctgccaggttacagcccattgccagacgcgcgtcaaagctggcgataatgccgccaatgatggcttgcataattcggatacggctgctcggcattcacagtttgacattgttggcccacagctattcggcaaaccagccgccaatcatcgcgaggatcatcatcccgtcgatgcggtaaccccactcttcagcatggacgccgatcagttgcaggagctggccgccccaacgggtaaattcacccgtgacagccccaaaggtgccagtaatgccaaaatagtaagtatagagaatacccgccgctatgaccgcagggatgggggcccagaatttaatcaaccaggcgtgtttgaaatgctgccatga

SEQ ID NO: 130066 - DNA, 1663 bp, Homo sapiens
cgcacgtctcgaaaatctgaatcccctgttgcagatccaccaggaagacttccggtgccgggttgtcgatcaccagcgagcagcgacgcgctgcggtgagcaggatttccgtcacttcttcgctattggcatcggcaggggccggtatcgtcaacaccacgcgcgtgaccgagtcagagagcgaccagttgataaactgctcggtaataaacgccttgttcggcacgattatctctttacggtcccagtcgctgatggtggtggcgcgggtgttaattttcgtcacgctaccggtgagatcgcgaattgtcaccgtatcgccaatgcgaatcggtttttcgaacaggataatcagaccagagataaagttggcgaaaatttcctgcaaaccaaaaccgagaccaacaccgagcgcggcaaccagccactgcaatttcgaccactcaataccaatcattgagaagccgaccagcccgccaatcagcatcagcagatatttggtgatggtggtgatggcgtaacccgtacccggcgttaaatccaggtgcatccccggaagcacgctggcactgtagacgtagacaaacacacgctgcggattgggaatgatgtagttcaggcatgagccaattagcagaatagcaatagatactgccacacccgcaaccggtacgccgtgacgggaaactttcgccattgccgccggtaactgacggtttttcgccagtgcgtagagcatacgtccgcaactgtacatgccgctgttacagccagagagcgcagccgtcagcaccacaaagttgataatgcccgccgctgcggtaataccgattttggcaaaagtcagtacgaacgggctgccgttgctgcctatttcattccacgggaagatggtgacgataacgaaaatcgcgcctacgtagaaaatcaggatccgccacagcaccttgcctacggcactgcgcagcgtcacctgcggattcttcgcttcaccggcagtaatgccaatcagctccacgccctggtaggacgccaccacaatacacagagcggtcaggaaccctttccagccacccgcaaagaaaccgccatgctctgtgagattgctaaaaccaatcgactgcccgccattgccaaagccaaagaaaatcacgcccaggccaatgacaatcatcacgataatcgtggtgactttgatcatcgcgaaccagaactcgatttcgccgtacaaccgtaccgccgccagattcgccaacgccaccagcgccactgcgatcaatgcgggtatccactgcgccatctccgggaaccagaactggacataaacgccaatggcggtgatttcagagatccccaccgccatccacataaaccagtaagaccaggcggtgagatagccaaagaacgggctcatataacgatgcgcataaacggcgaacgaaccggtaaccggttcgaggaacaacatttcgcccattgaacgcatgatgaaaaagacgaacagcccggcgatgatataggccaacaatacggatggcccggcccatttcagggtactggcggcccccataaacaggccgacgccaatggtgccccccagggcgatgagttcgatatgtcgagcttccagcccacgctgtagctctggtttgttatctgccat

SEQ ID NO: 130067 - DNA, 682 bp, Homo sapiens
gacccccgggataacaagggccgaggaccaaccaggggcggacgccggcgacgcgaaccagatcctcaagccaagcggggatcgttacaaaacgtacccccagataatggccgagactagacgcgtgccaaccactgcccccctcacaattggagtggacacccacgacagcaaagaagaccggataaggcgtttacgccgcatccggcaacggtgccgactgcctgatgcgacgcttgcgcgtcttatcaggcctacaaattcccgcaccctccgtaggccggataagggcgtttacgccgcatccggcaacagtgccaactgcctgatgcgacgcttgcgcgtcttatcaggcctacaaattcccgcaccatccgtaggccggataaggcgtttacgccgcatccggcaacggtgccgactgcctgatgcgacgcttgcgcgtcttatcaggcctacaaattcccgcaccctccgtaggccggataaggcgtttacgccgcatccggcaatggtaccgactgcctgatgcgacgcttgcgcgtcttatcaggcctacaaattcccgcaccctccgtaggccggataaggcgtttacgcccgcatccggcaacagtgccgactgcctgatgcgacgctcgcgcgtcttatcaggccgcctctcatccgtataaatttcgaa

SEQ ID NO: 130068 - DNA, 1737 bp, Homo sapiens
atggtgaacgggtgcgactcgacgaacgcatcctcctacgcaaatgtgaacgggtgcgactcgacgaacgcatcttcgtatgcaaatggtgaacggtgcgactcgacgaacgcatcctcctacgcaaatggtcaacgggtgcgctcgacgaacgcatcctcctacgcaaatggtgaacgggtgcgactcgacaacgcatcctcctacgcaattggtgaacgggtgcgactcgacgaacgcacctcctacgcaaatggtgaacgggtgcgactcgacgaacgcatcctcctcgcaaatggtgatcgggtgcgacaccacgaacgcatcctcgaacgcaaagcaactttcaacaactcaggcaccacctgctgccgggccgtatattcgcgggtcagcgcgatgacggcgccggataaggcgtttacgccgcatcggcaacggtgccgactgcctgatgcgacgcttgcgcgtcttatcaggccacaaattcccgcaccctccgtaggccggataaggcgtttacgccgcatcggcaacagtgccaactgcctgatgcgacgcttgcgcgtcttatcaggccacaaattcccgcaccatccttcaatgccaaatgtttccgcgaacggttaccgttcgttcccgtttatggcatcgtatatgaccccgttctttggctatctcaccgcctggtcttactgtttatgtggatgccgttggggatctctgaaatcaccgccattggcgttatgtccagttctggttcccggagatggcgcagtggatacccgcattgatgcagtggcgctggtggcgttggcgaatctggcggcggtgcggttgtacgcgaaatcgagttctgcggcgggcattatcaactttgtggtgctgacggctgcgctcttggctgtaacagcggcatgtacagttgcgacgtatgctctacgcactgggaaaaaccgtcagtaccgcgcaatgcaaagtttccgtcggtccagtattgataaccgggtggatacgtttttcaagggtactggcgccctgggaatctcggtaaccgtaatagcggtgacctgcaagtcccgccttgtgtatccgataccagtctatacgggtttaagtcttccacaacgccccgcggtcgtgaaagtgaatgagggcagcatggaaaccaaagatctgattgtgatagggccggcatcaatggtgctggtatcgcggcagacgccgctggacgcggttttccgtgctgatgctggaggcgcaggatctcgcttgcgcgacctcttccgcagttcaaaactcattcacggtggcctgcgctaccttgagcactatgaatccgcctgcgaggcgctggctgaacgtgaagtgctgctgaaaatgccccgcatatcgccttcccgatgcgttttcgcctgccacatcgtccgctctgcgcccggcgtggatgattcgcattgccgagaacataagtattttgtagagccaaagttgtgtttaccccgaatgggtacccgggaatccgtgttgcccggtgtatgccggaattatgagtctaccataacatccgtgatatcagtttcaccatgtgaaagagatatggcgaattatgttcctcggcattcagccggatatcgtcggcgtttctacccgatgacccagccgattaaagatgcggtagaacccgttgatcaagactggaaggctgggaaggaaatggcggcttcgcgcagttag

SEQ ID NO: 130069 - DNA, 5898 bp, Homo sapiens
atggtgaaagttgcaggggagtgccgagtaagagcctcagcacacttgccagggcttaacaggagcacaaaaaacacagaggaccgaggcgcaaacaaccaagaaggcacaaacacacagaagacacgcggagaaacaaacgagagactcaaaaagaacgaacacagagatctgcgcttagctcgttacccagcaaaggagaacaacaaacaaggcgataaaaacaaaccacgaacgtacgaaaagttaaccggcacagtaacacaccaggagccacctcatcacgcggatcaatctccaggcctgtgtctctttcgtacttctcgagctcaggtggagagaggtcccacagtgttgctgctgatatctcaagaaaatcaaatagaaagatatgacagtgacaaccattcacagctcaacctctgcctcagagtgccgaccgtcaccacacaaaggagagattatgatattgctgaacggtaccgacagaaaggcatcaaattgcctgccaggaaggagagattaatgactattgctgaacggctgcggcaggaaggacatcaaattggctggcaggaaggtaaattagaaggtttgcatgaacaagccattaaaattgctttgcgcatgctggaacagggctttgatcgtgaccagggcatcgctgtagagcatcgtgtcaacgccaacagcgacaaagttcgctccccacgccaggcattgctgcgccatatcaggagccacagccagaaaaccagccgctttacccgcagcacggatccgccgaatactggtttcaataattcgctgcacttccgggtgcccggcgttatccgggtagcccaacgacgcagaaagatccgcaggtccaataaacacgccatcaatcccttcgacgtcgaggatttcgtccaggttatccagtgccgttttactttccacctgcaccaacagacaaagcgaatcgtaacttgcgccatagaaatcattcatcgcctgttcaacatggtcatagaccgcgttgtaccatgggttggtggcttcgcgagactggaaataagtgtcaggattggcggacgtaccgcggatcaccggatgttccgggttgagtgcccgggcgcgatgagcatcaatttcgacctgcggcatgagatcaagaatcgtgtcatcggccagcgggacaattttattgatttcgtgggacgtgcggaaaccatcaaagaaatgaataaatggcacgcggcttttcagcgtcgcgatttgcgaaatgagagcaaagtcttgcgcttcctggacgtttgctgcacacaacatcgcgcaacccgtctggcgcaccgccataacgtcggaatgatcgccaaaaatagagagtgcatgtgtggcaacggtacgtgccgctacatgcaggacaaacgggttttcaacatccggagtgctccattgcgtcatcaagtcggcagccagatagggagacacgaagctggtcggcgaaccctaagaagcccgcccccggaccccccgcccaatgcccccggggtccgaaccccccgagttcgggaaagcacggcaactggcccgatggccactacgcgctgggaaaaacgccatatcgccgaagagatccccatctggaaagaggaactctgtacccaatgtaaccactgcgttgccgcttgcccacactcagctattcgcgcaaaagtggtgccgcctgaagcgatggaaaacgcccctgccagcctgcattcgctggatgtgaaatcgcgtgatatgcgcgggcagaaatatgtcttgcaggtggcaccggaagattgcaccggttgtaacctgtgcgtcgaagtttgcccggcgaaagaccgtcagaatccagagattaaagccatcaatatgatgtctcgcctggaacatgtcgaagaagagaaaatcaattacgatttcttcctcaacctgccagaaatcgaccgtagcaaactggaacgtattgatattcgtacatcgcagctgattacaccgctgtttgaatattcaggtgcttgctccggttgtggcgagacgccgtatattaaattactgactcagctctatggcgaccggatgttgatcgctaacgccactggctgttcttcaatttatggcggtaacctgccctctacaccgtataccaccgatgccaacggtcgtgggccggcatgggcgaactctctatttgaagataatgccgaatttggcttgtttccgcctgacggtcgatcaacaccgtgtccgcatgctgcgtcggaccggctagtacgggaaatccacaagtcattaccacacggcccaaaatgcaactccgaatacacctacgaagataacggcatgtacatctgcccggaatgtgcctacgaatggaacgacgcagaacctgcacaggaaagcgacgagctgatcgttaaagatgctaacggcaatctgctggctgacggcgacagcgttaccatcattaaagatctgaaggtgaaaggtagctcttcgatgctgaaaattggcaccaaagtgaaaaacatccgcctggttgaaggcgaccataacatcgattgcaaaatcgacggttttggccggataaggcgtttacgccgcatccggcaacagtgccaactgcctgatgcgacgcttgcgcgtcttatcaggcctacaaattcccgcaccatccgtaggccgataaggcgttacccgcatccgcaacagttgaaaagctggagaaaatgccgcatcaccgacgataccgccgagaatcgccactgcgttcagaccgatttggaccacggtaaagaacatgccgggattttcctgcatattcagaacgcgttgggcatttatattgccttcatcagccaccagtttaagtttgattttgcgccagatcctcggaaggggaagttgattaatttgtgtgaaatacacattgaaagccgattcgaagaaagtgaaccggcatttctcagtggcatagtactacgccgtcatatgacagacgccaattccgccaattccaaaatgcatgcagctgccttaccccaccacgtgctaagggcaggagttgagtcagctgtggcctgccctgggggctggggtccttggggagaacacgggcatgttgatttggacactcattcagcaaacatctacgaagcacctgctgtagaatgcactggacgttgccaatccgtacaacaggtgatagtgaacgccaagagaggccccctttgtcctcacggaccttctcttgtaggagcaggaagagtgaggaaaacttttaacagctcccagcagatgcccgtatgtctcattgagcctgtgttcgcttctaaactgatccctgttagagcgatcttcggatcaatcggtccgatcgtgcagggtaaatcgaccctgttccgtatgatctctgctcaggaacagccggacagcggcaccatcactttgggtgaaacggtgaaactggcgtcggttgatcagttccgtgactcaatggataacagcaaaaccgtttgggaagaagtttccggcgggctggatatcatgaagatcggcaacaccgagatgccaagccgcgcctacgttggccgctttaactttaaaggggttgatcagggtaaacgcgttggtgaactctccggtggtgagcgcggtcgtctgcatctggcgaagctgctgcaggttggcggcaacatgctgctgctcgacgaaccaaccaacgacctggatatcgaaaccctgcgcgcgctggaaaacgccctgctggagttcccgggctgtgcgatggttatctcgcacgaccgttggttcctcgaccgtatcgccacgcacattctggattaccaggatgaaggtaaagttgagttcttcgaaggtaactttaccgagtacgaagagtacaagaaacgcacgctgggcgcagacgcgctggagccgaagcgtatcaagtacaagcgtattgcgaacttcagcaccaagttactttttgtcgacctgcttaagaatgcctacctatacgatctccatttaccgttgttaaacctgatgctgacgccagatgagcgcgaagcgttggggactcgcgtgcgtattgtcgaagagctgttgcgcggcgaaatgagccagcgtgagttaaaaaatgaactcggcgcaggcatcgcgacgattacgcgtggatctaacagcctgaaagccgcgcccgtcgagctgcgccagtggctggaagagaatcaccgcaggcaacggcaaagtagccgaacgcgcctcgccgcgctggctggcgttttcaatcaccacccaactgaaagtgctgtcaccatcgatgccagcttcaatcgccacccaaaaatcagcctctggaaatccgcatctcaacccgccaaccgatcggtcgttttaccgagcaagaaccagagcactgacaaaacagggtacactctgaaagaagatgctggtcgcggctatcgccgtgttgttgcctcgccaaaaccggttgatatcattgaaaaagaaacggttaaagctctggtagatgcaggtcaggtggtgatcaccgttggcggtggtggtatccctgttattcgtgaaggtaaccatctgcgtggtgccagcgcggttatcgataaagactgggccagcgcccgtttagcagaaatgattgatgccgatatgctgatcattctgactgcggtagaaaaagtggccattaacttcggtaaagagaatgaacagtggctcgatcgcctgtcattaagtgatgctgaacgctttatcgaagaaggtcattttgcgaaaggttctatgctgcctaaagtggaagctgccgcctcgtttgctcgctctcgcgcaggtcgtgaagcactgattaccgtattgagcaaagcgaaagaagggattgaaggcaaaacaggaacggtgatttgccggataaggcgtttacgccgcatccggcaacagtgccaactgcctgatgcgacgcttgcgcgtcttatcaggcctacaaattcccgcaccatccgtaggccggataaggcgtttacgccgcatccggcgatattagtttacgccgttaacagattagctatcgtgcgcacaccaagtcccgtagcgcccgcagaccactgttcaaccggcgctttacgtcgccgagcagtcgatatgcagccagccttgctgatagttctcaacaaagtgcgacaggaagcccgccgccgtgctcgcgcctgccggatacgccgcgcttccggtattgttcagttcggcaaagttagacggcagctggctgcggtggaactccgccagcggcagacgccagaacggttcgttctcctgcgcggcactcgccagcaagcgaccggccagcgcatcgtcaaaactgaacagcgcgtgataatcattacccagcgcagttttcgccgccccggtgagggtcgccgcatcaatgatcatttccggtttctgcgcactggcatcaatcagaccatcggcaagcaccagacgcccttcggcatcagtgttcatcacttcaacttttttaccgttgcgatagaacctgcacaggaaagcgacgagctgatcgttaaagatgctaacggcaatctgctggctgacggcgacagcgttaccatcattaaagatctgaaggtgaaaggccggataaggcgtttacgccgcatccggcaacggtgccgactgcctgatgcgacgcttgcgcgtcttatcaggcctacaaattcccgcaacctccttaacagctgctccgcggcgcccgaggcccggaccaccgatcccataaagcgctacaacaggcccacaaacgtggggaacagcggaaccagcgaccgagccacaaagaggatccagccggaacccacagactaa

SEQ ID NO: 130070 - DNA, 436 bp, Homo sapiens
  misc_feature (1)...(436): n = a,t,c or g
atnnnnnnnnnnnnnnnnnnnnnnnnnnnnnnnnnnnnnnnnnnnnnnnnnnnnnnnnnnnnnnnnnnnnnnnnnnnnnnnnnnnnnnnnnnnnnnnnnnnnnnnnnncattcacctttaatactgagcatccattctatgcgaggccctgtcagcaggctcagcataggcaatgtccctgaccttcagggactatggtccactccatcattctggcagattcagaggctacaataaaggagtaaagtctgagggtggggcacttcctgaagacacatctttgcactgggggaagggagtaccaagcagagagcatagcacgtgcaaaggcccagaggtacgattagtcctgcaactgggaggccaagaataagagagagtgaggggaaggaggtcagggaaaggagggtgtgggctccattcgaattccaccaga

SEQ ID NO: 130071 - DNA, 477 bp, Homo sapiens
  misc_feature (1)...(477): n = a,t,c or g
ccccccacccccgggtaaattttggannnnnnnnnnnnnnngtattttnnnnnnnnnnnnnnnnnnnnnnnnnnnnnnnnnnnnnnnnnnnnnnnnnnnnnnnnnnnnnnnnnnnnnnnnnnnnnnnnnnnnnnnnnnnnnnnnnnnnnnnnnncattcacctttaatactgagcatccattctatgcgaggccctgtcagcaggctcagcataggcaatgtccctgaccttcagggactatggtccactccatcattctggcagattcagaggctacaataaaggagtaaagtctgagggtggggcacttcctgaagacacatctttgcactgggggaagggagtaccaagcagagagcatagcacgtgcaaaggcccagaggtacgattagtcctgcaactgggaggccaaggatcagagagagtgaggggaaggaggtcagggaaaggagggtgtgggctccattcgaattccg

SEQ ID NO: 130072 - DNA, 466 bp, Homo sapiens
atgttcatggcaggcaggcctgggccggcgagggagttgggtgggggtcgcatgccacctccatagctctggggccccacgctggccatgccacgaggaggcgtcaccctctgcattgggctgcccatgctcggatgcccctgggctcgtggggagggctccatggcgccagggaggaggggctgggagccagggaggcctgcgggaggctgactcggcatccgcagggtgggccgggggccccctgggaagcgcggtgacatgaagggctgaccgtgaggccccatcacgggggcattggggttgtggggggacggctgggagccgggggggccctggaagaagccagccgccatggagcctgcggccattgtgtcacctggggccatactgcccataacggggctgggggcggctgcagcactatagtcctggaaggccttggcctcgccggagtgctcgcagg

SEQ ID NO: 130073 - DNA, 2865 bp, Homo sapiens
atggatgctgcagagctgattgccgaactgaaacggttgcatcgtcaggggaaagacatcgggcagtacatttatctgcgtcgctatgagcgtagccgcaagcacagtgcggcgttgatgctggctgactcctttgtacgaacaacacacgctttgcggcgctcgcatggtggatttccacggctggatgatgccgctgcattacggttcgcaaatcgacgaacatcatgcgagcgtaatgacgataacacctgtagccgttccctgtatgccgatctgaaaaatggcactgcacagaacattcgtgccaaatttgtctttatcggcgcgggcggtgcggcgctgaagctgttacaggaatcggggattccggaagcgaaagactacgccggtttcccggtgggcggacagttccttgtttcggaaaacccggacgtggttaatcaccatctggcgaaggtttacggtaaagcatccgttggcgcaccaccgatgtcggttccgcatatcgatacccgcgttctggacggtaaacgcgtagtgctgtttgggccatttgccaccttctcaaccaaattcctcaaaaacggttcattgtgggatctaatgagttccaccaccacctctaacgtgatgccgatgatgcacgtcgggctggataatttcgatctggtgaaatatctggtgagtcaggtgatgttgagtgaagaggatcgttttgaagcgttgaaagagtactatccgcaggcgaaaaaagaggactggcgtttgtggcaagcggggcagcgcgtgcagattatcaagcgtgatgccgagaaaggtggcgtactgcgtctgggtactgaagtcgtcagtgaccagcaaggaaccatgccgcgctctgggggcatcgccaggggccgcgttcattccacagccaatatccacgcccaccgccgccggaataatcgcccctttggtcgggatcacgctaccaatggtggaacctttacccaggtgtacatcaggcattaccgcaatatgtttgaaaataaacggcatcttcgccgtattaataagttgctgacgcgcatcggcctctaccggcacgcctttggtccacatttttaccggggcattttcagtgcattggcaatggaagcatggaataaccaacaaggtggtaataaatatcaggttattttcgatggcaaaatttatgaaaatgcctggtgggtttcttctacaaattgcccgggaaaagcgaaagcaaatgatgcaactaacccgtggcgtttaaagcgtaccgcaacagctgctgaaattagtcagtttggcaatacactttcctgcgaaaagagcggcagctcatcttcttcaaattcaaatacgcctgcatccaatacgccggctaatggcggttcggctacaccagcacagggcactgttccgtctaattcttctgtagttgcctggaataaacagcagggcggtcagacctggtatgtcgtctttaatggtgcgcctcttctaactgtccgggtgatgcgaaaagccatgatgacagcaacccatggcgttatgttcgtgccgctacggcaacggaaatctcagaaaccaagtaatccacagtctgtacttcagaaccaaagtcttcacggatgtgaaccgcagctgaaagcagaaaaccgcgcggtactggtcaccgtggggttatcaagcggttccgggctaccgctgtttgagcatagtgacgttgagattgccgtcgacttcttgcaacgtgcacgacaggcgcaaggcgatatcagcattccacaaagcgcattaattatcggcggcggtgatgtcgcgatggacgtagccagcacgctgaaagttctcggctgtcaggcggtaacttgcgtagcgcgtgaagagttagatgagtttccggcaagcgaaaaagagtttaccagcgcccgggagctgggcgtttcgatcatcgatggattcacgccagtagccgtggaaggcaataaagtcacgtttaagcatgtacggttatcgggcgaactgacgatggcggcagataaaattattctcgccgtcggtcagcatgccagactagatgcctttgcggagttagagccgcagcgtaacaccatcaaaacacaaaattaccagacccgcgacccgcaagtctttgctgctggcgataagcggccactcgcgagataccgtataggaatcggcaatgaacgaatctccggcacccatggtgacaatgctgccgttttcacccagcgtgacaatcactgttcctgcgccacgggcaacaatcgctttcatcttcagacgcagcgtttcgtcttcttgcggtgcggaggcaaaggcaaaatcgagatgcggcaccagtgtctgccagagcgggctgtcccacttgtcggagaagtcgaaagcggtaagtttgcccgcagcgtgcagctgtgggaatgcgtcttccgcatgtccccagattgccgcgtgcacaatgtcatactgcgccagccaggcgtaatcctcttcactcagggcaaagtcggccatcacgccttcggtgtagtcgccaaaaacgcgatcattgtcgtgcagttccacctgagtttgtgcggtaatgcatcccggctgtatgccgtagcgagtgccgtacaccgccacattgaccgcattaccgccagaaaccgctttattcagttgcgggtagatatcgacgcagttatcgccgattgtcgccagggtttcatctctcatcctccggcagcagcgcgcgaaagcgtccagcgcctggcgggcatagagtcgggatcgtacattcatagtcacagttcacggaaggacgctatagcccggcaaaatttcggctag

SEQ ID NO: 130074 - DNA, 1568 bp, Homo sapiens
atgaagctcaacaaagccggattcaacgtgccggaaagttatagtttgttgaaaatgcccccagtgggatgcctgataagcgcacttaagaaagctgaagaccgacaagaagtgattttacggctgtttaatccggctgaatcagcaacctgtgatgcgactgttgctttcagtcgcgaggtgatttcttgctcagaaacgatgatggatgaacacattaccaccgaggaaaatcaaggttcaaatctatcggggccttttttacgggtacgagctggagagagtatcaagtttttcaacgtgctgctggccgatacccccggcttggacatcgacacgatggacaaagacgtggctcacgacagccgctctatccagcttgcgatgctgcgcgacgacgaaatcctcacccatccggtgtttaatcgctaccacagcgaaaccgaaatgatgcgctatatgcactcgctggagcgtaaagatctggcgctgaatcaggcgatgatcccgctgggttcctgcaccatgaaactgaacgccgccgccgagatgatcccaatcacctggccggaatttgccgaactgcacccgttctgcccgccggagcaggccgaaggttatcagcagatgattgcgcagctggctgactggctggtgaaactgaccggttacgacgccgtttgtatgcagccgaactctggcgcacagggcgaatacgcgggcctgctggcgattcgtcattatcatgaaagccgcaacgaagggcatcgcgatatctgcctgatcccggcttctgcgcacggaactaaccccgcttctgcacatatggcaggaatgcagagtcgaaaaacagcaggcatctgctgtgtccacctttgggctggattcggcaaagtcgcgattattggcgcaggtcctgccggattgcaggccagtgtgacactgacaacccagggttatgacgtcacgatttatgagaaagaagcgcaccccggtggctggttgcgtaacggtattccgcaattccggttaccacaatcagtgctggatgcagagatcgcccgtattgaaaaaatgggcgtgccccattaagtgcaccaccgaagtcgggtaacacactcacccttgagcaggtgaaagcagaaaaccgcgcggtactggtcaccgtggggttatcaagcggttccgggctaccgctgtttgagcatagtgacgttgagattgccgtcgacttcttgcaacgtgcacgacaggcgcaaggcgatatcagcattccacaaagcgcattaattatcggcggcggtgatgtcgcgatggacgtagccagcacgctgaaagttctcggctgtcaggcggtaacttgcgtagcgcgtgaagagttagatgagtttccggcaagcgaaaaagagtttaccagcgcccgggagctgggcgtttcgatcatcgatggattcacgccagtagccgtggaaggcaataaagtcacgtttaagcatggggatctacgtacagcacccttcttgggcgtggccgataagcgcaacaaaagcgcaggtaatcacccatag

SEQ ID NO: 130075 - DNA, 329 bp, Homo sapiens
cattcacctttaatactgagcatccattctatgcgaggccctgtcagcaggctcagcataggcaatgtccctgaccttcagggactatggtccactccatcattctggcagattcagaggctacaataaaggagtaaagtctgagggtggggcacttcctgaagacacatctttgcactgggggaagggagtaccaagcagagagcatagcacgtgcaaaggcccagaggtacgattagtcctgcaactgggaggccaaggatcagagagagtgaggggaaggaggtcagggaaaggagggtgtgggctccattcgaattccaccacag

SEQ ID NO: 130076 - DNA, 1217 bp, Homo sapiens
tcatccgttgtcggctctctctgcggttcgctccctggttgtgcgtttgtccccgccggggtgtgcgtcttcctgagctgttgtctgtttttgtatcttgtgagccgctgacgccgtctgcgcccctctgccctgtgtctgtttctttctttctttctttccctttcgtgagttggtgagggtccttgcttctccaggggtcggggtctctgctgcttggttgaggctggcgccctcaaacgcatgttcagccagagttgggggccagtggactccagcggggccatacctggaagaagccagccgccatggagcctgcggccattgtgtcacctggggccatactccccataacggggctgggggcggctgcagcactctggggtgtgccccctcctctctgcaggtggccggccccatgggacagcgagctggcattggtcagtgagcacactggggttgtcggcctgaggatctgtgggtctgaagaccccagccccgcattcacctttaatactagcatccattctatgcgaggccctgtcagcaggctcagcataggcaatgccctgaccttcagggactatggtccactccatcattctggcagattcagggctacaataaaggagtaaagtctgagggtggggcacttcctgaagacaatctttgcaccagaacgttggggccgttcctttggcctcgataacccactcaataaatgggcttgtcctagagcttaaggcctgcccctggggccccacgctggccatgccacaggaggcgtcaccctctgcattggcccgcccatgctcgaatgccctgactcggcaccgcagggtgggccgggggccccctgaccgtgagggcccatcatggggcgttggggttgtggggggacggctgggagccgggggtggccgtgtttgagcatagtgacgttgagattgccgtcgacttcttgcaacgtgccgacaggcgcaaggcgatatcagcattccacaaagcgcattaattatcgcggcggtgatgtcgcgatggacgtagccagcacgctgaaagttctcggcgtcaggcggtaacttgcgtagcgcgtgaagagttagatgagtttccggcagcgaaaaagagtttaccagcgcccgggagctgggcgtttcgatcatcgtggattcacgccagtagccgtggaaggcaataaagtcacgtttaagcat

SEQ ID NO: 130077 - DNA, 2994 bp, Homo sapiens
atggtggcgttttatcgccatgccgggcgcatgtggccgggaattgcgctgagctgttcgctgggaaatatcgccgcatccatcctgcttttttccaccagctcgctgaacatgacctggacgaccatcaatattgttgaagccgtggtcggggcagtgctgctacgtaaattgctgccgtggtataaccccttgcaaaatctggctgactggctgcgtctggcactcggcagcgccaactcagccggtgtgaacatttccacggcgacagtttgccgtcagtgtgaagatgcaccgtgcgctaacgtctgcccgaatggtgctatcagccgtgataaagggtttgttcatgtgatgcaggaacgttgcattggttgcaaaacctgcgttgtggcttgcccgtatggtgcgatggaagtggtggtacgtccggtgatccgcaacagcggcgcgggtctgaatgtacgggctgacaaagccgaagccaataaatgcgacctgtgcaaccatcgtgaagacggcccggcgtgtatggcggcttgcccgactcatgcgctgatttgtgtcgatcgtaataaacttgaacaactgagcgcagaaaaacgccgccgaattcccggaaatattcgtagaatacggagcgggcggtatcgccgacctgtgactgccggatgcgacgctgtcgtgtccggcagggcgggttacgcaattcatgatggcgggaataactcaatggcaaaaaacacatcttgcggtgtccaactgcgtattcgtggcaaagtgcagggcgtcggttttcgtccgtttgtctggcagctggcacagcaattatctcacgggagtcgtatgcgggatggcacatgcaacttgaagtatgacgagtatagcaggagtggcagcatgcaatacaaccccttaggaaaaaccgaccttcgcgtttcccgactttgcctcggctgtatgacctttggcgagccagatcgcggtaatcacgcatggacactgccggaagaaagcagccgtcccataattaaacgtgcactggaaggcggcataaatttctttgataccgccaacagttattctgacggcagcagcgaagagatcgtcggtcgcgcactgcgggatttcgcccgtcgtgaagacgtggtcgttgcgaccaaagtgttccatcgcgttggtgatttaccggaaggattatcccgtgcgcaaattttgcgctctatcgacgacagcctgcgacgtctcggcatggattatgtcgatatcctgcaaattcatcgctgggattacaacacgccgatcgaagagacgctggaagccctcaacgacgtggtaaaagccgggaaagcgcgttatatcggcgcgtcatcaatgcacgcttcgcagtttgctcaggcactggaactccaaaaacagcacggctgggcgcagtttgtcaaaagcgatgaaaatgacgcgccagatcgccagagcggttcaacaggcagtcagtgcaagaactgcggggcagacacagagccacaagttgcagctggccctggattgtctgagttaaacccggtgcattgcccgcacctgcattatcgggcacacttccgcgccgacagacacagcgttgcatgcagcctattggacacgccagtcacgggccatcaggtggcaccaacgtacagacagcaagtaccccgagcgggccaggtgcatgacccgagtaaacatacacggatgccgtgcgagaacatcgaccccgtgcgaacaatcatccgtcgaatcagtgatccaccagtgcccgccagtgcgacacttggcgcatccaaagccagccggatccggccacggcgttcccacagtatcccagaaatcacggcaaaatcacgaaagcccggcggacaacccaaatggcaagtcatctgctggctggatcgcgacgagaaagtagtggtcatgcaaaccgtgcgtgaccagataggccagcatgtttttactgctcatcgtctggaccgacccacttctggtgtgttgttgatgggattatccagcgaggccggacggctgctggcacaacagtttgaacagcaccaaatccagaaacgttaccatgcgattgtgcgcggctggttgatggaagaagcggtgctggattatccactggtggaagaactggacaaaatcgctgataaatttgcccgcgaagataaaggcccgcagccagcagtgacgcattatcgcggtctggcgaccgtagaaatgccggtagcgaccggacgttacccgaccacgcgctacggcctggtggaactggagccgaaaaccggacgcaaacatcagcttcgccgacatcttgcccatttgcgtcatccgattattggcgatagcaaacatggcgatttacgccagaatcgcagcggtgctgagcattttggcctccagcggttaatgctacatgccagtcagttgtcattgacgcatccttttactggcgagccgctgactattcacgcgggcctggacgacacctggatgcaggcgttatcacaatttggctggcgcggtctgcttcctgaaaatgaaacggttgactcatgcgcctcgggtcggatgagaatagttcctaatccagaaaaacgatggcgaaatggcttttggcgcccatgtcggattctcgtgtggcaaaaggacgccctaccgcgggccaacaggattgaacgaaaacagggccatcgaaatgtgggtatcccaggggaacttattgactggaaaaaaggccacttaatgggaatattgggatcgcaccttcgcgacaattgcactgccgctggttactaccagcagagaggcaagcgatttaaccaggcttgcggcgtaatcgaactgtccatcggtttgcaacgcttccatataatcggtcggcgcatgagggcgttgttgggtaaatttctgccagcccatcagcaacaaacccgccgccagtccgccgagcgccggagttag

SEQ ID NO: 130078 - DNA, 3159 bp, Homo sapiens
ggcagggacgcatgcgacgatcgtgcgacactgtgccgatattgcgatcagcgcgacgagcgcgcgcgagagatagagccagtagaccggcccggggcccgagcgacgaaggaggaggagacacagcaccgagagtactggtgagagtgctgaatagtgggaggagctaccaacatgcgagccgacagaccggcccccgcgcgacgtcgtgtctaacagtggtgagcggcaggggtattagatctcctgcacctgttacaaccgcccccccctgcccaacttgaacggcgagcagggtgactcctagaggatcagttttagtaaaggtaaaaaatgtttaccgcaggtgcgcaaattttccgcctttacgtcactttatgagcatttcgcatataaaatgtagaacttttgtcctagcataaccacagaaacgaatcttggcgcccaggtctggcggataaagcggtaatgagcaaccaatcacagcatgtattaattgccctgccccacccgctgcttcacctggtcagtttaggtttagtctcgtttatctttacccttttctcgcttgagctttcgcagtttggcacccaactcgccccactgtggttcccgacgtccatcatgatggtggcgttttatcgccatgccgggcgcatgtggccgggaattgcgctgagctgttcgctgggaaatatcgccgcatccatcctgcttttttccaccagctcgctgaacatgacctggacgaccatcaatattgttgaagccgtggtcggggcagtgctgctacgtaaattgctgccgtggtataaccccttgcaaaatctggctgactggctgcgtctggcactcggcagcgccattgttccgcctctgttggggggtgttctggttgtcctgctgacgcccggagacgatcctctcagggcatttttgatatgggtactgtcagaatccatcggcgctctggcactggtgccgctgggattgttatttaaaccacactatctgctgcgccatcgcaacccacggttgctttttgagtcgctgctcacgttagccatcacactgacgttaagctggctttcgatgctgtatctgccgtggccttttactttcattattgtgctgttgatgtggagcgccgtgcgtctgccacgaatggaagcctttttgatcttccttaccacggtgatgatggtgtcgctgatgatggccgcggatccctccctgcttgctacgccgcgtacgtacctgatgagccatatgccgtggctaccgtttttgctgatcctgctgcccgccaacatcatgaccatggtgatgtatgcctttcgtgcggaacgcaaacacatttccgaaagcgaaacccactttcggaacgcgatggaatattccgctatcggtatggcgttagtgggcaccgagggacaatggctgcaaaccaacaaagcgctctgccagtttctcgggtacagtcaggaagagctgcgcggactcacctttcagcaactgacctggccggaggatctcaataaagatctccaacaggttgaaaagctgataagcggtgaaataaacacctatgcctactcgtgcctggggctttgtgctgccttctatgtcggtccgctactctgttgttcttcggggccgccgtggatcattccccggattatgcctgatgaagcgcaacccttgccggatagtgccttgccgcgcgtcgccccactggcatggaaaacgggcaccagctatggctatcgtgacgcctgggcgattggggttaacgctcgctatgtcattgggatctggactggcagaccggacggcacgcccgttgttggtcagtttggctttgccagtgccgtaccattgttgaatcaggtcaataatatcttactgtcgcgcagtgcgaatctgccggaagacccgcgcccgaactcagtcactcgtggcgttatctgctggccgggcggacagtctttgccggaaggtgacggtaactgtcgccgccgcctggcaacctggctgctggacgggagtcagccgccaactctattactgccggagcaggaaggcattaatggcattcgtttccccatctggctggatgaaaatggcaaacgtgttgccgctgattgcccgcaagcgcgacaagaaatgataaatgtctggccgctaccgctggaacactggctgcccgcatcagaacgtcgcgctgtgcgcttaccaccggcctcgacaagttgcccgccatacggtcacgatgcccagctcccgctgcagctgacaggcgttcgcgatggcgcgattattactagcttcgtcgttagtcttgttgtatctcgctgctgcatcgtgcggagcccaaacaaggaccgagtaaaagggaacctccaaaatgcgctccaaagaacgaacagcggaggtgtgcaaaataaaaccgtaaagtatgaacagcggctcaacttgaataaaactcgctgggaacaatttaatgcctccataaaaggtaaaccgggaaacgtgcccggttcaatttctgcaaatagcgataacagccgtcaagtttctctcagcaccgacggtggttttgtattgcatagcggtggactgactttcagtaatgatagttttagcgactccgatacactggcggtagttcaggctccaggtgctcaaggagcgcgaataaattatggcaacagtactatcgatcgatggggttatggtgtcaccagcgctctttctccttatcatgaaaaccgtatcgcgctggatatcaacgatcttgagaacgatgttgaattaaaaagtaccagtgcagtagctgtaccgcgtcagggttcagtcgtctttgctgattttgaaaccgtgcaagggcaatcagccattatgaacatcacacgaagtgatggtaaaaatattccatttgctgcagatatttatgatgagcaaggcaatgtcattggtaatgttggacagggtggacaagcatttgttcgtggtattgagcagcagggaaatatcagcattaaatggctcgaacaaagtaaacccgtaagttgtcttgcgcattatcaacaaagcccagaagcagaaaaaatagcacaatctattattctgaatggaattcggtgtcagattcagtaa

SEQ ID NO: 130079 - DNA, 2172 bp, Homo sapiens; identical to SEQ ID NO: 121014

SEQ ID NO: 130080 - DNA, 2409 bp, Homo sapiens
atgttcgttttggctgatttcggccacacaagacgcaccaaccgaagtttggggcacaacattttaccggcgcgaattgcgccagacgcgatcaacaaatggctaagtggatttttctcccgcgaagtgcaattacgctgggtggggccacaaatgacccggcgcgtgaaacgccacaacactgtacctctgtcatttgctgatggctatccttaccttcttgctaacgaagcctcgttacgtgatctccaacaacgttgtccggccagtgtaaaaatggagcaattccgccccaatctggtggtttccggcgcgtcagcctgggaagaagatcgctggaaagtgattcgcattggtgatgtggtgtttgatgtggttaaaccttgtagccgctgtattttcaccaccgtcagcccagaaaaagggcaaaaacatccggcaggcgaaccattaaaaacattgcaatctttccgcactgcccaggataacggcgggggggaaggcgaggcacgcgcagcaaatactggcgcaactcatcgcggtaggcatcggtcgccgtcggctgtaaggtaccgagatcgattgaatatgtatgttcttcgtcgtatggatctgttgtaccgggtaaaaacgctttgggccgcgctgcgcggtaatcattacacctggcctgccatcgatatcaccctccccggcaatcgccattttcatctgattggcagtattcatatgggtagccacgatatggctcccctgcccacccgtttgctcaaaaagctcaaaaacgccgatgcgctgatcgtcgaggcggatgtttccaccagcgatacgccttttgctaatttgcctgcctgcgaggcgctggaagagcgcattagcgaggagcaactccaaaacctgcagcacattagccaggagatgggcatttctccctcactcttttctacccaaccgctgtggcaaatcgcgatggttcttcaggcgacgcaggcacaaaaactggggctgcgggcagaatacggtatcgattaccagctattgcaggcggcgaagcaacaacataaacccgtgattgaactggaaggggctgaaaaccagattgccatgttgctccagctccctgacaaaggactggcgctgctggacgatacgctgacccactggcataccaacgcacggttgctgcaacaaatgatgagctggtggctggagtgtgaaggaggggagagagaaagaatatttccagtctccaagaggatggggaagaagcttgatgccgtctttggggataatcatacggcctccttgacggaaaccgaagaatacagaaaatcgcaggtgcatttctgcatctgtgacaagcgagaaagaagctccggaaactatcaatcaatacaaggctgccgttcggcggccttttttattcctagcaacagcactcgcacaaagcgaggtgagagtatgtatcgcatggacaaactaaccactggtgctgcctatggcgcttcagccgggagcatcctaaacggcatgttgaatgcctacagccccgagcagtggaacgctatcggcgtgctgacaaccgccgcagcaggagccgagatgaacccaacgttgaggaataagctggtgggtgccattgttggcggatcaggggcaatcactattgctgcagtaatgctgggcaatgcggatggactcgaaggtcggcgttattacgcctatcaggatgtggtcggcgtctggaccgtttgcgatgggcacactggtaccgacattcgccgcggtcaccgatataccgacaaagagtgtgacaacctgcttaaggcagatctgcgaaaggccattatttacatcagtggttatagtggcactaacggcattcgcgactcgctgttattcagttcgctgtggttgatcccggtattcctctttccgaagcggattaaaattattgccgcagtaatcggcgtggcgttcagccgctttatcgccagtcatctggcggttgcgtttgagtctgacccggaagcagaaatccgtcaactgaacagccgtcgcgtcgaactggagcgggcgttaagtaatcatgaaaatgataaccagcagcagcgtattcagtttgagcaggcgaaagagggcgttacggcgctgaaccgcattctgccgcgtctcaacctgttggctgatgacagcctggcggatcgcgtcgatgaaatccgcgaacgtctggatgaagcccaggaagccgcgcgttttgttcagcagtttggcaatcaactggcgaaactggaaccgattgtttcggtattgcagagcgacccggaacagttcgaacagttaaaagaagattacgcgtactctcagcagatgcagcgcgatgcccgtcagccaggcgtttgcccctga

SEQ ID NO: 130081 - DNA, 3108 bp, Homo sapiens
atgttcccggcacaggttcgcgcattaggcgttggtctgtcatatgcggtcgctaatgctatatttggtggttcggcggagtacgtagcgttgtcgctgaaatcaataggaatggaaacagccttcttctggtatgtgaccttgatggccgtgagaacatcaatccaaacatggcactgcgatcccggctttgagcctgatggtgaaggtgagcatattctggttagaatcctcaaaaacggctgcaatacccgttttgtggcggatgcactggcgaaattcctgaaaattcatgcccgtgaagtcagcttcgctgggcaaaaagacaaacatgctgttacggaacagtggttatgcgctcgcgtgccgggcaagggaatggcccgatcttggagcgccctttttcacctgggccagggcttggccaggttggctggaggtattccgcggggacaaagcaatatagaaggagccaatcagctgggcattaccagtattctggtgaaagataaaaccaccatcccggactatttcgcgaaggacaaagccaggcaccgtacccgtccactatgggcctggctaaaactactctggcaacgcattgatgaggacaacatgacaaccctggcaggtaaccttgcctatgtgtcgttgctctcattagtgccgctggttgccgttgtttttgcgcttttcgccgcttttcccatgttttccgacgtcagcattcagttacgtcactttatttttgccaactttctgcctgctactggcgatgttattcagcggtatatcgaacaatttgttgccaattccaacaagatgaccgccgttggggcgtgcgggctgatcgtcaccgcgttattgttgatgtactccatcgatagcgcgttgaataccatctggcgcagtaaacgagcgcgaccaaaaatttactcgttcgccgtgtactggatgattttaacgctggggccgctgctggcaggggccagtctggcgatcagttcctatttgctctccctgcgctgggcgagcgatctcaatactgtcatcgacaacgtgctgcgtatttttccgttgctgttgtcgtggatctccttctggttgctgtacagcattgttcctaccatccgcgtacctaaccgcgacgcgattaaagctcatgaccaatttctagccgaccttgcgagcattctaccgagtaacaccacaccgctcattgtcagtgatgctggctttaaagtgccatggtataaatccgttgagaagctgggttggtactggttaagtcgagtaagaggaaaagtacaatatgcagacctaggagcggaaaactggaaacctatcagcaacttacatgatatgtcatctagtcactcaaagactttaggctataagaggctgactaaaagcaatccaatctcatgccaaattctattgtataaatctcgctctaaaggccgaaaaaatcagcgctcgacacggactcattgtcaccacccgtcacctaaaatctactcagcgtcggcaaaggagccatggattctagcaactaacttacctgttgaaattcgaacacccaaacaacttgttaatatctattcgaagcgaatgcagattgaagaaaccttccgagacttgaaaagtcctgcctacggactaggcctacgccatagccgaacgagcagctcagagcgttttgatatcatgctgctaatcgccctgatgcttcaactaacatgttggcttgcgggcgttcatgctcagaaacaaggttgggacaagcacttccaggctaacacagtcagaaatcgaaacgtactctcaacagttcgcttaggcatggcaagtttgcggcattctggctacaccataaccacgggaagactcactcgtgggttggacccgcttatcccaatctttctcacatggcttgcacaaccgttatggcgttctcgtgccggaaggttgaacacgtcggcaaaaatctggcataaacagatcgctgttcgaaccgccgccagtaatgatcacatgcttcgcaaacgtcagcgccacgctttccagtatcgaacgatatatccatgcgtaatccatgctggaatcaaagccgatcataatcccgcgtttgtacggttcccacggattgaggtgtctatgtccgtcccggtccctgttcgcacagggtgtgatgcgggatccttgcgggtatcaacgggaagagggtggccaggcttcaaaatccgggggaaggaggggttcaccctttggggacttcttttccggggaggaaatcaacttacgggggaaaattaccaacagcgagatgagttagcacgggaacgccatcgcgctgatcgccagtcaaacctggcgcgatcatccggtggatttattgctctcgctgctggtgcaaagtctgacaggcggttgcgtgaacttaaccagtcgctgcaaaaggaactggcgcgcaatcagcatctggctgaacggttgctggaaaccgaagagagcgtgcgccgtgatgtggcgcgtgagctgcatgatgatatcggtcagaccatcactgctattcgtactcaggcgggcattgttcagcggctggcggcagataacgccagcgtgaagcagagcgggcagctcatcgaacaactatcgctgggcgtttacgacgcggtgcgccgtttgttgggtcggttacgtccgcgccagttggatgatctcaccctggagcaggccatccgctcactgatgcgggaaatggagctggaagggcgcggtattgtcagccatctcgaatggcgaatcgatgaatcagcgttaagcgaaaaccagcgcgtgacgctgtttcgtgtctgccaggaagggctgaacaacattgtgaaacatgctgatgccagcgcggtcaccctgcaaggctggcagcaggatgaacggttgatgctggttattgaagacgatggcagcggtttgccgccgggttccgggcaacaaggttttgggctcaccggaatgcgcgagcgcgttacggcgctgggtggggcatttcacatttcctgtctgcacggtacgcgtgtcagcgtttctctagctcaacgccatgtctaa

SEQ ID NO: 130082 - DNA, 1374 bp, Homo sapiens
atgggaaagaagcaaagaggagggggaagacattaccggaggaggaaggaactgtgcgtgagggtccttgcttcacagaaaggaagctccatttggaatctgtccaacagagtggaatcttggcactgggaaggagagaaagatggtgaagacagagataatgatgatggggatgacagcgatggtggggatgacaatggggaagaggatgatggtgacaacagcaacgctgatgtaaacactgacaattgtgatgatggtgaagacagggatgatgcttcctttcactcgaacacaccagaaacacgagatgtaggtacgcgtgagcaaagaccaaaggtagataaaaccacaaagatagggaaaaaacagagcagaaaagctgaaaattctaaaaatcagagcacctctccccctccaaaggaacgcagctcctcaccagcaacagaacaaagctggacagagaatgactttgacgagttgagagaagaaggcttcagacgatcaaacttctccaagctaaaggaggaagttcgaacccatggcaaagaagttaaaaaccttgaaaaaagattagacgaatggctaactagaataatcaatgcagagaagtccttaaaggacctgatggagctgaaaaccacagcacgagaactacgtgacgaatgcacaagcctcagtagccgattcgatcaacgggaagaaagggtatcagtgatggaagatcaaatgaatgaaacgaagcgagaagagaagtttagagaaaaaagaataaaaagaaatgaacaaagcctccaagaaatatgggactatctgaaaagaccaaatctacgtctgattggtgtacctgaaagtgatggggagagtggaaccaagttggaaaacactctgcaggatattatccaggagaacttccccaatctagcaaggcaggacaacattcaaattcaggaaatacagagaatgccacaaagatactcctcgagaagagcaactccaagatacataattgtcagattcaccaaagttgaaatgaaggaaaaaatgttaagggcagccagagagaaaggtcgggttacccacaaagggaagcccatcagactaacagctgatctcttggcagaaactctacaagccagaagagagtgggggccaatattcaacattcttaaagaaaagaattttcaacccagaattgcatatccagccaaactaagcttcataagtgaaggagaaatacaatactttgcagacaagcaaatgctgagagattttgtcaccactaggcctgccctaaaagagctcctgaaggaagcactaaacatggaaaggaacaactggtaccagccactgcaaaaacatgccaaatggtaa

SEQ ID NO: 130083 - DNA, 2896 bp, Homo sapiens
  misc_feature (1)...(2896): n = a,t,c or g
atgaatgtagctggaagccattatcctcagcaaactgacacaggaacagaaaaccaaacattacatgttctcacttataagtcggagctgaatgatgagaacacatggacacatagggggcggggaacagcacaaactggggcttttgataggcagaggcttggagggagagcattaaggaagaataggtttttaacttctttgcgttgggatcaaacttcctcctttagctcggagaagtttgatcatctgaatccttcttctcttaactcgtcaaagttattctccgtccagctttgttccgttgctggtgaggagttgcgttcctttggaggaggagaggccattatttacatcagtggttatagtggcactaacggcattcgcgactcgctgttattcagttcgctgtggttgatcccggtattcctctttccgaagcggattaaaattattgccgcagtaatcggcgtggtgctatgggcggcctctctggcggcgctgtgctactacgtcatctacggtcaggagttctcgcagagcgttctgtttgtgatgttcgaaaccaacaccaacgaagccagcgagtatttaagccagtatttcagcctgaaaattgtgcttatcgcgctggcctatacggcggtggcagttctgctgtggacacgcctgcgcccggtctatattccaaagccgtggcgttatgttgtctcttttgccctgctttatggcttgattctgcatccgatcgccatgaatacgtttatcaaaaacaagccgtttgagaaaacgttggataaccctgcctcgcgtatggagcctgccgcaccgtggcaattccttgaccggctttatcaatatcgcagtgtgttcgtatcgatcatgattggcgtggtgaatctgccgattattcattactccgtggagtggtggaacaccctgcatcagggatcaacgcggatgcagcaaagtatcgatccggcgatgcgttcgccgctgcgctggtcgatttttggcttcctgctcctgtctgccacgctgacgctgatgcggatgcgtaatttgattttgctgatggaaaaacgccgtccgtgggtgagtgaactgatactgaaaagaggccgtaaatgacccctgcatttgcttcctggaatgaatttttcgcaatgggcggttacgccttttttgtctggctggcggtggtgatgaccgttattccgctggtggttttggtcgtgcactcggtgatgcaacatcgcgcaattctgcgtggcgtggcgcaacagcgggcgcgtgaggcgcgtttacgtgctgcgcaacagcaggaggctgcatgaatattcgccgtaaaaaccgcttgtggattgcctgtgccgtgttggcagggctggcgctgactatcggtctggtgctatatgcgctgcgctcgaatatcgatctcttttatacgccgggggaaattctctacggcaagcgtgaaactcagcaaatgccggaagtcggtcagcgtctgcgcgttggcgggatggtgatgccgggtagtgtgcagcgcgatcccaattcgctgaaagtgaccttcaccatttacgatgctgaaggctcagtggatgtctcttacgaaggcattttgccggatctgttccgtgaagggcagggcgttgtggtgcagggcgaactggaaaaaggcaatcatatcctcgcgaaagaagtgctggcgaaacacgatgaaaactatacgccgccagaagttgagaaagcgatggaagctaaccaccgtcgcccggcgagacccagcatcatgatgccagaaattggtaacggactgctgtgcctggcgctgggaattgcgctgctgctgtccgtgtatccgctatggggcgtggcgcgcggagatgcgcgcatgatggcgtcttcccgcttgtttgcctggctgctgtttatgtctgtggctggcgcatttctggtgctggtcaatgctttcgtggtcaacgacttcaccgtcacctatgttgccagcaactccaatacccagcttccggtgtggtatcgcgtggcggctacctggggcgcgcatgaaggctcgctactgctgtgggtgctgctgatgagcggctggacctttgcggtggcgatttttagtcagcgtattccgctggatattgtggcccgtgtactggcgataatggggatggtcagtgtcggctttttgctgttcattctctttacctctaacccgttctctcgcacgttgcatcttgcgtacccaaatcggtgccagccaatcaactggcgcgggcgacatctggtctggtacttgctgctgtttgttatcagtctctggctccagttgggattgccggacgaactgtcgcgctttacgccattctgtctggcgctgccgattatcgcgctggcctggcactatggttggcaaggggcgctgattgcgacgttgatgaacgccatcgcgctgatcgccagtcaaacctggcgcgatcatccggtggatttattgctctcgctgctggtgcaaagtctgacagggttgttgcttggcgctggcatccagcggttgcgtgaacttaaccagtcgctgcaaaaggaactggcgcgcaatcagcatctggctgaacgggtgctggaaaccgaanaaagcgtgcgccgagatgtggcgcgtgagctgcattatgatatcggtcagaccatcactgctattcgtactcacgccggcattgttcagcggctggcggcagataacgccagcgtgaagcaaagcgggcagcttatcgaacaactatcgctgggcgtttacgacgcggtgcgccctttgttgggtcggttacgtcccgcccagttggatgatcttacccctggaacaggccattccgctcactga

SEQ ID NO: 130084 - DNA, 723 bp, Homo sapiens
atgatgatgagtaaaaaattggccaaaaagcgccactcggtgaagcccgtggtggcgaaagaacctgctcgcaccgccaaaaattttggctatgaagagatgttgagcgagctggaagctatcgtcgcggatgctgaaacgcgtttagccgaggatgaagctaccgcccgaagcactggtcgaaaccttcatcgcgcagctgttcgacgcaccatcgcaaatcatgccgctgacatcgccgatcatactgctgatcgcaatcgagatgggttcataaacgccatcccacagccatgccatcccggcggcgggccccattgctgcggtcgttgcggcacacagcgcagacaaacgcgctttctgaagtgcgcttatcaggcatcccactgggggcattttcaacaaactataactttccggcacgttgaatccggctgtgttgagcttcatcacatcccatgggattttgttgtaacactgtactggagtcagccatgctcgcgcctgctgagctacaccagcggcggttggcgtaccgcacaccgcaaggagacgatcatgaccaataatcccccttcagcacagattaagcccggcgagtatggtttccccctcaagttaaaagcccgctatgacaactttattggcggcgaatgggtagcccctgccgacggcgagtattaccagaatctgacgccggtgaccgggcagctgctgtgcgaa

SEQ ID NO: 130085 - DNA, 2919 bp, Homo sapiens; identical to SEQ ID NO: 124814

SEQ ID NO: 130086 - DNA, 2865 bp, Homo sapiens; identical to SEQ ID NO: 130073

SEQ ID NO: 130087 - DNA, 3102 bp, Homo sapiens
atgaagacaggtgtggtggtagaaaaggcgcctggtcatcagcgggggagtacacttcctccttcctttgctgcgtggtgcgtcctctaccacgtcagaagaatccagctgttactccgtcggcgtctctatctagttgtacggctcctctcatcgcatcgctgcgccccccgcaggcgggctgagtccgaaaagagagttagcaagggtggtggaattttgcgcgcactgtgtaaagagccgctgcgcaccgggcgtattcttaatattaacgttccggatttacccttggatcaaatcaaaggtattcgcgtgacgcgctgcggtacacgacatccggcagatcaggtgatcccgcagcaagatccgcgcggcaatacgctgtactggattggcccgccgggcggtaaatgtgatgctggtccggggaccgattttgctgcggtagatgagggctatgtctccatcacgccgctgcatgtggatttaactgcgcatagcgcgcaagatgtggtttcagactggttaaacagcgtgggagttggcacgcaatgcagcttaaacagcagctcgacccttgcggcgtgtttaaccccggtcgcatgtacgcggaactttgaggagcaggctatgcaaacccaattaactgaagagatgcggcagaacgcgcgcgcgctggaagccgacagcatcctgcgcgcctgtgttcactgcggattttgtaccgcaacctgcccaacctatcagcttctgggcgatgaactggacgggccgcgcgggcgcatctatctgattaaacaggagcatctcgatcgctgcctcacttgccgtaattgtgaaaccacctgtccttctggtgtgcgctatcacaatttgctggatatcgggcgtgatattgtcgagcagaaagtgaaacgcccactgccggagcgaatactgcgcgaaggattgcgccaggtagtgccgcgtccggcggtcttccgtgcgctgacgcagctgcttcggttacggcttcacttcggggtccgagctatccccagcagcccgagtgtcctagcagggtctgacaaccacggatgttccagttccacagccagcgatgatctcctctacggcaggaatccaactcgtatccacggtcgaaatcgaagctctctggaaagtgttacgagtgacgcgcacccgccaattccatggtcaacggtccccagtgatacactgagtgttcctggcatggcccagcgccccccactaaccaactctctcagagtgtgcccgacggagaaattatgccaaagcggttgtacccgtgccggtgttgatgctcccattgatatcggccgcttacagcgttttgttactgattttgaacaacaaaccggaatggaaatttatcagcccggtactaaaacgctcggcaaagtcgcgattattggcgcaggtcctgccggattgcaggccagtgtgacactgacaaaccagggttatgacgtcacgatttatgagaaagaagcgcaccccggtggctggttgcgtaacggtattccgcaattccggttaccgcaatcagtgctggatgcagagatcgcccgtattgaaaaaatgggcgtgaccattaagtgcaacaacgaagtcggtaacacactcacccttgagcagctgaaagcagaaaaccgcgcggtactggtcaccgtggggttatcaagcggttccgggctaccgctgtttgagcatagtgacgttgagattgccgtcgacttcttgcaacgtgcacgacaggcgcaaggcgatatcagcattccacaaagcgcattaattatcggcggcggtgatgtcgcgatggacgtagccagcacgctgaaagttctcggctgtcaggcggtaacttgcgacttgtattcccagcactttgggagtccgaggcgggcagatcacttaagtcgtcagtctgatgtgcatgtgaacgccgagggaacgctggtaatgagtctgcctctaattacgcctaaatcccgcactcgtccgccggtcgccgtgtgcgccgaatttcgatgtaagtgcacgtctgtgcatcgaccagggttgtccacagatctgagtcgggttgaatgcggcgttttcagcgtagctgccactgaaaatacgaccgtctttacattccagcgcgacaccgcttggcgacttactgtaaggcatgtgcgaacggtttgccgccgcaatcgctgcctgagaaagcgcatcacccgtcagcgcatagccgtgatcctgttcgtccatcagcagcgttttaatctccagatctttcggcccaaaggcatctggcagatagtcacgcagcgcgtgtgcctcgcggcccggcagatgaatacgcagatccagaccgctgttcagttcattcataaactgacggcagtgaccacaaggcgtgtagttaacggtgatggctgcaagcgctttttcaccactcaaccaggcgtggctgatcgcgctttgttcggcatgaacggtttgctgcattgtcgcaccaataaattccatattggcaccgaaataccaggttccgctcacaccgcgcgcaattgcgccaacattaaaattcgacaatggcgtacgcgcacaggccgccgccagcggaagtacggggaagtacttgtctgccagaataggttccagtgcagattgcaagtatccgcaagttggcaaaacaatgccgcgcgcaagctggcagcctaccccggaacgctgccgattaatctcgcgcagttaaaatcggtacgtcgcatccgtgaatttgacgatctcatcaccgccagaattcacggctacgccgacgctatcgactattatcgtcagtgtagcgccatgccgatgctgaaccggatcgccaaaccgacgctgattattcacgccaaagacgatccgtttatggatcatcaggtgatcccgaaaccggaaagtctccccccgcaggtggagtatcaactgactgaacatggcggtcatgttggctttattggcggtacattacttcatccgcaaatgtggctggagtcacgcattcctgactggttaacaacgtatctggaggcgaaatcatgttga

SEQ ID NO: 130088 - DNA, 1568 bp, Homo sapiens; identical to SEQ ID NO: 130074

SEQ ID NO: 130089 - DNA, 921 bp, Homo sapiens
tcatacccggcgcttaaactgccctgcatcaatgccatgttgcttcattttccgccacagcgtagtgcggccgatcccaagtaaagccgacatttcctgaatgcgaccgcctgtgacctgggctgcgttaataattgcctctttttcaacttccgcaaatgacagactggtggaaaggcgggtggcgctgacatcatctgtcgcctgctcggtaaacagatgttccggcaaatcactgacgcgaatgcgcccgttatcactactcagagcaagattctcgatgacgctgtaaagttcaaaatcgttgcgcgaaggcgggatggtaatttcaaatgcaggcggggggaaataaagctggcgaactaaaacaatttttgttccaccacctcgcatcatggtcagcaccatcataccgatcaccgatgtggggaacagaatgtttgccatcgggatgccatttgccagactctttttcgaaccacaaaagacgatagtaatttcatctgccttattgaagctcagtcggcgtgccataaagacgttaactacaatcacgatagccagaagaacgcagctgaccaccacgataaacagcaatgatccccagccaactttatgccagataccattaacgacggcttcgctgaacgctgtataaaccaccaacagaatggacgtctggtcagttttcgcaatccattttttattgcgcgacacccagtcaccaatccacggccgggaaagatgccccaacacaaacggcagcagcagttgcagcataattttaccgacctgctcaaggctgccccctgcaccgtgaacattcatcaccagaccaaccagcaatggtgaaaggaaaatccccagcaggctggatgccgacgcaaaaaaaaccgctgccgcgacgttaccgcccgccat

SEQ ID NO: 130090 - DNA, 1067 bp, Homo sapiens
atgcatcaacgacctcggactcgcaatgctgtggaacaacatcgttttagtcgccagctgtattacgcgctgcatgcatttgaaattaccatcccgcctctgcgtatgcggcgtggcagcattccggcgctggtgaataacaaattacgcagtcttgaaaaacgcttctctacgcggctgaaaattgatgacgatgccctcgctcgcctggtttcttgtgcatggccaggcaacgattttgaactttacagcgtcatcgagaatcttgctctgagtagtgataacgggcgcattcgcgtcagtgatttgccggaacatctgtttaccgagcaggcgacagatgatgtcagcgccacccgcctttccaccagtctgtcatttgcggaagttgaaaaagaggcaattattaacgcagcccaggtcacaggcgcgtttccgtggtggctgggtgatgtaaaactgacgattccgctaacgctggggatggtggcagcggcgctgaccgatctcgatgaccgactggcgggacgtttgcgtaacctcatcattacgctgttctgcttttttatcgcctcggcctcagtagaattgctgtttccctggccctggctatttgcgattggcttaacgctctctaccagcggcttcattttgctcggcggtctgggtcaacgctatgcaacaattggccttcggtgccattgttgaacgccatttacactatgttgggaacatcactgtatgagcactggtatcagcagccgatgtatctgctggccggtgccgtctggtacaacgtcctgacacttattggtcatctgctgttcccggtccgcccgctgcaggacaacctggcgcgttgctatgaacaactggcgcgttatcttgagctcaagtcgcgcatgtttgatcctgatattgaagatcaaagccaggcaccgctgtacgatttggctctcgccaacggtctgctgatggcgacattgaatcagacgaaactctcgctgctgacccgcttacgtggcgatcgtggtcaacggggaacgcgtcgcacggggatcctctag

SEQ ID NO: 130091 - DNA, 954 bp, Homo sapiens; identical to SEQ ID NO: 127877

SEQ ID NO: 130092 - DNA, 775 bp, Homo sapiens
atgacgcaacaaatcaccctcattaaagacaaaattctctccgataactatttcaccctgcacaacattacttacgatctcacgcgcaaagacggcgaagttatccgccataaacgtgaagtgtacgatcgcggcaatggtgcgacgatcctcctgtacaacacgaagaaaaagaccgtggttctgattcgtcagttccgtgtcgctacctgggttaatggcaatgaaagcgggcagctgattgaaagctgcgccgggctgctggataacgacgaaccggaagtgtgtattcgcaaagaagcgattgaagagacgggctatgaagtgggtgaagtgcgcaaattatttgaactgtatatgtcgccaggcggtgtgactgagctaatccacttttttatcgccgaatacagtgacaatcagcgcgctaacgcccgtggcggtgtcgaagatgaagatattgaagtgctcgagctggtccagtgcggcgggcagatcggtgtaccagataccgtgcttgctgttttcgccaccggtattggttttttggctatgtccgtgaccaaaccccggattaacgcgcagccatacccgatgccctggcgaaacctggcccagttggtcgagcatatcaacagaacccgcattcaccggaatttgcaattcactgacgcgttcaagcgtcgcctgatcgataacatctgccgtaaaaacaatatcatcgggacccacaccgggcagtcgaaattcagcgggcaaacgcaacagattttcggcg

SEQ ID NO: 130093 - DNA, 1050 bp, Homo sapiens; identical to SEQ ID NO: 123333

SEQ ID NO: 130094 - DNA, 425 bp, Homo sapiens
gagttttgtgtctatattctttgctgatgtatctgggtaccgagctcaaggttgtttcaatttagtcagttccgtgtcgctacttgggttaaaggcaataaaccgggcagctgaattgaaagctgcccccgggctgctggaaaacgacgaactcggaaccggtgtgactgagctaatccacttttttatcgccgaatacagtgacaatcagcgcgctaacgccggtggcggtgtcgaagatgaagatattgaagtgctcgagctgccgttcagccaggcgctggagatgatcaaaaccggcgagatacgtgacgacaacgcctctgacaaggacctggccgacctggtcttggagatggaggtgatgaatctgatcggccgacacaagaacatcatcaacctgcttggtgtttgcacccaggaag

SEQ ID NO: 130095 - DNA, 1054 bp, Homo sapiens
gattgaggtttaaaccgctcccgatgcgaggcggatcgaaaaattcaatattcatcacacttttcatgaaaattctgtacccgttttcacgcgctatctgctaaaaatgttgccgatgtgaagtaaacatggatgtagtacgcctgacgtgccaggcgaggagtgagtgtgaaagcgaagaagcaggaaactgccgcgaccatgaaagacgttgccctcaaggcaaaagtctctacagcgaccgtctcccgagcattaatgaatcccgataaagtctcccaggccacccgtaatcgggttgaaaaagcggcccgggaagtgggttatttcccgcagcctatggggcgcaacgtcaagcgtaatgaatcccgcaccattctggtgattgtcccggatatctgcgatcccttctttagcgaaattattcgcggtatcgaagttacggcggcaaatcacggatatctggtgctgattggcgactgtgcgcttcaaattcagcaggaaaaaccctttatcgatttgatcatcaccaagcaaattgatggcatgttgttgctgggttcaaggctgccgtttgatgccagcattgaggaacagcgtaatctgccgccgatggtgatggcgaacgaatttgcaccggagctggagctgcctacagttcatatcgacaatctgaccgccgcatttgatgcagtaaattatttatatgagcaagggcataaacggattggctgtatagccggtcccgaagaaatgacagctgtgtcactaccgcctgcaaggctatgttcaggcgctgcgtcgctgcggcattatgttctgccgtttcaccgcggaaggcgttcaagagatcgactataaagatatcgctacgctgaaaaactacatcaccgaaagcggcggtgtgactgagctaatccacttttttatcgccgaatacagtgacaatcagcgcgctaacgccggtggcggtgtcgaagatgaagatattgaagtgctcgagtcactacgccttaatgaaaatcatgccatcaaggaacgttgcaggagttga

SEQ ID NO: 130096 - DNA, 741 bp, Homo sapiens
cgattatgttcccgctgctgatggtcgtcgctatctcgctgcgtcagggaaactttgcgaccggcagcctgatcccggagcaaatctcctgggatcactggaaactggcgttaggttttagcgttgaacaggctgatggtcgcattacgccaccgccattcccggtactgctgtggctgtggaactcggtaaaggtcgccgggatttccgcgattggcattgtggcgctctccaccacctgcgcttacgctttcgcccgtatgcgctttccaggcaaagcgacgctgctgaaaggaatgctgattttccagatgttcccggcagtactttcactggtcgcgttgtatgcgttgtttgatcgtctgggtgagtacactccattcattggcatgaatactcccggcggcgtaatttcaagttcaaaggatcaaacaaggggagccttgatgggccagaatcctggaaggaggcagggatgggaaactttagcagattccactagaacagaaaaaatggtgaggttgggattctcgcaagagcaggcttttgtcactttgggtgcttttgctgcgctggtctatggcctcatttccattggcggctatgtcggcgaccacctgctggggaccaaacgcaccattgttcttggagcacttgtgctggcgattggctacttcatgaccggcatgtcgctacttaagcctgacctgattttcatcgccctggggactatcgctgtcg

SEQ ID NO: 130097 - DNA, 1656 bp, Homo sapiens
ttacgatctccgtccaagcgcatgggtgactccgaaaggggagtggggtaaaggcagcgttgagctggtgggaaatccaaccaacgactcgtatgcctgcaggtccaccagccggtcagccatcagcccggaacagctaatcagcgttgatgcttcatattcgtcgccctgacgggtacgtatcaccacgccgtttttatgctcattaagcccgctgacttcggcgttatagataatttcaccgcctctggactggaagatttttgccatcgccgccgtcacgtcgcggtactgacaatgccgctggacgcacaaaaatgccgccgagcccggtgatattcggttcgcgctcgcgcagttcgtcggcgttaagcattcgcgctcgataccgttcgccgctgtgcgttcccataaggcgcgcatccgttccatttcgagatcggacgtggcaaccagcatcttgccgcagttgtcgtagcgaatgccgttttgatcgcaaaaggctttggtggcgcggtttcccgccaggcaaaactgcgccttcaggctgccgggcgtgtaatagaccccggcatggatcacgccgctgttgtggcccgtctggtgacaggccggggcggaatcgtttggttcggcagagacttttatcggagtgttgatgatattcactttggtgcctggggtgacctggctaaagagtgttttgatatcgtcatcccgcagacgaatacagccagaacttacccgcatgccaatgccgaaatcggcgttcgtaccatgaagcaaataaacgccgccataggccgccagacgaatcgcatgatggcccattgggttatccggtccagccggcactaccgcaggcaactcaattccctgtgctttataacgggcgcggatgtttgccgttggtttccacagcacatagtgccgggccgcgatagcgtggcgcatgtcgtagtccagcacgttattacgtaccgcctgctgcgcggcctgctgcactttgcgggtgatggtggtgtaaatgcgataaccgtcttcataggcactttcgccataacggttatacatctcctggcgcaccatttcgctcaggtacggcgcagagaaagcaatctccggcgcgtgatagttagcgttaatcgcctcagtgcgtgtctgatcgaactgttgttgggtgatatacccttcatccagcatccgcgacagcacgacgttacgccgcgcgacggcacgatccatcgagtagagcgggttgaaggtggaaggcgctttcggcagcccggctatcaccgccatttcgttcagcgtcagttggtcgaccgtttttccgaaatagacttgtgccgcagcaccgacaccataggcgcggtaaccaaggtaaatcttgttcagataaagctcgaggatctcgtctttcgtcagcagctgttcaatgcgaatcgcgaggaagacttccttaatcttacgcatcagcgtgcgttctggactgaggaagaagtttctcgccagctgctgggtaatggtacttgccccttgtgacgcgtgaccggagaacagcgccacgcttgctgcacggaagatccccaccgggtcaacgccgtgatgctcgtagaagcggctgtcttctgtcgcgataaaggctttcaccat

SEQ ID NO: 130098 - DNA, 1062 bp, Homo sapiens
atggcaagacaagttattggaggaagaggggagaaaaggcatgatggatctacattatccccggtccaaccgaaatcgcaaaaagctcgtttatttattactcacctgctactgctactttttatcgcagcgattatgttcccgctgctgatggtcgtcgctatctcgctgcgtcagggaaactttgcgaccggcagcctgatcccggagcaaatctcctgggatcactggaaactggcgttaggttttagcgttgaacaggctgatggtcgcattacgccaccgccattcccggtactgctgtggctgtggaactcggtaaaggtcgccgggatttccgcgattggcattgtggcgctctccaccacctgcgcctacgctttcgcccgtatgcgctttccaggcaaagcgacgctgctgaaaggaatgctgattttccagatgttcccggcagtactttcactggtcgcgttgtatgcgttgtttgatcgtctgggtgagtacattccattcattggcctgaatactcacggcggcgtaattttcgcgtatctgggtgggattgcgctgcatgtctggaccatcaaaggctatttcgaaaccatcgacagttcgctggaagaagctgctgcgctggatgcgagaacaaaacataacatcaaacgaatcgaccgattgttaggtaatcgtcacctccacaaagagcgactcgctgtataccgttggcatgctagctttatctgttcgggcaatacgatgcccattgtacttgttgactggtctgatattcgtgagcaaaaacgacttatggtattgcgagcttcagtcgcactacacggtcgttctgttactctttatgagaaagcgttcccgctttcagagcaatgttcaaagaaagctcatgaccaatttctagccgaccttgcgagcattctaccgagtaacaccacaccgctcattgtcagtgatgctggctttaaagtgccatggtataaatccgttgagaagctgggttggtactggttaagtcgagtcatagaaaagtacaatatgcagacctag

SEQ ID NO: 130099 - DNA, 705 bp, Homo sapiens
atggctctagaagcatttgaaaatggtgaaaaagtagaagcttcccaagtaactgggactacagaatggatctggcgtccgttgaataacccgaaacatttagcggtcagcagcttctccatggaaaacccgcaaggctttggtctgttgcagcgcggtcgtgatttctcccgctttgaagatctcgatgatcgttacgatctccgtccaagcgcatgggtgactccgaaaggggagtggggtaaaggcagcgttgagctggtggaaattccaaccaacgatgaaaccaacgataacatcgtcgcttactggacgccggatcagctgccggagccgggtaaagagatgaactttaaatacaccatcaccttcagccgtgatgaagacaaactgcatgcgccagataacgcatgggtgcaacaaacgcgtcgttcaacgggggatgtgaagcagtcgaacctgattcgccagcctgacggtactatcgcctttgtggtcgattttaccggcgcagagatgaaaaaactgccagaggataccccggtcacagcgcaaaccagcattggtgataatgggaataggagacctgaagagggggagacaggagaactgccagttagtggagcagtcagaacacaaacgtttctctattactttgctatcttatatgggcacggtttgtggagtcccaaatcaattacaatg

SEQ ID NO: 130100 - DNA, 2376 bp, Homo sapiens
atgaagtaccgcgatgagaaacgtttatggtgtaaaacacagcagagcataaggcacaaaagaaggagatgcaaacatccccatgccttaaaggtagacatactagaggatccccgccctgttctatccggatatagtcaatatacgaacggtgcctgcgtttgcggtgtttcacgcacccatttttgcaccagcgtcgcaatcagcaacaccatcaccagcccggccaccagacgaatcgccgcaaaaccccagccgaggacaaagcccataaacaccagcgtcgccgggtttaacaccggattgcccatccagaatgccagcgcaccgcccatcgacacctgttggcgacgcattcccgccgcgaccggagccgcacagcaggtacacatcatgcccggcaacgaaaacagcgttcccagcagcgtgccgcgaaagcgcgattgcccaagcgtacgcaacaaccagtcacgcgggatcagcaccctgaatcaacgaaccgaggatcacccccagcaccgccgctttccataccgcgaggaaatagatcatcgcgtaatccaacgccgcctgcccatggggaccggcaagggttgtcccgggttccctgcccaccccgggggccgtatcccgcggggcaggctcatcctttgggttacccggttcccggtaattgccccgcagctccgtgatactcttcggcccggttgcgtgattattgccgtcatcgttgtactgctttttggcaccaaaaagctcggctccatcggttccgatcttgcgggctggattcgcgcgttgcgttcactggcgacaacggtgcagaacgaactgacccaggagttaaaactccaggagtttcaggacagtctgaaaaaggttgaaaaggcgagcctcactaacctgacgcccgaactgaaagcgtcgatggatgaactacgccaggccgcggagtcgatgaagcgttcctacgttgcaaacgatcctgaaaaggcgagcgatgaagcgcacaccatccataacccggtggtgaaagataatgaagctgcgcatgagggccccgcctggttcagcgatccgaccaccgcccgcacgatgctaattatcgtcaatacctggctgggttatccgtacatgatgatcctctgcatgggcttgctgaaagcgattccggacgatttgtatgaagcctcagcaatggatggcgcaggtccgttccagaacttctttaagattacgctgccgctgctgattaaaccgctgacgccgctgatgatcgccagcttcgcctttaactttaacaacttcgtgctgattcaactgttaaccaacggcggcccggatcgtcttggcacgaccacgccagccggttataccgacctgcttgttaactacacctaccgcatcgcttttgaaggcggcgggggtcaggacttcggtctggcggcagcaattgccacgctgatcttcctgctgaggatcccccgacgcaccacggcgctacaaggcatgcgcagcaacctgaatatggaatcttcccgctgggcgcgggccaatcgacgtttaaaagcgatcaatacgctatcgctgacgctgattacccaatcctgcgaaacttatcttattcagaatacgcgcccggaattgatcactgatactttccgcgaattttttgacacgccggtagaaaccgcgcaggacgtccacaagcagctcaaacgcctgcggagagttatcgcctggaccggggaacgggaaacgcctgtcaccatttatagctgggtcgcggcggcaacgcgttatcagcttctcaagcgcggcgttatcagtaacacaaaaatcaacgccaccgaagaagagatcctgcaaggcgaaccggaagtaaaagtagagtcagccgaacgtcatcatgcaatggttaacttctggcgaaccacactttcctgcattctgggcacgcttttctggctgtggacgggctggacttccggcagtggtgcaatggtgatgattgcggtagtgacgtcactggcaatgcgtttgccgaatccacgcatggtggcgatcgactttatctacgggacgctggccgcgctgccatatggaggtggccggccagttgctgtcggtgtcttctacggggggtgctattgtacgagagatggtctaaccagagcccccccacccaacgcggcccccaccgcggcccggtatggccctcggaccacgcccagaacgctccgcaagggaataaccgatgtacgctgcgagaaaagacaccatcagcgtcaagcccgcaacgccggatatcaaacagttttttcagatttggatcggctacggcatccggcactgcgcctttgccatacaacatga

SEQ ID NO: 130101 - DNA, 2581 bp, Homo sapiens
atggtgttgatggggctggcacaaaatatctggcagtttttgatcctgcgggcgcttcttgggttacttggcggatttgtccccaacgctaatgctcttatcgccacacaagtaccgcgtaataaaagcggctgggcgctgggtacgctctccacaggcggcgttagtggtgcgttgctcggcccaatggctggcggcctgctcgccgatagctacggcttacgtccggtattctttattaccgccagtgtgctcatactctgctttttcgtcaccctgttttgcatcagagaaaaattccagccggtcagcaaaaaagagatgctgcacatgcgggaagtggtgacatcacttaaaaacccgaaactggtactcagcctgtttgtcactacgttaatcatccaggtggcgacgggctcaattgcccccattctgacgctgtatgtccgcgaactggcgggtaacgtcagtaacgtcgcctttatcagtggcatgatcgcctcggtgccaggcgtggcggctctgctaagtgcaccacgactcggcaaacttggcgatcgaatcggaccccgaaagatcctgattacagcgctgatcttttctgtactggctgtgatcccaatacgccattttgagatgcgctctaaagaatctcgtcccagcgcatgggtgactccgaaaggggagtggggtaaaggcagcgttgagctggtggaaattccaaccaacgatgaaaccaacgataacatcgtcgcttactggacgccggatcagctgccggagccgggtaaagagatgaactttaaatacaccatcaccttcagccgtgatgaagacaaactgcatgcgccagataacgcatgggtgcaacaaacgcgtcgttcaacgggggatgtgaagcagtcgaacctgattcgccagcctgacggtactatcgcctttgtggtcgattttaccggcgcagagatgaaaaaactgccagaggataccccggtcacagcgcaaaccagcattggtgataatggtgagatagttgaaagcacggtgcgctataacccggttaccaaaggctggcgtctggtgatgcgtgtgaaagtgaaagatgccaagaaaaccactgaaatgcgtgctgcgctgcgcgtctggaacaagcctggccagaatcaccagcatctgggcaacggcttctacggtcaggtctacggtggttatctcgaaaccatgtttggcggtgcgggggcagaagtgttgtatcgcccgctggacagcaactgggcgtttggtctggatgccaactacgttaaacagcgcgactggcgtagtgcaaaagatatgatgaaattcaccgactacagcgtgaaaaccggacatctgaccgcctactggacgccatctttcgctcaggatgtgttagttaaagccagcgtcgggcagtatctggcaggggataaaggcggcacgctggagatcgccaaacgctttgatagcggcgtggtggtgggtggctatgccacgatcactaatgtttcgaaagaggagtacggcgaaggggacttcaccaaaggcgtgtatgtctcggtaccgttggatctcttctcgtctggcccgacacgcagccgtgcggcgattggctggacgccgctgacgcgtgacggtggtcagcaacttgggcccggttataccgacctgcttgttaactacacctaccgcatcgcttttgaaggcggcgggggtcaggacttcggtctggcggcagcaattgccacgctgatcttcctgctggtggcgattatgttcccgctgctgatggtcgtcgctatctcgctgcgtcagggaaactttgcgaccggcagcctgatcccggagcaaatctcctgggatcactggaaactggcgttaggttttagcgttgaacaggctgatggtcgcattacgccaccgccattcccggtactgctgtggctgtggaactcggtaaaggtcgccgggatttccgcgattggcattgtggcgctctccaccacctgcgcctacgctttcgcccgtatgcgctttccaggcaaagcgacgctgctgaaaggaatgctgattttccagatgttcccggcagtactttcactggtcgcgttgtatgcgttgtttgatcgtctgggtgagtacattccattcattggcctgaatactcacggcggcgtaattttcgcgtatctgggtgggattgcgctgcatgtctggaccatcaaaggctatttcgaaaccatcgacagttcgctggaagaagctgctgcgctggatggtgcgaacaccgtggcatgccttccgccttgtcctgttgccgctgtcagtaccgattctggcggtggtattcatcctgtcgtttatcgctgccattactgaagttccggtcgcgtcgctgttactgcgtgacgtaaacagctacaccctggccgtggggatgcagcaatacctcaacccgcaaaactacctgtggggtgactatgccgccgctgccgtgatgtctgcattaccgatcaccatcgtcttcttgctggctcaaacgctggctggtcaacggccctga

SEQ ID NO: 130102 - DNA, 768 bp, Homo sapiens
atgacgcaggaaaacgagatcaaacgtcccatccaggatctggagcacgagccgattaagccgttggataatagcgagaaaggcagcaaagttagccaggcgctggaaaccgtcaccaccactgccgaaaaagtccaacgccaaccggttattgcgcacctgattcgcgcgacagaacgctttaacgatcggctgggtaaccagtttggtgcggctatcacctatttctcatttttgtcgatgataccaattttgatggtgtcgtttgccgcagggggctttgtgctggcctcccatccgatgttgctacaggatatcttcgacaaaattctgcaaaacatcagcgatccgacgctagccgccacgttgaaaaacaccatcaacaccgccgttcagcagcgtacgactgtagggcttgtcggcctggcggtggcactttattccggcatcaactggatgggtaacctgcgtgaagcgattcgtgcccagtcgcgcgatgtctgggaacgctcgccgcaagatcaggagaagttctgggactttggtatcgaggcgggcgtggaaggtcagctcagcccaacctcttcacaaaacaacccgaaagagacgcacaacctgatggtgggcggcacagcggacaacggttttggcatgtcgactctagcaggatcccctgttgttcaggctggtcttagaactcctgaccttgtgactcgccctgtgcttaaggcaatacatatgtttgtgaataagcttgatttgggctag

SEQ ID NO: 130103 - DNA, 2058 bp, Homo sapiens
atgaacaggaagaagaaggaggaggaggaagaagaaggaggaggaggaggaagaagaaggaggaggaagaaggaggagcagacgctggagcagggttttaatatcgcccgtaacgcggcgctgctggcagaagtaccacactctgtcccggcggttaccgttaatcgcttgtgtggttcatccatgcaggcactgcatgacgcagcacgaatgatcatgactggcgatgcgcaggcatgtctggttggcggcgtggagcatatgggccatgtgccgatgagtcacggcgtcgattttcaccccggcctgagccgcaatgtcgccaaagcggcgggcatgatgggcttaacggcagaaatgctggcgcgtatgcacggtatcagccgtgaaatgcaggatgcctttgccgcgcggtcacacgcccgcgcctgggccgccacgcagtcggccgcatttaaaaatgaaatcatcccgaccggtggtcacgatgccgacggcgtcctgaagcagtttaattacgacgaagtgattcgcccggaaaccaccgtggaagccctcgccacgctgcgtccggcgtttgatccagtaaacggtatgatgctgccacattgccagcttagcagcatgaggatctttgcgaatcagcgccttgaggatttgatcgtggtcatcacaccagttatcgacggtacgggaatcaatgtgttcgtgcagttttttccagtacgggttatgactacgctgggtccacattttttccacgatagccgccagggcggagttctgcgtcgccagagcgacctgaatgtggaactgcaaatcccactcggaatcacggaagcattgttcgccgcgcgcctgttcctgaatggccatcagtttcatgatgtcctgtttcgttacctgagttgccgcgaattcggcaatattactttcgatgagctggcgagcctgaagcaactcaaacggaccgtaattggcgaattccatattattgtcagccgcctgctgatggcgcggctgcatgatgatggcttcacgaactaccgtacggctgacgttcttttcatcggcaataaagcgttctgcaggcagtttatcacccaccagatagacgccctgttcgatgcgctctttcaggtccagataccagggacctaccagtcgacactgccagaatgcgacaacggcttagcgatggttcaacatttccggaaacaggcaaaaaggtttgtccaccctggggatccccccgctggtgcacggtttatgcgcgacaagctgcgcctgaccgccgtggtagccaatgaactggagatcatggacggtaaatttaccggcaatgtgatcggcgacatcgtagacgcgcagtacaaagcgaaaactctgactcgcctcgcgcaggagtatgaaatcccgctggcgcagaccgtggcgattggcgatggagccaatgacctgccgatgatcaaagcggcagggctggggattgcctaccatgccaagccaaaagtgaatgaaaaggcggaagtcaccatccgtcacgctgacctgatgggggggcagtgcagtgcctgtcatgcctggaacaccatcaccgaggtgcgtcttgctgcgtcgccaatggtggcgcgtaacgagcgtctcagcggctatgccggtagcgccggggtggcaaaagtccagaaactctccgatatcagccttgaagagctgccgcgtttttccaccggatttaaagagttcgaccgcgtactaggcggcggcgtggtgccaggaagtgccattctgattggcggtaaccctggtgcggggaaatccacgctgctactgcaaacgctgtgcaaactggcccagcagatgaatacgctgtatgtcaccggcgaagagtcgctgcaacaatggggctacgtcggtgctaaatcacgtcagcgctggctgttttacgcgtatgacaggatacggaggacggttgtggcgcacgtcttcggtgaacgcactctggccacactggagcgtcttctgagcctgctgtcggcctttgaggtcgtggtatag

SEQ ID NO: 130104 - DNA, 1857 bp, Homo sapiens
atgaccttgtcatgcaactccaccgattttgagaagacagtaacttccgtcccagccttgccagatgttgtctcagattcagatatgtcgctcaatgcgctgagtgtaacgcttgctgataacgtgcagctttccttcaggcgtgattcatacagcggccagccatccgtcatctataccacacctcaaaggccgacagcaggctcagaagacgctccagtgtggccagaggcgttcaccgaagacgtgcgccacaaccgtcctccgtatcctgtcataccgagggctacccgacccgcatgtctggcccgtgaaagaatggcaatgtacatgaggccacagataaagaccattggaaaggctccggccgaagaggcgttgagtaaccccaggatgcaaggaccgcaactttcatctgcatccaccatcccagtcacgccattccactggttatttggcagccatgctgcaggtcattttagccagcatgcgcaccgaacagcgctcactgggcatttttcccatttggcaacaacattaaaaggccttgccttggaaggcaacgcaatcttcacaataactcggttcaccaggccatacggccacaagaacaccacaccacactctccgctgtgttctgctcctcattcccccatattcaattctcgtcgcaaagtgtatggccagcacgggccccaatggtgggcctttattcatagtcaccgcccaggggggtcatcacattccagcatcctgcattgctttgccctggtttgccccggattggttgtgcaacgggacacaccacatccaatcatccgacctgcattgtgccctcccattgcaatagccttctccctgtcactctggttgggaaatcccagcttcccatccggcacacagcatctccagggccccaaaacctttcaacagcaagcatcaccctcctcaaaagtttgtcccaaacgtctgatctgcacggtcattccccagcaacgggttgcatcacatcaccattttcacggccacaaccggtattaccaattgggacttccggtccaacattgcacgctgcaaggtgtcatcagggcaactcattttatcccccgcacagcgcgaaatcaaatttcccacgtctcgtggggcgcaggtccagcacacagtgattcccaaggaaaacaggatctggagacgagccgattaagccgttggataatagcgagaaagccagcaaagttagcaggcgctggaaaccgtcaccaccactgccgaaaaagtccaacgccaacggttattgcgcacctgattcgcgcgacagaacgctttaacgatcggctggtaaccagtttgggggctttgtgctggcctccctccgatgttgctacaggatatcttcgacaaaattctgcaaaacatcagcatccgacgctagccgccacgttgaaaaacaccatcaacaccgccgttcacagccatttggttccggctggggctgatggcatttttctacttcttcgcccgtttgacgctgtttgcgcggcgtggattgccaccgccgaatataaagactaccccggaatgccgggaaaaacgcaccttaaaatacgcctgatgcggcgtgaacgccttattggcatacgattttattcgggcctgctccccggtactaaggcgccctattcgcgcacactggcctttaagcgagtcctacataccgcactttcacttcatcttggtcttggaaaaacctgtacaactggatttgaactatgctccttaaccttattggaatacgcttcaaatgcctttacatattggcctgattggcacataaacagaattaaaaacaaaaattag

SEQ ID NO: 130105 - DNA, 725 bp, Homo sapiens
gcgcgattgcaaagaacctttcaaagactccggcgttttatctggagcgggacggggatggtcgtctttttttagccagatgtcagtgtccacatagacaattactttccggcgtgtccagggagggcgagttatttttatttgcgaaagggaccgaaaaggtccggaattgggtcaatttccctccatccaggaagggtttgtaccagaatcccataatggtggtgtgtgtgttcttatctggttaagagaaagtgaaaaaaacacagcgaaaagaaatcgaaaatgtgaccaatatcacaggtgttcgtcaaattgagttatggcggcgtgatgatttacaacacccacggttagatgaggtcgcggaagaagttcccgttgcgctggtctacaacggcatttcgcatgtggtgatgatggcgtcgcccaaagaccttgagtactttgcgctcggtttttcgctttccgagggcgatttatcgaaagtccgcgcgatatcttcggcatggatgtcggtgttccctgtgcctgtaatggtcttgaagagcgccgccgggcgctggacggggtaccgtagcgggctgtggcgtatgcggcgtggagcaacgttgaatgacatcggaaaaccggtgcagccgctagccgttcacccagacgttgatctcaacaaactggatgatgcattacgtcatctcaacgattttcagccagtgggcaactga

SEQ ID NO: 130106 - DNA, 408 bp, Homo sapiens
ccagatgggaattggctagctgcatcaggtaccagtgctggagtccatgtctacaacgtaaaacagctaaaggtatttgagtacagcatcccagacaaacagtatacagattggagccggactgtccagaagcagggctttcaccacctttggctccaaagggatactcctatcacacacatcagttttcatcccaagagaccgatgcacatccttctccatgatgcctacatgttctgcatcattgacaagtcattgccccttccaaatgacatcattgctcagctcccaccacccattaaaaagaagaaatttggaacctaaaacagggcactgtctgtgtccttccttgaactgtctaccctgttgcttttcacaaatcatggtaataaaacaagttattcttga

SEQ ID NO: 130107 - DNA, 905 bp, Homo sapiens
cttgattcctgatattgtcaggggccttttaacattatctgtagctgtatctccccatgtggaagatggatagcctattctacaggttctcggttttttctctatcggctgaattatgaacatgacaacatacgcctcaaaagggtttccaaaatgccatcattccttcgctctgcccttcagattttgatttctgaaaattcaacaaagctctttgtagcatcaaatcaaggagctctgcatattgatcagctgtcaggaggaagcttcaagcacctgcatgctttccagcctcagtcaggaacagtggaggccatgtgtcttttggcagtcagtccagatgggaattggctagctgcatcaggtaccagtgctggagtccatgtctacaacgtaaaacagctaaagcttcactgcacggtgcctgcttacaatttcccaagtgactgctatggctattgcccccaattacccaacaacctggtcatcgctcatttgggaccagccaggtattttgagtacagcatcccagacaaaaccagtatacagattgggagccggactgtcccagaagcagggcttttcaccacctttggctccaaagggatactcctatcacacacatcagttttcatcccatgagaccgatgcacatccttctccatgatgcctacatgttctgcatcatttgacaagtcattgccccttccaaatgacaaaaccttactctacaatccatttcctcccacgaatgacatcattgctcagctcccaccacccattaaaaagaagaaatttggaacctaaaacagggcactgtctgtgtccttccttgaactgtctaccctgttgcttttcacaaatcatggtaataaaacaagttattcttgaaaaaaaaaaaaaaa

SEQ ID NO: 130108 - DNA, 1057 bp, Homo sapiens
gagatggctgcactccagcccgagtgacagagctagactccatctcaaaaaaaaaaaaacaaaaaacagaaaaaaaaccatttggtaggaaaggagtttgaaacaattaaagtatatattttagtggcagatgctgccgtcattctctattcctgtagtaagcagtgtcttaggcctgaggaagtaataacttctgttttatctctctggaccttctttacaggcgggatggttaaataagtagatgaaaaaagtagaaacattaacatctagaagtaatttgcacagtgatcagcaaattatcctggcagtgatttaaaactctaatggtctccttggcttttgccatcatctccagggcaggtctggctgtggacactgtgtgaattcagagatgtaactgttttgtcctcacaggaacagtggaggccatgtgtcttttggcagtcagtccagatgggaattggctagctgcatcaggtaccagtgctggagtccatgtctacaacgtaaaacagctaaaggtatttgagtacagcatcccagacaaacagtatacagattggagccggactgtccagaagcagggctttcaccaccttgggccccaaggggatacccctatcaacacaacatcaggttttcatccccaagagaccgatgcacatccttctccatggatgcctacatgttctgcatcatttgacaagtcattgcccccttcccaaatgacaaaaaccttactcctacaatcccatttccctccccacgaatgaatcagatgtcatccggatgcgcacatttcatgcttttaaaatttctaagagatataagcgcgtctactcttcatggatcttttggatgaaagaacactcgtggcagtagaacggcctttggatgacatcattgctcagctcccaccacccattaaaaagaagaaatttggaacctaaaacagggcactgtctgtgtccttccttgaactgtctaccctgttgcttttcacaaatcatggtaataaaacaagttattcttgaaaaaaaaaaaaaaacaaaaa

SEQ ID NO: 130109 - DNA, 1011 bp, Homo sapiens
atgcgccgcacgggatcgctgaacattgcgcgtaaaacaccgatcgtaatgggcatgttgctgtcgatggtgatggtgttctgcaactacgtcaacgttgagtggatgatcatcggctttatggcgctggccttcttcggtaagggcatcggggcgctgggttgggcagtaatggcagataccgcgccaaaagagatcagcggtctttccggtggcctgttcaacatgttcggtaacatttctggcatcgtcacgccaatcgcaattggttatatcgttggcacgactggctcgtttaatggggcgctgatttatgttggtgttcatgccttaatcgcggtactgagctacctggtgctggtgggcgatatcaagcgtatcgagttgaaaccttgttctactggcggagatgtgattcatcgaagctgggggaggcttgttttgattgacctgcgctctaaagctgataaagccatttggttaggctggagtctgggcgggctggtggcaagccagattgcgttaacccatcccgagcgtgttcaggcgctggtcaccgtggcgtcgtcaccttgttttagtgctcgtgacgagtggccggggataaaaccggacgtgctggcgggatttcagcagcaactcagtgatgattttcagcgtacagtggagcggttcctggcgttacaaaccatggggactgaaacggcgcgccaggatgcgcgggcgttgaagaaaaccgttctggcgttaccgatgccggaggttgacgtgcttaatggcgggctggaaatcctgaaaacggtcgatctccgtcagccgctgcaaaacgtgtccatgccgtttttgcgattgtatggctatctcgacggtctggtgccgcgcaaagtggtgccgatgctggataaactttggcctcacagcgaatcatatatcttcgccaaagcggcccatgcgccatttatttcgcatccggccgagttttgtcacctgctggtggcgttgaagcagaag

SEQ ID NO: 130110 - DNA, 631 bp, Homo sapiens
agcggtctttccggtggcttgttcaacatgttcggtaacatttctggcatcgtcacgccaatcgcaattggttatatcgttggcacgactggctcgtttaatggggcgctgatttatgttggggttcatgccttaatcgcggtactgagctacctggtgctggtgggcgatatcaagcgtatcgagttgaaacctgttgcggggcaataagatggcgacacaatccagtcctgttattactgatatgaaagtcattccggtggccgggcatgacagcatgttgcttaatattgggggggcacataacgcatatttcacccgcaatattgtggtactcaccgataacgccgggcataccggcattggtgaaacgccgggcggagatgtgatttatcagacgcttgtcgatgcctattcccatggttctgggccaggaagttgcgcgactgaataaaatggtcccgcaggtgcataaaggtaatcaggccgccgattttgataccttcggtaaaggtgcctggacctttgaattacgcgttgaggccggggcggggcttgaagcccgtttgcttgacctgctaggtaaggcgctgaatgtttcgggctgcgaactgttagggcatggcagccc

SEQ ID NO: 130111 - DNA, 1120 bp, Homo sapiens
cggtgcgcgtcaacagcagaaattcgtcctgatcgcgggcggttttccatagcaactgttgtaaacgaatgcggttatcggcagggaattcaggaatgttcaggagtgtatcgggctgcataccgctggcttcgctaatgcagtaaccaaacatttcggtaaatgcgcgattgcactgcacaatatggcgttccggatcgaggacaatcaccggtcggtcgagatggtcaacggcaataatcaattgtcgggtctgttctttttgcgccatttctacgctggcatcccgtaccagcgccaggtaataaactttcccctcggcgctcactttcgatagcgcaaaacgggtccagattttactgccgtcttttttcttcagctgcagctcccgacttatcccctcaacacgcgctttaccgccttcacgggtgtgacgaatgtattcaggatgcgcaggacgcaaatcccgcggaatcagcatatcaatgttattgccaatgacttcttcacgtttgtatccccagagcttctctcgtcttttggcgatatacagagcttcatcggctatttgaatgaggcgctcatagtcaggatgaccattaaacatggcggcaccgatggaaagtgagagggcaatatcttcgccgtttgcggctttcagtttggttttctccacccgactgcgaatacgttctgcggtacgtaacgtttcgttttcagaagcttcagtcaaaacaatgataaattcatcgcccccgtagcggaaaacataatcactactgcggacgttgtcataaaaggcctgagagactttacgcagaatttcatcaccagtgttatggccccacgtatcgttgatctctttgaatttatcaacgtcaataatcagcactgacagcggtgtaccggtccggttggcatgggcaatttcgcgtttgaagatagtcggtaggaaacggcggttaagtaatttcgtcagtacatccataccgacttcgtggcgcgatacttcttcaaacaattcacgcagcaaggtaataatttgcgatacggtatttcttatctgtaataaaaatttcacccgcagacttctgttattcaaatttctggtgttacgcat

SEQ ID NO: 130112 - DNA, 910 bp, Homo sapiens
gttctgggctgctaacgaagggggacgcagtgctagtatcgtagtcttcagcgctataggtgtacgatgcaccatgattatcgaccacggcaattttgtctggcatcgcacgagcggtctgctgccagtaatcggccagcgaagcatcgccccataacccttgctgacgatacgccgcacgacgttgttcgttaaacgttaatgtcactttcatgttggactctcgaaacagaacatcaggcccgagatgcgggcctcgtcttttggcgatatacagagcttcatcggctatttgaatgaggcgctcatagtcaggatgaccattaaacatggcggcaccgatggaaagtgagagggcaatatcttcgccgtttgcggctttcagtttggttttctccacccgactgcgaatacgttctgcggtacgtaacgtttcgttttcagaagcttcagtcaaaacaatgataaattcatcgcccccgtagcggaaaacataatcactactgcggacgttgtcataaaaggcatgctcgcccagcggcgtgaggttatattccacatgcgcaggcaccgccggatacgcgatacggttaagaaacccatcatgttctaacgcatgtaagtactgcgcaagcatcttttcactcaccccacagattttgcgccgcaggtcgctaaagcgatgagtaccttcgcgtagcgccaccagaatcaacaccccccaacggctggtgacgtgtttcaacacctcgcgcgacgggcactgttccgcaaagagattaccctctttcagttgttgcgacaggctaacctgactcatttcatacttacctttttgtacgtacttactaaaagtaagtttaggtgttagcgtatttaaacacaagacaaaacgatggagacttcccat

SEQ ID NO: 130113 - DNA, 1737 bp, Homo sapiens
aggatcagatgaggtgatgcagtgtgaaaaagccatgctggatgtgacagagggctacacaaagcacatccctaatgccttttcctccatgaagtcttatccgagctcccatctagaggtaatctacaaacacctctacgcaaataaactagaaaatctagaagaaatggataaattcctcgacacatacactctcccaagactaaaccaggaagaagttgaatctctgaatagaccaataacaggagctgaaattgtggcaataatcaatagcttaccaacaaaaaagagtccaagaccagatggattcacagccgaattctaccagaggtacaaggaggagctgcatataaacagaaccaaagacaaaaaccacatgattatctcagtagatgcagaaaaggcctttgacaaaattcaacaacgcttcacgctaaaaactctcaataaattgggtattgatgggacatatctcaaaatcgacgttgagctgctgcttgagggccatgcactgtacaataaaaatgatcccatcgacaactttctaaaacatacactgccttcagattttacagctccagccactctgttttcaggggatcctctagagtggactgcagacagcagtgaccgctctctcggttcaaaaggtgtgttcacctttgacccaggcttcacttcaaccgcatcctgcgaatctaaaattacttttattgatggtgatgaaggtattttgctgcaccgcggtttcccgatcgatcagctggcgaccgattctaactacctggaagtttgttacatcctgctgaatggtgaaaaaccgactcaggaacagtatgacgaatttaaaactacggtgacccgtcataccatgatccacgagcagattacccgtctgttccatgctttccgtcgcgactcgcatccaatggcagtcatgtgtggtattaccggcgcgctggcggcgttctatcacgactcgctggatgttaacaatcctcgtcaccgtgaaattgccgcgttccgcctgctgtcgaaaatgccgaccatggccgcgatgtgttacaagtattccattggtcagccatttgtttacccgcgcaacgatctctcctacgccggtaacttcctgaatatgatgttctccacgccgtgcgaaccgtatgaagttaatccgattctggaacgtgctatgaccggatgattttactgacggccgaagtatcgcgccacgaagtcggtatggatgtactgacgaaattacttaaccgccgtttcctaccgactatcttcaaacgcgaaattgcccatgccaaccggaccggtacaccgctgtcagtgctgattattgacgttgataaattcaaagagatcaacgatacgtggggccataacactggtgatgaaattctgcgtaaagtctctcaggccttttatgacaacgtccgcagtagtgattatgttttccgctacgggggcgatgaatttatcattgttttgactgaagcttctgaaaacgaaacgttacgtaccgcagaacgtattcgcagtcgggtggagaaaaccaaactgaaagccgcaaacggcgaagatattgccctctcactttccatcggtgccgccatgtttaatggtcatcctgactatgagcgcctcattcaaatagccgatgaagctctgtatatcgccaaaagacgaggtagaaaccgtgttgaactctggaaagccagtctttag

SEQ ID NO: 130114 - DNA, 440 bp, Homo sapiens
cacatgctagtgcatgcgcgacgattagtatgacctggatgatcctctgcctggcagtggcggtggactgtcgcttctttgggattgcttactttaacgatcatccggcgttggctggtgcggtaaatcagaacgccgagcgtgtgtttatcgaactggcgcaaattctgtttaacccgtggattgccgggattctgctgtcggcaattctggcggcggtaatgtcaaccttaagttgccagctgctggtgtgctccagtgcgattaccgaagatttgtacaaagcgtttctgcgtaaacatgccagccagaaagagctggtgtgggtagggcgtgtgatggtgctggtggtggcgctggtggcgattgcgctggcggcaaacccggaaaaccgcgtgctgggcttagtgagctacgcgtgggcaggctttggcgcggcg

SEQ ID NO: 130115 - DNA, 564 bp, Homo sapiens
gttcaggataagaaatttagcgccgacgggcagattgattatcaactggatgtgatgaccgccgccgtgggctggtttggcgatacgttgctgaccaacggtgcaatctacccgcaacacgctgccccgcgtggttggctgcgcctgcgtttgctcaatggctgtaatgcccgttcgctcaatttcgccaccagcgacaatcgcccgctgtatgtgattgccagcgacggtggtctgctacctgaaccagtgaaggtgagcgaactgccggtgctgatgggcgagcgttttgaagtgctggtggaggttaacgataacaaaccctttgacctggtgacgctgccggtcagccagatggggatggcgattgcgccgtttgataagcctcatccggtaatgcggattcagccgattgctattagtgcctccggtgctttgccagacacattaagtagcctgcctgcgttaccttcgctggaagggctgacggtacgcaagctgcaactctctatggacccgatgctcgatatgatggggatgcagatgctaatggagaaatatggc

SEQ ID NO: 130116 - DNA, 1065 bp, Homo sapiens
cttgagggtgtccagaagaaacttacatgtcatttggttaaaacttgtcatggcttcctgaagtttctcaccgttttggattataacgtgcaggcaacgagttgccaaatggaacacgtggaactcgctgcctgcagtcaagagatcttttggctaaaaagtgaaatctctgaaggatgcaaagcgttttccaatcgggaaaaagtggaagcggcgatggcggagctgaattacattcccaaccgcgtggcacaacaactggcgggcaaacagtcgttgctgattggcgttgccacctccagtctggccctgcacgcgccgtcgcaaattgtcgcggcgattaaatctcgcgctgatcacactgggtgccagcgtggtggtgtcgatgacgtgcaggcaagcgagcttggcagccggcagcatcttgagttttacctgcgtcatcgcaccggtgacatcatggctcgtgcgaccaatgacgtcgatcgcgtcgtgtttgccgccggagaaggggtgctgacgctggtggattcactggtgatgggctgcgctgtgttgattatgatgtctacgcaaattagctggcagttgaccttattttccctgttgccgatgccagtgatggcgatcatgattaagcgcaacggcgatgctttgcatgaacgctttaagctggcacaggcggcgttttccagtcttaatgaccgcacccaggaaagcctcaccagtatccgcatgatcaaagcctttggtctggaagatcgccagtcggcgttatttgccgcggatgccgaagataccggcaaaaaaaacatgcgggtggcgcgtattgatgctcgtttcgacccgaccatctatatcgcgattggtatggcgaacttgctggcgattggcggcggtagttggatggtggtgcagggcagtttaacgctgggccagctcaccagttttatgatgtatttaggtctgatgatttggccaatgctggcgctggcatggatgtttaacagacttgcaggcagcgagtgtgcaacgagttggacaaggagagaagcccaagtctaa

SEQ ID NO: 130117 - DNA, 568 bp, Homo sapiens
ggaagtagcagcaaatgggtgctcctcagtggacaacaaaatgtttatatattcacagagagatcgatgtcttattgtgatgagtctcgactgtcatatcttcttcggaggatcacccgggaaaacgaccgagaccgaagattggctactgtaaagcagttgaaagaatttattcagcaaccagaaaataagctggtactagttaaacaattggataatatcttggctgctgcacatgatgtgcttaatgaaagtagcaaattgcttcaggagttgagacaggagggagcttgctgtctcggccttctttgtgcttctctgagctatgaggctgagaagatcttcaagtggatttttagcaaatttagctcatctgcaaaagatgaagttaaactcctctacttatgtgccacctacaaagcactagagactgtaggagaaaagaaagccttttcatctgtaatgcagcttgtaatgaccagcctgcagtcaattcttgaaaatgtggatacaccagaattgctttgcaaatgtgttaagtgcattcttttggtggctcaatgttacc

SEQ ID NO: 130118 - DNA, 713 bp, Homo sapiens
ctctggtagattcggctgtgaatccatctggtcccggattttttttggttggtaagctctaattattgccacaatttcagagcctgttattggtctattcagagattcacttctttctggtttagtatccccacagatggggttcaggctgccggacacaactgggtgatgccagggcagtggtcacctgtgccagccctgtgaggtagctggaggatcattgttccttccttctcgggctcggtctggaagtcccagcggggaaccttcagatcatcatcaaagcttccatcaagagtgttgttgtctggattgactgtctcagagccagagactaatcgccctctgactgtcctccagatcttcactgcctccttcaagttttttcccatttcagctaacgtggggttgctatatccctgggtcaaagcaaatcccatgggtacatccactttcaagtggcccagagagaacctgaaatactcggtggactccattaaggccgtcagatggtgtagcctgcatgggagacttatgtgatagtaaatgtaaagggatttaaagcagtggttttcagccccagaggcctgagtgagtttgggcacactctgtgtgatcgggcagaaggctgtgggaagtttagctttgatgtcatgggaaccaacccctagacccatgggcctgctttctacttccagaactttatatagcat

SEQ ID NO: 130119 - DNA, 1305 bp, Homo sapiens
ttagctgaaagcatagggcattatagagcatagtggggacttggggaacctgccactggagaggacttaggaccttttaatggcagaaatgatgactgtgttggcagcagttcatcagtgcccagtactcaagggtccccctgagaagccagtggttgcactgatggggctggcacaggtgaccactgccctggcatcaccagctgtgtccggcagcctgaaccccatctgaaatactcggtggactccattaaggccgtcattggtgtcagcctgcatgggagacagcttattttctgttgctgaataaattctttcaactgctttacagtgaccaatcttcagtcctgtcgtcttcccgggtgatcctccgaagaagatttgacagtcgagactatcacaataagacatcgatctctcttgctctacctttccctgggctcttggggggcctatatccaggtagctccaaagggccccccctggttctttgttttgtacatgatcagatgtggcgctatctccaactgtctttgcacttctgctttgtctatttcgttctttcatagatgtgttgagtttgccatgttcaactagtgcactgtggaactcgtattcgacaagcattggaaaactgttgaaatcaattcctttagatgttatcccacacagctctttctggctggcatgtttacgcagaaacgctttgtacaaatctcggtaatcgcactggagcacaccagcagctggcaacttaaggttgacataccgccgccagaatgccgacagcagagtcccgcaatcacgggtataacactcaataaacttcttgaataagagggcccccttcactggttcagtagcagaccaccgtcgctggcaatcacatacagcgggcgattgtcgcgggcagatctgatgtggatcgccaccatggtgctgattgccgttgtggtttatctccgcgttacgtctggcgggtattgctgtttggtgcgtcttatcaactggctttgaacagatccgcatgatcaaagcctttggtctggaagatcgccagtcggcgttattgccgcggatgccgaagataccggcaaaaaaaacatgcgggtggcgcgtttgatgctcgtttcgacccgaccatagggtggccaagttcccttgggcttcttttttccaaccgaaccccttgggttccctttcctttcttctttcaagttcctcaattcgcacaccttcatccggggaatccttatttggaaaactttccccttttggatttttccttttccggcgtcttcttgg

SEQ ID NO: 130120 - DNA, 759 bp, Homo sapiens
gttcgtaaattccagtacggccaacacaccgtgactctggaaaccggcatgatggctcgtcaggctactgccgctgttatggttagcatggatgacaccgcggtattcgttaccgttgttggccagaaaaaagccaaaccaggtcaggacttcttcccactgaccgttaactatcaggagcgtacctacgctgctggtcgtatcccgggtagcttcttccgtcgtgaaggccgcccaagcgaaggcgaaaccctgatcgcgcgtctgattgaccgcccgattcgcccgctgttcccggaaggcttcgtcaacgaagttcaggttatcgccaccgtggtttctgttaacccgcaagttaacccggatatcgtcgcgatgattggtgcttccgcagcgctgtctctgtctggtattccgttcaatggcccgattggtgctgcccgcgtaggttacatcaatgaccagtacgtactgaacccgactcaggacgagctgaaagagagcaaactggatctggttgttgccggtactgaagccgctgtactgatggttgaatctgaagctcaactgctgagcgaagaccagatgctgggcgcagtagtgttcggtcatgaacaacagcaggttgttattcagaacatcaatgaactggtgaaagaagccggtaaaccgcgttgggactggcagccggagccggtaaacgaagcgctaaacgcgcgcgttgctgcactggctgaagctcgcctgagcgatgcttaa

SEQ ID NO: 130121 - DNA, 1194 bp, Homo sapiens
atgaccgttgttgttaagaaacagtgtttcaggacaggatggagtttaatgcctcacaattgctgtattctttcccgccccccagtgcccagagatgttctccataccatgccacactgccagggatggggaaagggcagcatcgatgattcaagactatattttctgcttcttcagtgcctcttttatgaagttaaaaccagaacgcatgcattctcacgaacgagcacagacatcagacatgctaaaagattgtcggaggcacctaccgatcgggattttaatggcaggtggaatgttcgccgtcctccgaaagaagcatcaaggccagaccttcatagagaggcccaggatatctttgacgtgcatgttgccatcatgggccacgttcctctggctgtttactcggattggccaggttttggtcacatgcttactcatgagcagggaatgcttcgtcaacgaattcaggttatcgccaccgtggtttctgttaacccgcaagttaacccggatatcgtcgcgatgattggtgcttccgcagcgctgtctctgtctggtattccgttcaatggcccgattggtgctgcccgcgtaggttacatcaatgaccagtacgtactgaacccgactcaggacgagctgaaagagagcaaactggatctggttgttgccggtactgaagccgctgtactgatggttgaatctgaagctcaactgctgagcgaagaccagatgctgggcgcagtagtgttcggtcatgaacaacagcaggtcgactctagaggatccccaatcaaagggaacaggacgtgtgataattacattgtgattgaaggacttatagattacgtgaacgatatgattgagaacgtgtcggaagaggctttttgtgtggagaacagaattatgagacactctgatcatcactcgtgcatagtggttcggtgtctgagcctgttcgcgctcgatctcgtgctcgtggtcattgctgtatctgtcgtgaatccgtgtctgctcgaggtcacgcgactgcgtgccgcttcgatcgtctcgcagcctaacctcaacatctcagacacatggggaattggggcaattctatacggcgcatatacgtgttcatgtattgcagatcctcacaaaatgatgagttcagggccgatgtatagccatagttgtgtcgagaaatga

SEQ ID NO: 130122 - DNA, 1521 bp, Homo sapiens
atgtctgaccataatccactgacattaaaactgaatctgcgggaaaaaatcgcctatggtatgggcgacgtcggttcgaatttaatgctctgcatcggtactctgtatctcctcaaattttataccgatgaattagggatgcctgcttactatggcgggattatctttctggtggcgaagttttttaccgcgtttaccgatatgctcaccggatttttactcgactcgcggaaaaatattgggcctaaaggcaaatttcgtccctttattttatatgcagcggttccggcggcgttaattgcaacgctccagtttatcgccaccaccttttgtttgccggttaaaacgacgattgccaccgcgctgtttatgatgtttggactttcatacagtctgatgactgatcctttttatgagcaccgcttgcttgacgccgtggtgaagaaaaaccgtgtgcgtttaattccgtatatgttggcgctgtatgtgctggcgtttctcgaccgttcgaatatcggtttggccaaacagacctaccagattgataccgggttgagtaatgaagcttatgcgctgggagcaggcattttctttgtggtatatgcgtttctgggtgttccggcgaatcttttgatgcgcaaactgggggccagaacctggattggtacgacaacactgctgtggggatttctttcggcagccatggcatgggccgatactgaagcgaaatttctgatagttcgcactctgcttcgtgctgcggaggccggatttttccctggtatgatttatctcacctcgcaatggtttccgcagcgtaatcgcgccagcattatggggctgttctatatgggcgcaccgctggcgttaacactgggatcaccgctttccggcgcgctgttggagatgcatggatttatggggcatcccggctggttctggatgtttgtgattgaaggattgttggcagtcggtgctggggtattcacattcttttggcttgatgacacaccggagcaggcacgttttctgagtaaacaagaaaaaacgttgcttatcaatcaactggcaagtgaagaacaacagaaagtgacttctcggctgagcgatgcgctgcgtaatggccgagtctggcaactagcgattatctacctgaccattcaggtggcggtttacggattaattttcttcctgccgacccaggttgcggcattgctgggaacaaaagtgggctttacagcgtcggtggtcaccgccattccgtgggttgcggccttgtttgggacctggcttattccgcgctattccgataaatctgccgccaaacgatatacacgcccccacagagaatgcggatatttttcggcgccttaccatccacctaaaaaggttcgaaacaacgccccccactcagggcctgggccaatatgtttaatacgcttacgggttcgagttcggccaaaccttggcatcgaggtatacaaacacgacagcccacctaacaacgctgctccctcttga

SEQ ID NO: 130123 - DNA, 822 bp, Homo sapiens
ttagtcataggacgccatttcaccgagccagcccgtaagtttgctctgctgctctttattatccgcgccgagaataaagtccatcgccgattgggtatccagttcactctcgatggtagcggcatacatagccttcactatcgcgctctggagctgggtattttgcagggtatcgagcattttcatatgctccatcacgctgtaaaacgcattggccccacgggtctgtccatcctccatcggtttgaatacatggataaatgaaggtggaccgccgggtagttcgcgaggaatgtaggtccagttccgcgccatccagccgggataaccatcgtcgctgacgtaatatcccagcgcagcaccgctatcatttattttcacaccggcgcgacagttccgggaatcgcacttcacacttcttggcccattcttctccctttttatgtcaaaattcaagacagcggaattcaggggatccttctttctgatctccctcatctgcttaactgcttctttgtttccaaggcacttatcccgttcttgcgtgatgacgtgaaattctccaacggtgacccgttcgatgccgaggcggcggcagaaaacttccgcgcagtgctcgataaccgtcaacgtcacgcctggctggagcgtggcctctttcaagcggtagaagtcgatgtgcaggtaggcattgatgccattggaggctccgggcactgtgacgccatggaccaggagcacgaacagcacgaagtaaggcagcgtggctgtgatccacaccacctttgtgctctcccctttccccatcagtcctgtgtccat

SEQ ID NO: 130124 - DNA, 1865 bp, Homo sapiens
atgacagacttaatccaacgccctcgtcgcctgcgcaaatctcctgcgctgcgcgctatgtttgaagagacaacacttagccttaacgacctggtgttgccgatctttgttgaagaagaaattgacgactacaaagccgttgaagccatgccaggcgtgatgcgcattccagagaaacatctggcacgcgaaattgaacgcatcgccaacgccggtattcgttccgtgatgacttttggcatctctcaccataccgatgaaaccggcagcgatgcctggcgggaagatggactggtggcgcgtatgtcgcgcatctgcaagcagaccgtgccagaaatgatcgttatgtcagacacctgcttctgtgaatacacttctcacggtcactgcggtgtgctgtgcgagcatggcgtcgacaacgacgcgactctggaaaatttaggcaagcaagccgtggttgcagctgctgcaggtgcagacttcatcgccccttccggcgcgatggacggccagtacgatgtcttcgtccgtaacgaaaactactggggcgaaaagccagcgattaaaaagatcacctttaacgtcatcccggacccgactacccgcgcggtggcgtttgaaactggcgatatcgacctgctgtacggaaacgaagggttattaccgctcgataccttcgcccgctttagccagaatccggcttaccacacccaactgtcacagccgatcgaaaccgtgatgctggcgctcaataccgccaaagcccccaccaacgagctggcagtacgtgaagctcttaattacgcggtaaacaaaaaatcgctgattgataacgcgttgtatggcacccagcaggtcgccgacaccctgtttgccccttctgtgccctacgccaacctcggcctgaaaccgagccagtacgatccgcaaaaagcgaaagcgttgctggaaaaagccggttggacgctgcctgcgggcaaagacatccgcgagaaaaatggtcagccgctgcgcattgaactttcgttcatcggcaccgatgcgttaagcaaatcgatggcggaaatcattcaggctgatatgcgccagattggcgcagatgtctcgctgattggagaagaagagagcagtatctatgctcgtcagcgcgacggccgttttggcatgattttccaccgcacctggggcgcgccatatgatcaaaggccttctcagtcaaagcgcgtacggcaacgctgatttcaggcacagcaggattaaatgaagaagcctacacaaagcaaatggaaccgtgctacgcgagtgcggggcggcagagagattctcacaaaattcgtgctcaccgcaccgttgaaatggctaaagcgttcgaacagcagacgggtcagttttgccggatagcttaccgctggcgcgtcatcgaatttatcgcccgcatggtagctgatacccgcttcggtggtgttagagaaaacaaagcgcatttccgggttgtgcgccagtttcaggaattcatcgtattcactgtagatgaaaatgatcaacacgtcctgaccggtgcggtggtgatgttgcgatcaacgattcgtatgggccgccagttgcaaaatgtcgccgcccaggacgtcagcgccttcagtcaaattgtcgccgtcagcccgaaaatgaagcatgttgtcgaacaggcgcagaaactggcgatgctaagcgcgccgctgctgattacgggtgacacaggtacaggtaaagatctctttgcctacgcctgccatcaggcaagccccagagcgggcaaaccttacctggcgctgaactgtgcgtctataccggaagtttggaacctggctaggatttcagtcagttaa

SEQ ID NO: 130125 - DNA, 1429 bp, Homo sapiens
atggctcgagtcgactctagaggatccccgcacacgctttccccgctaccggagatcatctatggcgaacaaggcaaacctgcatttgcgccggaaatgccgctatggttcaacttaagccatagcggtgaccgatatcgccctgctgttgagtgatgaaggcgaagtcggctgcgatatcgaagtgattcgcccgcgcgccaactggcgctggctggcgaacgccgtattcagcctcggggaacacgctgagatggacgccgtgcatcctgatcagcaactggaaatgttctggcgcatctggacgcgcaaagaagccatcgttaaacagcgtggcggcagcgcctggcaaatcgtcagcgtagacagcacctatcactcctcgctgtcagtcagccattgtcagcttgaaaaatttaagccttgcgatctgcacccctactccctttacgctcaccgccgacagtgtgcaatggatcgattcagttaactgatccgcccacccgaatgcccatctattgatccagaacaggtaatcagtatgagaaatgcttaaaatcgtcatacttatttccgccccatcctatttaaatccccattggggttaccccatgcttctccacactccgccgcactctatttgcgctgctggcttgtgcgtcttttatcgtccatgccgctgcaccagatgaaatcaccaccggcttggccggtgaatgtcgggccactaaacccgcacctttacacgcttaaccagatgttcgcccagagcatggtttatgagccgattggtgaaatatcaggcagacggttcggtgatcccgtggctggcaaaaagctggactcattcagaagatggtaaaacctggaccttcaccctgcgtgatgacgtgaaattctccaacggtgaaccggtccgatgccgaggcggcggcagaaaacttccgcgcagtgctcgataaccgtcaacgtcacgcctggctggagctggcaaaccagattgttgatgttaaagcactcagtaaaacagagctgcaaattaccctgaaaagcgcctactatcctttcctgcaagaactggccctgccccgtcctttccgttttatcgctccctcgcagtttaaaaaccatgaaaccatgaacggaattaaagcgccgattgggacccgaaccgtggaatttgcaggaatcgaaactgaatcagtaccatggcttcggccggaacgaaaactactggggcgaaaagccagcgattaaaaagatcacctttaacgtcatcccggacccgactacccgcgcggtggcgtttgaaactggcgatatcgacctgctgtacggaaaccaacggttattaccgctcgataccttcgcccgctttagccagaatccagtttaccacacccaactgtcacagatatggaaccagtaa

SEQ ID NO: 130126 - DNA, 1074 bp, Homo sapiens
atggttcaggtgattcgcaaagatgcccccacccccaggacgagggaaccctcgctatcagataagggcatttgtcccaaaccccaagaagccttgaagttcttctgcgaggtagacgaagaggccatctgtgtggtgtgccgagaattcaggagccacaaacagcacagcgtggtgccattggaggaggtggtgcaggagtacaaggagctcttggagtccaggctgagggtcttgaagaaggaactggaggactgtgaggtgttccggtccacggaaaagaaggagagcaaggagctgctgcgaattttgctcaccaatgcgcatccgcacaacctggcggtaaaacttgagcataccggtctggacgcacaccttgatttattactttccacccacacatttggttatccgaaagaggatcagcggttatggcatgcggtggccgaagctacgggtctgaaagctgaaagaacgctgtttattgatgacagcgaagcgattctcgatgctgccgcgcaatttggagacgccatgaaagagaaacctgctgttgaggttcgactggataaatggctatgggctgcccgtttttataaaacccgcgcgctggcccgtgaaatgattgaaggcggtaaggtgcattacaacgggcagcgcagcaagccgagcaaaatcgtcgagctgaatgccacgctcactctgcgccagggaaatgacgaacgcacggtgattgtaaaggcgattactgaacagcgtcgccctgccagtacagataggaatagaaagccacagtacttggagataatagacatttgggacctcagcacaagcagtgtcaaaatagatgtattggtagacagaaatgccagattgatctcagtactgttgaaattcggtgtgcacacagtagaaatccaggcccagtctacgggcatcatcttccagagtcgtcacccgttcatgcaccctgtgacctcgccaggcacatgtcgcccaagcttaaattgtcttacaggatctccgggtaccgagctagagtgtatcaactctagagtgatcaccgggtactga

SEQ ID NO: 130127 - DNA, 1072 bp, Homo sapiens
  misc_feature (1)...(1072): n = a,t,c or g
atgagccgggtcttattttttcatatcagacaggtggtgttgcggcagaggcggctggaggagctccagctgcagcacagcctgcgccttctggagatggcggaggcgcaaaacagacacacggaggtggccaagaccatgcggaacctggagaaccgcctggagaaggcccagatgaaggcgcaggaggccgagcacattaccagcgtgtacctgcagctcaaggcctatctaatggacgagagcctcaacttggagaaccggctggactccatggaggctgaggtgaaccagctgcagtacctagaggagaccttggttcgagagcgcaagaagcgggaacgctacataagtgagtgcaagaagcgcgccgaggagaagaaactggagaacgagcgcatggagcgcaagtcctgccttagcctcccgagtatggcaacaacggtgcctgagagcgcagagcctgaggcagaggcggacggggaggagctggacggcagcgacatgtcagccatcatctatgaaatccccaaggagcctgagaagaggcggcggagcaagcggtcgcgggtgatggatgctgacggcctgctcgagatgttccactgcccatacgagggctgcagccaagtctacgtggccctcagcagcttccagagaaacctgctgttgaggttcgactggataaatggctatgggctgcccgtttttataaaacccgcgcgctggccccgtgaaatgattgaaggcggtaaggtgcattacaacgggcagcgcagcaagccgagcaaaatcgtcgagctgaatgccacgctcactctgcgccagggaaatgacgaacgcacggtgattgtaaaggcgattactgaacagcgtcgccccgccagcgaggcagccttgctgtatgaagagactgcggaaagtgtagagaaacgcgaaaaaattgggnccccgggggcccccctttgtgggggcccccaaaaacccccggggttttttaaaacttaatgccttaaccatgccgcacccggaccgacgcccggacaaaaaagagcgccgggacctgttacga

SEQ ID NO: 130128 - DNA, 415 bp, Homo sapiens
  misc_feature (1)...(415): n = a,t,c or g
ctttgtggacacaagggggaagaagaatacggtnagcttcccacacattagcaagaaagtcctgctgaagtcatccctgctgtatcaggagaatcaagctcacaatcagatgccggcctcagagctcaaggcttcagaaatacctttccaccctagcattaaaacccaggatcccaaggcagaggagaagtcaccaagaagcaaaaggtgactctgacagcggcaggtccttcctgatccagctgcagatttgagcgtgaagcctcctgggcctttaatgttgcctttatgttacctgtctggccctgcagacattacagttctcaaagcctctcaagacggactaattatagcttaattccacgttaacttgggcaacttgccacctaaactatatactattgtcgacactaaa

SEQ ID NO: 130129 - DNA, 2113 bp, Homo sapiens
atgaacacccctctgcagtctgcacatacacaccttaccctggtcgagttcatagcctacttggtgtctgactccccctttcctgctgcttcaaccttgtctctgcccacgtgcaactttgatccctgccccactaaactgggtgctggcacaatgcctcccgcagcggcgggcggtcagcgccggcctcatgcagctcctcccgccgcctatccgcaccggaacaaagtaagggccgcggaggctcgtacttcacgagcagtcaggcgcgagtacgaggcaggcgacgaagcttctggtcgacggggtcgtggggggagaatgaaaagcgtgcagaatgcaagagctgaccggggaatgtgggtcagagagaggcgggctgtggtgcgcggacaagaaaatacagttgtagtttttgcagcagctgcatccccggaatccgacttcctccaaatcgtgcttcgtgatattgccagagaaatggtaccagaatacaaatctgatcttcagcccaggactcaaatggatgctaaaaagccaaggaaatgtgatttgactcccttcctggttttgaaagcaagaaagaaacaaaagttcacctctgcgaagcacctctgggtacagcgcaaaggcaaaggtgtggaggatcatgctgattggcagggccaaatctgggtgggtgtggagggaaaatcagcagaagggcaaggccttaatctaacaggtgcatttaacagaagtccagaaaacaaagtatctccccaaggccctgcactgaatgcattagaaattgactccagctatctggacccccaggctcttgcccttcctcaaggatggcagggcctcctctttccacctctactagggacagagctggttggaagtaaactttcggttcagatccagaagccaccttccaatatcaagaactccagaatgacccaagtctttcataagaacaccagtgttacttcactcccctttgtggacaccaaggggaagaagaatacggtaagcttcccacacattagcaagaaagtcctgctgaagtcatccctgctgtatcaggtgagtgcagacggactggaccctgagaaggcaggtgaaagacctggttttagtccaaagccagttttagaaaggcccaggatagtggggaaaagcacagtagctgctgaagaggagaatcaagctcacaatcagatgccggcctcagagctcaaggcttcagaaatacctttccaccctagcattaaaacccaggatcccaaggcagaggagaagtcaccaaagaagcaaaaggtgactctgacagcggcagaggccctaaagctttttaagaaccagctgtctccatatgaacaaagtgaaatcctgggctacgccggagctgtggttcctgggtcttgaagccaagaagctcgacacggctcctgagaaatttagcaagacgagttttgatgatgagcatggcttctatctgaaggtcctgcatgatcacattgcctaccgctatgaagttctggagacaatcgggaaggggtcctttggacaggtggccaagtgcttggatcacaaaaacaatgagctggtggccctgaaaatcatcaggaacaagaagaggtttcaccagcaggccctgatggagctgaagatcctggaagctctcagaaagaaggacaaagacaacacctacaatgtggtgcatatgaaggactttttctactttcgcaatcacttctgcatcacctttgagctcctgggaatcaacttgtatgagttgatgaagaataacaactttcaaggcttcagtctgtccatagttcggcgcttcactctctctgttttgaagtgcttgcagatgctttcggtagagaaaatcattcactgtgatctcaagcccgaaaatatagtgctataccaaaagggccaagcctctgttaaagtcattgactttggatcaagctgttatgaacaccagaaaggtcacctgccttctaggctgcgctcagctgtcaccactaccagtatgattttgaacaaggtgcttcgcttctctgagcccaagttgcctcatctacaatttgagaaagttgtatccaaatactag

SEQ ID NO: 130130 - DNA, 1327 bp, Homo sapiens
tttcgtgtgggtcaccactgcaaataaggatataaaatgcctgttataactcttcctgatggcagccaacgccattacgatcacgctgtaagccccatggatgttgcgctggacattggtccaggtctggcgaaaaagcccttggttattcggcaaggggccgccggtttaatggcgaaactggttgatgcttgcgatctgattgaaaacgacgcacaactgtcgatcattaccgccaaagacgaagaaggtctggagatcattcgtcactcctgtgcgcacctgttagggcacgcgattaaacaactttggccgcataccaaaatggcaatcggcccggttattgacaacggtttttattacgacgttgatcttgaccgcacgttaacccaggaagatgtcgaagcactcgagaagcggatgcatgagcttgctgagaaaaactacgacgtcattaagaagaaagtcagctggcacgaagcgcgtgaaactttcgccaaccgtggggagagctacacagtcgtccattgttgaagaaaacagcgccgatgatgacaagccaggtctgtacttccatgaagaatatgtcgatatgtgccgcggtccgcacgtaccgaacatgcgtttctgccatcatttcaaactaatgaaaacggcaggggcttactggcgtggcgacagcaacaacaaaatgttgcaacgtatttacggtacggcgtggccagacaaaaaagcacttaacgcttacctgcagcgcctggaagaagccgcgaaacgcgaccaccgtaaaatcggtaaacagctcgacctgtaccatatgcaggaagaagcgccgggtatggtattctggcacaacgacggctggaccatcttccgtgaactggaagtgtttgttcgttctaaactgaaagagtaccagtatcaggaagttaaaggtccgttcatgatggaccgtgtcctgtgggaaaaaaccggtcactgggacaactacaaagatgcaatgttcaccacatcttctgagaaccgtgaatactgcattaagccgatgaactgcccgggtcacgtacaaattttcaaccaggggctgaagtcttatcgcgatctgccgctgcgtatggccgagtttggtagctgccaccgtaacgagccgtcaggttcgctgcatggcctgatgcgcgtgcgtggatttacccaggatgacgcgcatatcttctgtactgaagaacaaattcgcgatgaagttaacggatgtatccgtttagtctatgatatgtacagcacttttcggcttcgagaagatcgtcgtcaaactctccactcgtcctga

SEQ ID NO: 130131 - DNA, 3223 bp, Homo sapiens
ttaatcccgatgcttaaagagatgatccgccacgctggcaacagcggcacccgcgaagtggttctcgggatggcgcaccgtggtcgtctgaacgtgctggtgaacgtgctgggtaaaaaaccgcaagacttgttcgacgagttcgccggtaaacataaagaacacctcggcacgggtgacgtgaaataccacatgggcttctcgtctgacttccagaccgatggcggcctggtgcacctggcgctggcgtttaacccgtctcaccttgagattgtaagcccggtagttatcggttctgttcgtgcccgtctggacagacttgatgagccgagcagcaacaaagtgctgccaatcaccatccacggtgacgccgcagtgaccgggcagggcgtggttcaggaaaccctgaacatgtcgaaagcgcgtggttatgaagttggcggtacggtacgtatcgttatcaacaaccaggttggtttcaccacctctaatccgctggatgcccgttctacgccgtactgtactgatatcggtaagatggttcaggccccgattttccacgttaacgcggacgatccggaagccgttgcctttgtgacccgtctgtatccacaatgccatcagcgggatgtttcccggcagcgcaaatcactacgcgctcaccgttaacctgcgcttcaatgccagacccgaccagcgcccgctgtgattcggcggtgggaatggcgagttcagcaacctgtgcttcgcgtacgatggcttgcgccagtggatgcgtcgcgccttgctcgaccgccgccgccagtgtcagcagttcagattcactaatacccgttgccggatgaatcgcggtaacgcgcggtttaccgacggtcagcgtaccggttttatcaaacgccacctgagtaacacgacccagctgttccagcgccgctccgcctttaatcaacgccccacgacgcgctgccgccgccagcccggaggtaatcgccgcaggcgttgagataactaacgcacacgggcagccaatcagcagcagcgtcagccctttataaatccactcctgccagctggcggcaaacagcagcggtggcaccagcgtcaccagcagagcgacggccataatcgcgggcgtatagatacggctgaaacggtcgataaaccgctcaatgggagcgcgacgctcttcggcttcttcgatcagtttcagaatccggtcaatggcgctggctcccggttctgacagcacttccaacgtcaccagacggtctacgctggtggcaccagcagggactttatcgcccgttgcgcgctccaccggaatggattcgccggtcagggcgctttcatcaaaactggcaaacggtgagagcagtttaccgtcggcaggcaaacgcccacctgcggcgacttcaatcacatcgccagggcgcaggctgttaatcgccacctcttcccgctcacccttacgcaggcgcgtggcggtttctggtttcagcgccattaacgcgctaacgccctgacgcgcgcggctggcggcccagccttccagtcgttcaccaatcaaaaacagcagcaacaccatcgcagcttcagccgttgcgccaataaacagtgcaccaatagcggctacgctcattaaggtttcaatggcgaagtagctgccggatttgatcaaccgtaatgcctgatcgagcaatcgggtacagcccaaccagcgtggtcgcgataaacgccagttgcccgaacggatgattgaatttttcgtgggatgagctaaggctttcagcttttttagatacataagccgcgtttcaagaaatcgaacttgcctttcaagatcctcaatgcgtcggtcttttgacagctccaatgctgatgccgctttttctggatcaactgatattgcaatgtttcttttggtgccaatcttgagcgcgcgtaaaccagcttctccgcgctcttcatagaccttcagccacctggctacagaaccactaccagcaagcataaagtgagcagcagcctgattaagggacatgtgctgctcgatcacagctttcacgaccttaatacgcaactctggatcagcactaacgcctttaggtttgggaattaaacctttttctccatgtttttcatagagggcaacccatgtcctgacctgggttcgggggacaccaaaacgtgccgagatgatcttaaagcagcgattaaggtcaagcgataccgctcttacagaggagaggtagggcaaaccgcccctaatgttctccaaagagatttcaaggctacgcggccaaacgagaagtgggttaccgatgttactgaatttgcagtcaatgggcgcaagctgtatttgtctccagtaatagatctcttcaacaacgaagttatttcttacagcctttcggaaagaccagtgatgaacatggttgagaatatgctcgatcaggcattcaaaaagcttaatcctcacgagcatcctgttctgcactctgaccagggatggcagtatcgtatgagaagatatcaaaatatcctcagctacagccggttcacggcgcgcggctgaaacaggtccgaccctggcgctgggcacttgtccggcgagggcttcacgcaccggaacatctttgccatgcagctctgaaaactcatcaatgtaagtcatgctggtgaagtgcgtccattcgcgttcgaacggatacaccgggatctgaatcagatctttacgctcgaccagatagttgaacagacgcaattccatcggtgaaatcacatcttcggcgtcatgcagaataaaaccagcaaaagcgaaattggcgctacgctcaaattgggtgatggcgtccagcacgttgttcagacagtcggctttgctggtggggccaggacgcgcgcagactaccttatgcacattcgggaagcgagcgcacacttcgtcaacatcacgctgagtatcggggtcgttggggtaggtgccaacaaagatatgatagttttcgtagtcgagcgtggtcgccgccagctcggccatattgccgatgacgcccgtttcattccacgccggaaccataatcgctaacggtttttcatctggtttatacagttcgcggtaactcattcgcgggtagcggcgataaacactcaacttgcgtttaatgcggcgtacccagtagacgacatcaataaaaaaatcgtccagcccgctgatgaacat

SEQ ID NO: 130132 - DNA, 1341 bp, Homo sapiens
atggcgtcatcctgggtaaatccacgcacgcgcatcaggccatgcagcgaactgacggctcgttacggtggcagctaccaaactcggccatacgcagcggcgatcgcgataagacttcagcccctggttgaaaatttgtacgtgacccggcagttcatcggcttaatgcagtattcacggttctcagaagatgtggtgacattgcatctttgtagttgtcccagtgaccggttttttcccacaggacaggtccatcatgaacggacctttaacttcctgatactggtactctttcagttagaacgaacaaacacttccagttcacggaagatggtccagccgtcgtgtgccagaataccatacccggcgcttcttcctgcatatggtacaggtcggctgtttaccgattttacggtggtcgcgtttcgcggcttcttccaggcgtgcagcaagctcatgatccgcttctcgagtgcttcgacatcttcctgggttaacgtgcggtcaaatcaacgtcgtaataaaaaccgttgtcataaccgggccgattgccatttggggcccaccaagtgtttgtccaccaataatgcctttgttggcttaatggcctcattggctaaggtgtctgaacctgctggtgaagggtattctcaccccgtgtgtggctttgcggcggtactcgaatggctgttgcggctccagttggtattgccggtccgccgccctatgcgtctgacctgccagcctgcccaagtggtcaagcaagtttctagatgtctacgtaataaccccgttgctcaggatgaagtctctggtaactgccgctggttttaccgatcggttcaagctgtaccctgcctcggagtaatcgccgcaggcgttgagataactaacgcacacgggcagccaatcagagcagcgtcagccctttataaagggccagtactactgttcttgccgatggtgtcgaactgcacgtacgcgcgaggatcgatcatcttcaaaatgttgtccgcaggttgtctttcacgatccagtgaccaaggggtgacgcggcgaaagatcaaccccgtgggcttggttctcacgccaggttgtctccataccgccaatcggtggctagagacgagcggtatgcgcgtgggtaatcatttccgttcggctgtgttgccgtatctccggcgattgatcgcggcgtttcagcctccgatgccactcgattatcctgcttcaactggtcatgatcgatcgtcctgtcgccgagcttctcgtgcgacgcatgactgggatcgccaactatggttccggatcgtcgcggcaatgtatcatctgaagccatga

SEQ ID NO: 130133 - DNA, 426 bp, Homo sapiens; identical to SEQ ID NO: 115315

SEQ ID NO: 130134 - DNA, 432 bp, Homo sapiens
  misc_feature (1)...(432): n = a,t,c or g
tcacatttacttcaatgacagtacctttggtaataacacccaaagttgtatacagtggggatgagggattcttctttacaccaagtattggtaggcaaaaggtggctttcagttcaggatgtgttacatgggctttcttgaaacgcaagcnnnnnnnnnnnnnnnnnnnnnnnnnnnnnnnnnnnnnnnnnnnnnnnnnnnnnnnnnnnnnnnnnnnnnnnnnnnnnnnnnnnnnnnnnnnnnnnnnnnnnnnnnnnnnnnattggcctgatgaatctttcatatttaggtggttttcttgtaaagccatctccaacaaagcacactttagtaaccattctcttccatgccttcttctttctctttcctgttcgaataacttttaatacttctgtttctacctgggcacgtactttaggcagagggacttcc

SEQ ID NO: 130135 - DNA, 2308 bp, Homo sapiens
tttttttttgatgaagtaggatatttgtatatttgctttttttcaatcatatcagttttatgaacatggggtcaaagcgtatttcaaaataaagaccatttataaaactggacccactttaatcgtttacaatttaataaatctctctcattgcaagacatgtatggctgttttgtagtattcagaaacatcacagtaatggcagtttcttcaattggtgtgtagtcctcaataattatatatgaaattgctggtcaaaccagtaagactgcatttatacatcccatcattgttcaggattgtttggtaacctggggcatattttcccccaaataactttgccctcccttgcgtcaacaaggcccaaattcgctcacatttacttcaaatggacagtacctttggtaataacacccatagttggtatacagtgggggatgagggattcttctttacacccaaagttattgggtagggcaaaaagggtggctttttcagttcaggatgtgttaacatggggctttccttgaaaacgcaaagcccattggccctgatgaaatctttccatatttaaggtggttttcttgtaaagccatctccaacaaagcacactttaagtaaccattctcttccatggcttcttctttctccttcctggttcgaataactttttaatacttctgtttctcactgggcacgtactttagggcagaggggacttcccatttaaaccgccttatcttttcttttctgtttaatcatattggaaagtactttagctcgaagattggtcccttctctgtccaagcagatacggcaggtactgctccctggtggtgtcttttcaaccaatcctttttgtttgggtgtttcctcttttcaatgcatcttgatagtctttttcatttgtattttcctcagcatgacgctgtttatggtaaagcttagccttcagaccaatcattttctttgccttctttgaacggttcatgagcctctcgactttccttctttctctttttctcatggtaatccaaacggtatccatagcgtttacggtgtaattcaatatattcattctgtggcatggtgacggccgcagagccgccaggagcagcccctggagtgcgaaaacgctctcaattttcgggtctcaaagacccacaagcccacaccacgcaggccgggacaggaaagagtcaccctttaaaacggccgagtgaagagcaagaaccacgcagcggttccgagcctctgttttccgcttttagctaggaggacggaagttgctggcaggcggcatttggccggtacaccgccggaagtgtggaggtgtggctgcccgaggcggtagagcggagaaagcctattttcttttcgtttagatacattgccttttgcctaggctggcgtcgagacttgaggcgcgttgcagactttggcgcggctcgcgcctcctgcttcaagagcccagcggtgagagctggcctgcggcacgcggtctaatgccagacagtaacagtttggaggaacaagatgttgaccaacttgaggatatttgcaatgagtcatcagacaatacccagcgtgcatattaataatatatgctgctataaaataagagcgagtttaaaaagattaaagccacatgtgccgcttgggaagaaattgcagttctctaccagggttaataggaaatgatatcaaatcccttcattccatcatcaatcctcccattagctaaaatccgtaatattggaattatggctcatattgatgcaggcaaaactaccaccacagaaagaatattgtactattccggatatacaagatcactgggagatgttgatgatggagacacagtgacagatttcatggcccaagagcgagaaagaggcattactattcaatcagctgctgctacatttgaatggaaaggttatagagtcaatctaattgatacaccaggtcatgtggactttaccttggaggttgagcggtgcctaagagtgttggatggtgcagtggctgtatttgatgcctctgctggtgtagaggcccagactctcacagtatggaggcaagctgataaacacaatatacctcgaatctgtttttttaaacaagatggacaaaactggagcaagctttaagtatgaagttattactataagtagccttcagaagagtggtatcacaaagttgtgtttcttttgtgtccttaagcttgtctcacaagaaagatgccaggcctctaaatgtaataagatagagggtcaaaggttcaatcaataaaaatattttattc

SEQ ID NO: 130136 - DNA, 2904 bp, Homo sapiens
atgccccagaacaacgcggcaggagagatcgataatgacgtcggattaccgtgtgtcaccaataaaaaagtcccgaccagcgatgtcaaaatagcgcagaaaaccagaatgcccgggcgcgatttacgcaccagtgagaaccaggcgacgataatcgtcgcgaacttcgcggaggaacgtgggaaaacggcaattcgggcgataaaagctggccttccacggtccggtaccgtacaacatgcgcaaaagctgaacggcgaagtggaaaaagtgttgcttcgtcttggatttaccttaacggacgttcccgacagccatctgtgctgcggttcagcgggaacatatgcgttaacgcatcccgatctggcacgccagctgcgggataacaaaatgaatgcgctggaaagcggcaaaccggaaatgatcgtcaccgccaacattggttgccagacgcatctggcgagcgccggtcgtacctctaacaagcccttgaaaaggaataacaaaatgaaaactaaagtcattcttagccagcaaatggcgagtgcaattattgccgcaggtcaggaagaggcgcagaaaaataactggtctgtttccattgctgttgccgatgacggcggtcatctgctggcgttaagtcgcatggacgattgcgcgccgattgcggcttatatctcccaggagaaagcgcgtaccgccgcgctggggcgtcgtgaaactaagggctatgaagagatggtgaacaacggacgtaccgcgttcgtgactgcgccgttattaacgtcgctggaaggcggcgtaccggttgttgtggatgggcaaattattggtgccgtgggcgtttctggtttaaccggagcacaggatgcgcagatcttcgcggagcggatcagcggccggagcgtttggcggactctgcgtggacttggagctcacagcgtcttgcgacttgaaagcggattcagaggacaggacagaacacttgggcaaccgccagcagagaaaaatccccacgactatcgccatacaaccagcaatcatcatcccggcacgccagccgtaatgcagcgcagccgctgccatcacaatgggaatgagtgcgccgccgacgttatgcgccgtcggacagtaccgtattgttgtggaaatcggattggcgatagctcaaccgagcgcatccaccgcgttcatcaacaccacggcagcaaccgatttaggcaatcctggccacagaccatgtacggtcagaaaatcagctttgttgttcgtttcggtttgcaggcgacattcatctcgttcgttacgatttcgatcgtgttgactctggcaaaatccgccacagccgtaaataatcaccccaggaccggttgcatacggcgtcagacagcccatgataccgatagacagcaccagcaggatacacagttgttccattggtacgcccggaatacctttaccgacggccagaataaccggcagcatggttgcggtgtgcgcagacaggctggcaaacaggtagtgtgcaaagtagaacaccagaaccagtacaatcaccgttgcgtttgttttggtgcgaatcaggtagtcaaaagcactcagagaggctttggcaccttcgccagtggcgatgatgatctgcttgtacggaaccgtcgtacagtcacccgctgcgaacacgcctttcacgttggtttcgcatttcgcatcaatgataatctcgcccatgcggttacgttcgactgcgccttcgagccagttggtgttcggcagcagaccaatctggacgaaaataccggccagttcgatgttgtgaatatcgccgctgacacgatctcgatattccagaccaacgactttgctgccgtcgcctttcacttccgtggtttgcgcattcagaataatgtcgacgtttttcaggctgcgcagtttgtcctgcagaacctggtcggctttcatttctggcgcaaattccagcagcgttacgtgctcaacgatacccgccagcggcccgtcgcagtgcgggcagtaggtcacgcctttggtgcgatactgatcttcgcccggaacgttcatgttgcgccattttgcaccggtcgccacgataatgctgcgtgctttcagtaccacaaagcactgtggccgttaggtaaagagttacgcaacctgcaagaagaagacatcaaagtggtgctggcgattgccaacgattcccatctgatggccgatctgccgtggattgcagagtctattcagctacggaatatttacaccgacccgctgaacgtattgcaggccgagttgctgcaccgctcccgccaggcagaaaaagaaggccaggaaccggatcctcgcgtcgaacaagcgttaatggtcactattgccgggattgcggcagaagtccaggctaaacctctttttagctggaaagccctgggttgggcactgctctacttttggtttttctctactctgctacaggccattatttacatcagtggttatagtggcactaacggcattcgcgactcgctgttattcagttcgctgtggttgatcccggtattcctctttccgaagcggattaaaattattgccgcagtaatcggcgtggtgctatgggcggcctctctggcggcgctgtgctactacgtcatctacggtcaggagttctcgcagagcgttctgtttgtgatgttcgaaaccaacaccaacgaagccagcgagtatttaagccagtatttcagcctgaaaattgtgcttatcgcgtctggcctatacggcggtggcagttctgctgtggacacgcctgcgcccggtctatattccaaagccgtggcgttatgttgtctcttttgccctgctttatggcttgattctgcatccgatcgccatgaatactga

SEQ ID NO: 130137 - DNA, 1743 bp, Homo sapiens
atgaatgtagctggaagccattatcctcagcaaactgacacaggaacagaaaaccaaacattacatgttctcacttataagtcggagctgaatgatgagaacacatggacacatagggggcggggaacagcacaaactggggcttttgataggcagaggcttggagggagagcattaaggaagaataggtttttaacttctttgcgttgggatcaaacttcctcctttagctcggagaagtttgatcatctgaatccttcttctcttaactcgtcaaagttattctccgtccagctttgttccgttgctggtgaggagttgcgttcctttggaggaggagaggccattatttacatcagtggttatagtggcactaacggcattcgcgactcgctgttattcagttcgctgtggttgatcccggtattcctctttccgaagcggattaaaattattgccgcagtaatcggcgtggtgctatgggcggcctctctggcggcgctgtgctactacgtcatctacggtcaggagttctcgcagagcgttctgtttgtgatgttcgaaaccaacaccaacgaagccagcgagtatttaagccagtatttcagcctgaaaattgtgcttatcgcgctggcctatacggcggtggcagttctgctgtggacacgcctgcgcccggtctatattccaaagccgtggcgttatgttgtctcttttgccctgctttatggcttgattctgcatccgatcgccatgaatacgtttatcaaaaacaagccgtttgagaaaacgttggataaccctgcctcgcgtatggagcctgccgcaccgtggcaattccttgaccggctttatcaatatcgcagtgtgttcgtatcgatcatgattggcgtggtgaatctgccgattattcattactccgtggagtggtggaacaccctgcatcagggatcaacgcggatgcagcaaagtatcgatccggcgatgcgttcgccgctgcgctggtcgatttttggcttcctgctcctgtctgccacgctgacgctgatgcggatgcgtaatttgattttgctgatggaaaaacgccgtccgtggatattgtcttacctctttgacatcacggaaggtgaagcgatattcatgaatatcgacgctatcgccggacttcatgcgcacatcacgctcaacgctatagttctggctaaaggcaatgccaacaattgtcactgccagcccaaggtggttttcgtgccgcgtgaaatacgtagcgcagcttccgcaattgccagcaccgcaatccagcaggccattgccaggccgagcaccgtcatcgccacaactttgctttcgaacagccacggcaacagcagcgacagcaccagcgtagagatgaaggcgataatcaataaattgcggatcttacgcgggcgatcccgcccccagcgcaccagaggaccgacaccaagcagtagcgcaaacggcaccatcagccaggtaaacatggtgttgaagaacggttcgccaatcgaaatactgcccagtcccagttgcttatgcaccaacggcagcagcgtccccagcaacaccaccagcatcgcagcgaccagcaaaacattgttcgctaacagcaaagattcccgcgaccacagcgcattgtttacgcgtgagcgaactttgtgtccacgcgcggcaaacagcagcagcgaacccgccaatcaccagcaccataaaggcgaagattaa

SEQ ID NO: 130138 - DNA, 433 bp, Homo sapiens
gtccggtggtttccggcgcgtcagcctgggaagaagatcgctggaaagtgattcgcattggtgatgtggtgtttgatgtggttaaaccttgtagccgctgtattttcaccaccgtcagcccagaaaaagggcaaaaacatccggcaggcgaaccattaaaaacattgcaatctttccgcactgcccaggataacggcgatgtcgattttggtcagaatttaattgcccgtaatagcggcgtgattcgcgttggcgatgaggtggaaattctggcaacggctccggcaaaaatttacggcgcagctgccgctgatgataccgccaacatcacgcaacaaccggacgcaaatgtagatattgactggcagggacaggcatttcgtggaaataaccaacaggtgttgctggagcaattagaaaatcagggaattcg

SEQ ID NO: 130139 - DNA, 825 bp, Homo sapiens
atgaacgtggtagagcacctccgggccagcttcccagtggagcaatggtattggagaggtggacaacgtggggaggctgagggagctagatcttcgaaggcagagaacaacacgcgagaaagaagctccggaaactatcaatcaatacaaggctgccgttcggcggccttttttattcctagcaacagcactcgcacaaagcgaggtgagagtatgtatcgcatggacaaactaaccactggtgctgcctatggcgcttcagccgggagcatcctaaacggcatgttgaatgcctacagccccgagcagtggaacgctatcggcgtgctgacaaccgccgcagcaggagccgagatgaacccaacgttgaggaataagctggtgggtgccattgttggcggatcaggggcaatcactattgctgcagtaatgctgggcaatgcggatggactcgaaggtcggcgttattacgcctatcaggatgtggtcggcgtctggaccgtttgcgatgggcacactggtaccgacattcgccgcggtcaccgatataccgacaaagagtgtgacaacctgcttaaggcagatctgcgaaaggtggcaagcgccatcgacccgctgatcaaggttcgcatccctgagccaacccgcgccgcgctttactccttcacctataacgttggctctggtgcttttgccagctcgacgctgctgaagaagctgaactccggtgatgttccgggtgcgtgtaaagaactgcagcgctggacttatgctggcggcaaagcagtgaaggggctgatcacccggcgcgagattgagcgttga

SEQ ID NO: 130140 - DNA, 2187 bp, Homo sapiens
atgaaacctgcaggcatcttagctgaacgagagatgagacctgcaggcaaatcggcaaatgcaccgaagaacatcaggcgattgtgcgtaagtggctggaagagcgcaaactggatgaggcctggaaagatgcacgatcgagtaggcgggataaggtgtttacgccgcatccggcatggaaaacgcgtactttgttatcaatctggggccagcaaatgctggcctgattttttcttgagggaagactatgatgcgcaaaatgctgctggcggcagcactttcagtgacgagttctcatgcctgcagccactctgtaagctgacaacactcaatatgcaacgaatcattttaatcatcattggctggctggcggtagtgctgggtacgctgggcgtggtattaccggtattaccgacgacgccgtttatcctgctggcggcctggtgctttgcccgttcttccccgcgctttcacgcctggttgctgtaccgctcatggtttggcagctatctacgtttctggcagaaacatcatgcgatgccgcgcggcgtcaaaccgcgggcgattttgcttattttgctcacgtttgccatttctctgtggttcgtccagatgccatgggtgcgcatcatgttgctgctgtcgccgctctttccagatgcggaggaaacgctgatcggtagctcagcctgtcgatgtagagtgatatccggcgcaatcggcgctgtggttagcagcgccgtgttttggcgttatgtggggacggctccttcgcgggttgccttcgcgtggaatttgagctcgtcctggcgcttcggatgcggtttcgagcttgcgcgcggagacgtgttagtgcaagctgcgacgttagaaggggctgaaatttatgacgacgttagcctggaagatgcgccgtacttctcagcgctgtatggcccgtcacgccacgccatcgtggtgccagatctgtcacaggtaactgaacacctggaaggcttgaccgattgcccggaagatctctatctgatcgaaggagatccgcagtcattcgatgacagcgtgttcagcgttgatgagctggaaaaagcggtagtggtgaaaatcgccgatcgtcagtggcgttattcacgtttcccggaagtgccgctgtttggtcgtgctgcgcgtgaaagccgtattgaaagcctccatgccgagcgtgaagtgctttccgaacgcttcgccacgctctcctttgatgtacagaaaactcagcgtctgcatcaggcgttcagccgctttatcggcagtcatctggcggttgcgtttgagtctgacccggaagcagaaatccgtcaactgaacagccgtcgcgtcgaactggagcgggcgttaagtaatcatgaaaatgataaccagcagcagcgtattcagtttgagcaggcgaaagagggcgttacggcgctgaaccgcattctgccgcgtctcaacctgttggctgatgacagcctggcggatcgcgtcgatgaaatccgcgaacgtctggatgaagcccaggaagccgcgcgttttgttcagcagtttggcaatcaactggcgaaactggaaccgattgtttcggtattgcagagcgacccggaacagttcgaacagttaaaagaagattacgcgtactatctgcgtccggggcgtattggcgaagtgtcggtcatcggtctggtattcctgattttcgccattatctctggcggctgggtggcagaaagtccgacctgggcaccgtactttgactttaccggcgccggttacccagacatttttaccgctgaaatccattatttcacctcgcgggagagtagcttccaccaaagatatagagcatttttgcctcctttcgcgccacaagaaattaactgtagcgggaaaggatgggtttggctatgtggcaagcgtgattttagcgcagacgcggcactcgtcggtaaagagcgcagtgacctgtgccacgttaccaatttcaaccgccgccgaagcatgatacttagtgtgatcggcgaccagcagaatatttctcgcgtgcgccatcatcgttttcaccacgttagcttcgtttacatcaaactccatcaacgcgccatcgctctcaatcgccccaacgcttgttaccagataatcagcacgaaaatcagccacaaaggacgccgctga

SEQ ID NO: 130141 - DNA, 4963 bp, Homo sapiens
atgtcggcgtgtatgtcggcaacggcaaatttattcagtcaccgcgcacaggtcaggaaattcaaatcacttctctcagtgaagactactggcagcgccactatgttggcgctcgtcgggtaatgaccccaaaaacacttcgctaaaactttaccctgttgttacggcaacagggtaagttcatcttttgtctcaccttttaatttgctaccctatccatacgcacaataaggctattgtacgtatgcaaattaataataaaggagagtagcaatgtcattcgaattacctgcactaccatatgctaaagatgctctggcaccgcacatttctgcggaaaccatcgagtatcgacctcggcaagcaacatcagagtcatgtcactaacctgaacaacctgattaaaggtaccgcgtttgaaggtaaatcactggaagagattattcgcagctctgaaggtggcgtattcaacaacgcagctcaggtctggaaccatactttctactggaactgcctggcaccgaacgccggtggcgaaccgactggaaaagtcgctgaagctatcgccgcatcttttggcagctttgccgatttcaaagcgcagtttactgatgcagcgatcaaaaactttggttctggctggacctggctggtgaaaaacagcgatggcaaactggctatcttttcaacggccaacgcggcagcaaaatgcgtattttttattcgccgggtcattcagtttttgtgcaacgtccagcagctgttgccattttttcggctcatcaagccccgtttttgccagcacatctttgcgatcccagatcccgccaatccaggcgctgacagaaacaccggtccatgcgctcccattttgggtacgcacaatacgcagtacgccatcgtaaaacgcgctttcaccaacgttgctgatgactgtggcaaccgctttgcgatcgataagctgctctttgtccatcactttggcgtagtcatggctgcaacatgttcgccgatctcccacttcgaacgtgactgctccatgcaacgccgccaccagaaagtggtcgaagaagcgccagcaccgggcattaccccggaactgcgtcgctacatcggcgaacgttgcgctaaagcgtgtgttgatatcggctatcgcggtgcaggtactttcgagttcctgttcgaaaacggcgagttctatttcatcgaaatgaacacccgtattcaggtagaacacccggttacagaaatgatcaccggcgttgacctgatcaaagaacagctgcgtatcgctgccggtcaaccgctgtcgatcaagcaagaagaagttcacgttcgcggccatgcggtggaatgtcgtatcaacgccgaagatccgaacaccttcctgccaagtccgggcaaaatcacccgtttccacgcacctggcggttttggcgtacgttgggagtctcatatctacgcgggctacaccgtaccgccgtactatgactcaatgatcggtaagctgatttgctacggtgaaaaccgtgacgtggcgattgcccgcatgaagaatgcgctgcaggagctgatcatcgacggtatcaaaaccaacgttgatctgcagatccgcatcatgaatgacgagaacttccagcatgagctctgcagacaggccatattcgtccaaatccggctttttattcatcctgttaaatcgatgcgcggcattggtcttacacatgctctggcagatgtcagtggtctggccttcgatcgcatctttatgatcacggaacctgacggtacgtttattaccgctcgccagtttccccagatggtacggtttactccttcacctgtgcatgatggcttgcatctcaccgcaccagatggcagtagcgcatatgttcgttttggctgatttcggccacacaagacgcaccaaccgaagtttggggcacaacattttaccggcgcgaattgcgccagacgcgatcaacaaatggctaagtggatttttctcccgcgaagtgcaattacgctgggtggggccacaaatgacccggcgcgtgaaacgccacaacactgtacctctgtcatttgctgatggctatccttaccttcttgctaacgaagcctcgttacgtgatctccaacaacgttgtccggccagtgtaaaaatggagcaattccgccccaatctggtggtttccggcgcgtcagcctgggaagaagatcgctggaaagtgattcgcattggtgatgtggtgtttgatgtggttaaaccttgtagccgctgtattttcaccaccgtcagcccagaaaggagcgcaaaaacatccgtcaggcgaaccattaaaaacattgcaatctttccgcactgcccaggataacggcgggggggaaggcgaggcacgcgcagcaaatactggcgcaactcatcgcggtaggcatcggtcgccgtcggctgtaaggtaccgagatcgattgaatatgtatgttcttcgtcgtatggatctgttgtaccgggtaaaaacgctttgggccgcgctgcgcggtaatcattacacctggcctgccatcgatatcaccctccccggcaatcgccattttcatctgattggcagtattcatatgggtagccacgatatggctcccctgcccacccgtttgctcaaaaagctcaaaaacgccgatgcgctgatcgtcgaggcggatgtttccaccagcgatacgccttttgctaatttgcctgcctgcgaggcgctggaagagcgcattagcgaggagcaactccaaaacctgcagcacattagccaggagatgggcatttctccctcactcttttctacccaaccgctgtggcaaatcgcgatggttcttcaggcgacgcaggcacaaaaactggggctgcgggcagaatacggtatcgattaccagctattgcaggcggcgaagcaacaacataaacccgtgattgaactggaaggggctgaaaaccagattgccatgttgctccagctccctgacaaaggactggcgctgctggacgatacgctgacccactggcataccaacgcacggttgctgcaacaaatgatgagctggtggctggagtgtgaaggaggggagagagaaagaatatttccagtctccaagaggatggggaagaagcttgatgccgtctttggggataatcatacggcctccttgacggaaaccgaagaatacagaaaatcgcaggtgcatttctgcatctgtgacaagcgagaaagaagctccggaaactatcaatcaatacaaggctgccgttcggcggccttttttattcctagcaacagcactcgcacaaagcgaggtgagagtatgtatcgcatggacaaactaaccactggtgctgcctatggcgcttcagccgggagcatcctaaacggcatgttgaatgcctacagccccgagcagtggaacgctatcggcgtgctgacaaccgccgcagcaggagccgagatgaacccaacgttgaggaataagctggtgggtgccattgttggcggatcaggggcaatcactattgctgcagtaatgctgggcaatgcggatggactcgaaggtcggcgttattacgcctatcaggatgtggtcggcgtctggaccgtttgcgatgggcacactggtaccgacattcgccgcggtcaccgatataccgacaaagagtgtgacaacctgcttaaggcagatctgcgaaaggccattatttacatcagtggttatagtggcactaacggcattcgcgactcgctgttattcagttcgctgtggttgatcccggtattcctctttccgaagcggattaaaattattgccgcagtaatcggcgtggcgttcagccgctttatcgccagtcatctggcggttgcgtttgagtctgacccggaagcagaaatccgtcaactgaacagccgtcgcgtcgaactggagcgggcgttaagtaatcatgaaaatgataaccagcagcagcgtattcagtttgagcaggcgaaagagggcgttacggcgctgaaccgcattctgccgcgtctcaacctgttggctgatgacagcctggcggatcgcgtcgatgaaatccgcgaacgtctggatgaagcccaggaagccgcgcgttttgttcagcagtttggcaatcaactggcgaaactggaaccgattgtttcggtattgcagagcgacccggaacagttcgaacagttaaaagaagattacgcgtactctcagcagatgcagcgcgatgcccgtcagccaggcgtttgccctgacggaagtggtgcagcgtcgtgcgcactttagctattctgactcggcagaaatgcttagcggtaacagcgatctcaacgaaaaactgcgtgaacgtctggaacaggcggaagcggagcgtacccgcgctcgcgaagcgttgcgcggtcacgcagcgcagttgagtcagtacaaccaggtgctggcttcgctgaaaagttcttacgacaccaaaaaagagctactcaacgatctgcaacgtgaattgcaggatatcggcgtgcgtgctgatagcggggcagaagagcgggcgcgtattcgccgtgacgagctgcatgcgcaactgagcaataaccgttcacgccgcaatcaactggaaaaagcgcttaccttctgcgaagcggagatggacaacctgacccgcaaactgcgcaagctggagcgggattactttgagatgcgcgagcaggtagtgaccgccaaagcgggctggtgtgcggtgatgcgcatggtgaaaagatacggcgttgagcgccgcttacaccggcgtgagctggcttatctcttcgctgatgatttgcgtttcatgtcggataaagcggttagtgcgctgcgtttggcggggcgggatacgaacattgcgccgagtgcttggcatgtcggaagattcgaagatgtcgcactctag

SEQ ID NO: 130142 - DNA, 1056 bp, Homo sapiens
atgaaatctaacaatgcgctcatcgtcatcctcggcaccgtcaccctggatgctgtaggcataggcttggttatgccggtactgccgggcctcttgcgggatatcgtccattccgacagcatcgccagtcactatggcgtgctgctagcgctatatgcgttgatgcaatttctatgcgcacccgttctcggagcactgtccgaccgctttggccgccgcccagtcctgctcgcttcgctacttggagccactatcgactacgcgatcatggcgaccacacccgtcctgtggatctacccactactgcgttgcggtgctacgggaagaggcattgacgacgaggctattttgcgggcgcttgaaagcttccaggggactggtcgccgttttgatttcctcggtgaattcccgctggagccagtgaatggtaaaagcggtacggcaatgctggtcgatgactacggccaccacccgacggaagtggacgccaccattaaagcggcgcgcgcaggctggccggataaaaacctggtaatgctgtttcagccgcaccgttttacccgtacgcgcgacctgtatgatgatttcgccaatgtgctgacgcaggttgataccctgttgatgctggaagtgtatccggctggcgaagcgccaattccgggagcggacagccgttcgctgtgtcgcacaattcgtggacgtgggaaaattgatcccattctggtgccggatccggcgcgggagctggtggccctgggcctcagtaaccttatcggaggcatcttccagtgcttccccgtgagttgctctatgtctcggagcctggtacaggagagcaccgggggcaactcgcaggttgctggagccatctcttcccttttcatcctcctcatcattgtcaaacttggggaactcttccatgacctgcccaagacaagctgtgaccgtctccgggagctgcatgtgtcagaggttttcaccgtcatcaccgaaacgcgcgaggcagctgcggtaaagctcatcagcgtggtcgtgaagcgattcacaagatgttga

SEQ ID NO: 130143 - DNA, 1999 bp, Homo sapiens
cacgccgtaagtcggcatcaataaataacactttttgatcggactgggcgatcaccgctgccagagttgaactgacaaacgttttaccactgtctggcgtcgcaccggtgatcattagaatgttattctccgtctccatcatagcgaaatgcagactggttcgtagcgcacgtacggcttccacagcagaatccgccgggttatccaccgccaggaaggggatatttttagtacgatggcgctgctgattagaaaataaatttttcttacgcagacgggtgcgtttatccagccactcggacattgggatagtggcataaacgctgatgccgtgctcttccagttgttccggggcttctacaccacgacgcaacatcgcacgcgccagcacggcacccacagaaataaacaggccaagaataaaaccaagcaccacgttcaacgcttttttcggtttcactggctgcggctgagtgactgccgggtcgataatccgcacgttaccaatggcactggatttcgaaatacgaatagaggacggcaacgaaagcggttcgcaagggcggaagttttcacgcggcagcatatcttcgcgcaggatcacggcttcagcgttgttgcccagatccagagagatgttgtcgcggtttacttttttcaccacgccggtgatgatttcaccttcgtgttcacggaactgatcaaccaccatcgcacgttcggcttcacgcactttctgcacgataacctgttttgccgtctgggtagtgatacggtcaaaggtaacagactcaatctgatcttcaacgtaatcgcccaggttcaggctttcatcttcataacgtgcggcttcaagggtgatttccttggtcggctgggtgacttcatcaacaactaaccagcgacggaaagtgtcaaaatcaccgcttttgcgatcgatctgtacgcggacgtcgatctcttgttcatattttttctttgttcgtgtcgccagcgcgctttccaatgcttcgaaaatcttctcgcgaggtagcgccttttcattggatacggcttcaacccggatgctcacttctttactgaagtgcgttacaaagggaccaaaactgttgccgtcacaccagactacgctgaaatcgccaaactgtgcgatctgtggctggcaccgaaacagggcaccgatgcggcaatggcgctggcgatgggccacgtaatgctgcgtgaattccacctcgacaacccaagccagtatttcaccgactatgtgcgtcgctacaccgacatgccgatgctggtgatgctggaagaacgcgacggttactacgctgcaggtcgtatgctgcgcgctgctgatctggttgatgcgctgtttcctgaccccgacgaaatgacagtatcgtgacaataatacccagcaccgcagagatcgccccggcaagaaataccgaagagtaaccaaacgtggtcgccaccattcccggagcggcccggagacgccgagggcgatatcctgaaacgcggcgtaaccgcccagtgcggtgccgcgaacttgtgaggggacgcgtttaaccacctccacgcccagcgcaggaaagataagcgaacatccggctccggttaacgccgcgcccgctaatgcgacccatgcacctggggcttgccagagcagcaacaagcccaccgtttctacaagcagagagacaatcgccactttcacgccgccaaaacggtccggcatccagccaaacatgacgcgcatcacgacaaatgcgccgccaaacgcggtaagagtaaagcccgccatcgcccatcctttgctggcaaagtagagcgaaacgaaagtcccgataacagcaaaaccaacgccttgtagtgccagacctaaccctggtttccagataagcccgacaacgctccacagcgatggacgttctcccgccagggccggtactttgcgcactgtgccgttacaggcccacgccagtacgggtaagaccat

SEQ ID NO: 130144 - DNA, 2976 bp, Homo sapiens
atgctgctggttttggatagtttgatagtacaaggagtgagccaacaggattgcagtcttgcgtatcgcgtgcgcatggacagtcagtcagtgcgccgccaggccatcgttcagtcggcgctggtgtgcgactgtagaggctggagaaatggaaatttggttccaaaaactagggaccaggtaaaagattcctcggaattccctaagggcgaaaaaaggccgccaacgggccggaaaaaaacaggtgttctggttgaacccgcgtatatcaccagttcatcggcaggcacagaaccaccagcgacaaccaccaaacttccaacaaacacacgcttaacaacgaaccacggcaaattcaccaacaactcctcaaggcaactccacaaacttccaaacctcaacaccaccaccattcaccgggaccctaagacccaaaaaatacttcctccaaacaccaaactgaggatggaggtggaaggcttcaactttgcagctctgtatgagctgccactaaaagtgacgatgatctaccagtatatccagagccgcttctaccgctcacctgaggtgctcctgggcacaccctacgacctggccattgacatgtggtccctgggctgcatccttgtggagatgcacaccggagagcccctcttcagtggctccaatgaggtgtgcccccaggaaggggtcgaccagatgaaccgcattgtggaggtgctgggcatcccaccggccgccatgctggaccaggcgcccaaggctcgcaagtactttgaacggctgcctgggggtggctggaccctacgaaggacgaaagaactcaggaaggattaccagggccccgggacacggcggctgaaggaggtgctgggcgtgcagacgggcggggccgggtcgcgtgggcgggtgcagcgggccacagcccgccgacctaccctccgcttcaggacctggtgctgcgatgctggactctttgactgtcgcttcgagcgtggttttagtgacgtcaaaggtgatatccagcgtatctgcgcggtagtgctcctctttcatcgtcacgttcatttcacgaccgatactggtggcgagcgacataacatgcgcttcacgcagcgggtcgattggcgggttagtcacctgggcaaactgctggcggaagtagtcgtaaataatgcgcggctgactggagagcacggcgaatggggtatcatcgcccatcgaaccgaccgcttcctgaccgttttcgcccagtacgcgaattacggagtccagctcttccgcgctgtagttaaactgtttctggtagctggcaagcgtgtcgtcgtccagttcgcggctacccacttcttcatcgggcagatcttcaaacgaattattcgatttccctgctatattcgcaatgatggtagcattaattttggtgaaaatttcacaagtggagtcggtctcaggctggatgcatttggacgtggcgtgatttttttttccgataatgtgcaagttaacgactatgttcatatcgcctcaattgagagcgttacgataggtcgggatacgcttattgcaactgcggttgcggttgctacggaagagggcattgacgacaaggctattttgcgggcgcttgaaagcttccaggggactgttcgccgttttgatttcctcgtggaattcccgctggagccagtgaatggtaaaagcggtacggcaatgctggtcgatgactacggccaccacccgacggaagtggacgccaccattaaagcggcgcgcgcaggctggccggataaaaacctggtaatgctgtttcagccgcaccgttttacccgtacgcgcgacctgtatgatgatttcgccaatgttgataccctgttgatgctggaagtgtatccggctgcgaagcgccaattccgggagcggacagccgttcgctgtgtcgcacaattcgtggacgtgggaaaattgatcccattctggggtctttgtgttggtatttatgccaccaattctgccgagacattcctccatcgggtggtgcaactgctcaacgacagcgttgagcatactctgcaggatgcgattaccatccgggatgaggattttactgccacgccatcacctgctgatgaagtggcctatatccagctttccggtggcaccaccggcacaccgaaactgatcccgcgcactcataacgactactactacagcgtgcgtcgtagcgtcgagatttgtcagttcacacaacagacacgctacctgtgcgcgatcccggcggctcataactacgccatgagttcgccaggatcgctgggcgtctttcttgccggaggaacggttgttctggcggccgatcccagcgccacgctctgtttcccattgattgaaaaacatcaggttaacgttaccgcgctggtgccacccgcagtcagcctgtggttgcaggcgctgatcgaaggcgaaagccgggcgcagcttgcctcgctgaaactgttacaggtcggcggcgcacgtctttctgccacccttgcggcgcgtattcccgctgagattggctgtcagttgcagcaggtgtttggcatggcggaagggctggtgaactacacccgacttgatgatagcgcggagaaaattatccatacccagggttacccaatgtgtccggatgacgaagtatgggttgccgatgccgaaggaaatccactgccgcaaggggaagtcggacgcctgatgacgcgcgggccgtacaccttccgcggctattacaaaaggtccagtgttctcggcaaaggctcggactgttccttcggggtgtttctgccggggcttctgcctagtgcgtcatctgtacgccgggactctaatgtgtctatccggaatgtcgtttcgttgatcaacagttcccggtggaaaagtgggttcacgtggcacgacaacgtgctccaactggacggctcctttccgctaacttag

SEQ ID NO: 130145 - DNA, 1923 bp, Homo sapiens
atgatttccccggtggtcatggcggcaatcatggcggcggttgccggaattatggtgccgctctcggttgatgaattaatgccgctcgccaaagagattgaccctaataataaccccagctatggcgtactatgtggaatgtcagtgattgggattcagtttagtgctgctacaaacggcgggaattggttaaaaacaacatcagaagttgtccagcgcatggacaacttctgccagcttcacgaaagccttattctaccttttcggctgtctcttctctcgtactgtttaagtatttgttccgcgcttcaagcagcaagctggctgacagaccgttataacggctatcgagagcgcgatgtgttgaccgcgggttatggtcgtcagtttttgaatggcccggtacacagtttccgctttgaattcggtccaggtgtgcgttacgacaaatataccgacaatgccagtgaaacccagccgctgggctatgcctccggggcttatgcatggcagttgactgacaacgctaaatttacgcagggtgtttcggtctttggcgcggaagacacaacgctgaactccgaaagcgcattgagcgttgctattaatgactatgtgaactggacgcggacaattgtggaggcgcccaaaaaaaatatttggtttttaaaagagaaaatggggggggggtttaacacgggggaagatacccgcggggaaaaaattccctcccgaggaaaccccggtccaagaaaatttgtaaaaggttggccgagaaaccaggattgcttccgtaccgtcgaatggccaccaatactgggtggccgaggtgccaaccgcttaatacccgatgatgcgcaaacgctgatgaaactgtggcgtgaagcgaaggcgctgcatagcgatccgtttgagccatgggcttctatcattgaagacgccgataaagcgaaaagctctaagcaggcgcgtggacgcggtggatttgttcgttcttcctggcaggaggtgaacgaactgatcgccgcatctaacgtttacaccatcaaaaactacggcccggaccgtgttgctggtttctcgccaattccggcaatgtcgatggtttcttacgcatcgggtgcacgctatctctcgctgattggcggtacttgcttaagcttctacgactggtactgcgacttgcctcctgcgtctccgcaaacctggggcgagcaaactgacgtaccggaatctgctgactggtacaactccagctacatcatcgcctgggggtcaaacgtgccgcagacgcgtaccccggatgctcacttctttactgaagtgcgttacaaagggaccaaaactgttgccgtcacaccagactacgctgaaatcgccaaactgtgcgatctgtggctggcaccgaaacagggcaccgatgcggcaatggcgctggcgatgggccacccccctgaacgagaatcaggtcgttaccggttaatcccggtgccagcatctggctacccgcccgatccggcaccagaatgggatcaatttccccacgtccacgaattgtgcgacacagcgaacggctgtccgctcccggaattggcttcgccagccggatacacttccagcatcaacagggtatcaacctgcgtcagcacattggcgaaatcatcatacaggtcgcgcgtacgggtaaaacgcctgcggcgccgctttaatggtggcgtccacttccgtcgggtggtggccgtagtcatcgaccagcattgccgtaccgcttttaccattcactggctccagcgggaattcaccgaggaaatcaaaacggcgaccagtcccctggaagctttcaagcgcccgcaaaatagcctcgtcgtcaatgccctcttccgtagcaaccgcaacgcagctgcggcgttcagcgcgttatga

SEQ ID NO: 130146 - DNA, 209 bp, Homo sapiens
gtctcatttatgatcatcgccgcgctgatgatgatgggcattgataccggctggctgctggtagctgcgggattcgtcggcgcaatcgtcattgccagcgccgcccggggcgtaactctaagcgcctgattgcactcatctctgcaatcggtatgtccatcttcctgcaaaactacgtcagcctgaccgaaggttcccgcgacgtggcg

SEQ ID NO: 130147 - DNA, 660 bp, Homo sapiens
  misc_feature (1)...(660): n = a,t,c or g
atgcccaaaatcttcaatttcctgccactcatcggcacctgcaattactgcacatacgaaagatatatctcaacgctctctgtgttttatgatcataaaatacgcactcaagagaaaccctatgaccaggatccggcaaaccagggcatcgttgatgcgctgaaagcagacaagaaagatccgtccggcctaatgtctggatcacctacgcgcggtgcaatctctgcgactgcccttgagcgtaccggcagcgatgagacctggcgctgccatcggctacaccatggtttacggcattatcggcatgatcaacttgcccacggcgaggtttatatgattggcagctacgtctcatttatgatcatcgccgcgctgatgatgatgggcattgataccggctggctgctggtagctgcgggattcgtcggcgcaatcgtcattgccangctacggctggagtatcgaacgggtgcttaccgcccggtgcgtaactctaagcgcctgattgcactcatctctgcaatcggtatgtccatcttcctgcaaaactacgtcagcctgaccgaaggttcgcgcggtcttgccacagagatgttccttgagaaaggggacaatggtacagaggatggcagagcaagagaaatatctgagatcatctag

SEQ ID NO: 130148 - DNA, 3306 bp, Homo sapiens
atgacccaccccaactggacacacgtgaccccggtaacaataataccaactggaaaacggcctgacgctggcgtcagcgccggattaagctgcgccgaagcaattgttgccagcgcgaatcacttttgcgaagagttttcccgttccagcagcagctacctgcaagaacgtgccctggacgtacgcgacgtctgcttccagttactccagcaaatctacggtgagcaacgcttcccggcaccgggcaaactgacgcagcccgccatttgtatggctgatgaactgacccccagccagttcctcgaactggataaaaatcacctcaaaggattgttgctcaaaagcggcggcaccacctcacatacggtgatccttgcccgttcgttcaacattccaacgctggttggtgtggatattgatgcccttactccgtggcagcaacaaacgatttatatcgacggcaacgccggggcgattgtggttgagccaggggaagccgtagctcgttattatcagcaagaagcccgcgtacaggacgccctgcgtgagcaacagcgtgtctggctgacccaacaagcccgtaccgctgacggtatccgcattgaaattgccgctaacatcgctcactccgtggaagcgcaggccgcattcggcaatggcttccacgacctagtacgggtattctaccacgtttccggctggtcagcgctcagtatcagcttccccaagtctgggggtcttgttgtggccacggataccacccccggtttccaggccccggaacctgcgtggccgccctttatatccgggttaaactctagaagcgccgtcccgggttctgatgggaaccaccatcatctgaaatttaccgcgcccgtgctctgccggcgcaaccggatatccgcccaccttgcagactttaaatgctatcagtggaaccttctgccattaaaggtggttaagccctggaactctccttgcgccagacgtaaggcgcacatcaacagcttaagctgcccacgcgataaggtatcttccaccggcgcaccgtcggcgcgaatgcgtaagccagacctccaggaaggcattagagcagttccccgagaggatccccagtggaactaccaggcaaattccccagttcattcgctgccagcagagcttcgttttcccaggcaatcagaagcgatcaaaccgtacatcatcggcaactcccgcaccgcggatcagggtactaacatccagaccccggcgcagatggcgaagtatcaccagttctccggttgcatcaactgtggtttgtgctacgccgcgtgcccgcagtttggcctgaacccagagttcatcggtccggctgccattacgctggcgcatcgttataacgaagatagccgcgaccacggtaagaaggagcgtatggcgcagttgaacagccagaacggcgtatggagctgtactttcgtggtggatgagtttggctcggtggaagggattgtgacattaagtgacgtcactgaaaccattgccgattggtgtttccacaaccttcaggtcatggtggttattgagcaactgacgcagctcttccacagcatcgttcaatttttccgtattggcaaaaaccggctgcggattaccttcgtacagcgcatgaacaaggctcagcagtatttgctgcatcatgtgctgggtaaaagctccccctaccctccgcagaaggccgatcgggaagacttcttccaggtcgccgtgcggacgcgggataacgtgtacagataccagctcgccgatacgctgtgccgctgcggcacctgcatcggtcgcggctttacaggctgcaacatcaccacgaaccatggcagtacacaggccgccgccaatctgcttaacaccaaccagcttgacgcgcgcagctttcaccatcgccgccagctcgataatttcctgcacgctacaaccacgagagagatcgtgcatcggcgcggcaagtccttgtatcagtggcccgacggcacgatatccgccgagtcgttgtgcgattttgtaaccaatatttccggcttccagcgactcgacaatgtagcggcgaaagcagcaaaccttatccgtcgcgaccgtccgttaacccgtgaagagctgtttcgcgtagtgcccagtgtattcagtgaggacaaacacgagtcccgtagtgagcgttatacctatatacccaccatctcctgctcgacagcctacagcgagaagcttccaccattctttgcctgtcagacccgcgtgctgacggacctcactctgctctttgtgctcctcacttccttgcttgtacagcttgacactagaagagaaaagcggaaagagcagaaaagtcaacctggtcctgcaaactacatcagcctgaccgaaggttcgcgcgacgttgcgctgccgagcctgtttaacggtcagtgggtggtggggcatagcgaaaacttctctgcctctatgaccaccatgcaggcggtgatctggattgttaccttcctcgccatgctggcgctgacgattttcattcgctattcccgcatgggtcgcgcgtgtcgtgcctgcgcggaagatctgaaaatggcgagtctgcttggcattaacaccgaccgggtgattgcgctgacctttgtgattggcgcggcgatggcggcggtggcgggtgtgctgctcggtcagttctacggcgtcattaacccctacatcggctttatggccgggatgaaagcctttaccgcggcggtgctcggtgggattggcagcattccgggagcgatgattggcggcctgattctggggattgcggaggcgctctcttctgcctatctgagtacggaatataaagatgtggtctcattcgccctgctgattctggtgctgctggtgatgccgaccggtagagaaagtatgaaaccgatgcatattgcaatggcgctgctctctgccgcgatgttctttgtgctggcgggcgtctttatgggcgtgcaactggagctggatggcaccaaactggtggtcgacacggcttcggatgtccgttggcagtgggtgtttatcggcacggcggtggtctttttcttccagcttttgcgaccggctttccagaaagggttgaaaagcgtttccggaccgaagtttattctgcccgccattgatggctccacggtgaagcagaaactgttcctcgtggcgctgttggtgcttgcggtggcgtggcgtttatggttcacgcgggaggtggatttgcacctgaccatgatctacttatcctcggtctcgggctga

SEQ ID NO: 130149 - DNA, 5072 bp, Homo sapiens
gtatctcctttgccgtcttaatttttatcttgctcattactcgctatgcgaaaggatttatgtccaacgtcgccgtattactggggattgtatttggctttttactttcgtggatgatgaatgaagtcaatttatccgggctacatgatgcttcatggtttgcgattgttacgccgatgtcgtttggatccggcaaaccaggcatcgttgatgcgctgaaagcagacaagaaagatccgtccgggccttatgtctggatcacctacgcggcggtgcaatctctggcgactgcccttgagcgtaccggcagcgatgagccgctggcgctggtgaaagatttaaaagctaacggtgcaaacaccgtgattgggccgctgaactgggatgaaaaaggcgatcttaagggatttgattttggtgtcttccagtggcacgccgacggttcatccacggcagccaatacctacgcgctgatagccatcggctacaccatggtttacggcattatcggcatgatcaacttcgcccacggcgaggtttatatgattggcagctacgtctcatttatgatcatcgccgcgctgatgatgatgggcattgataccggctggctgctggtagctgcgggattcgtcggcgcaatcgtcattgccagcgcctacggctggagtatcgaacgggtggcttaccgcccggtgcgtaactctaagcgcctgattgcactcatctctgcaatcgccattaaccccaggaatccgcacatgcgtattgaagaagatctgaagttaggttttaaagacgttctcatccgccctaaacgctccactcttaaaagccgttccgatgttgaactggaacgtcaattcaccttcaaacattcaggtcagagctggtccggcgtgccgattatcgccgcaaatatggacaccgtaggcacattttctatggcctctgcgctggcttcttttgatattttgactgctgtgcataaacactattctgtcgaagagtggcaagcgtttatcaacaattcttccgctgatgtgctgaaacatgtgatggtttctaccggtacgtctgatgcggatttcgaaaaaactaaacagattctcgacctgaacccggcattaaacttcgtttgtattgacgtggcgaatggttattccgaacacttcgtgcagttcgttgcgaaagcgcgtgaagcgtggccgaccaaaaccattgtgctggccaccaatatggtcggttgctatagcggtaaaccgctgaatacgcaaaatattgatagtctggcggcggaaggtattcgctttaattccgcctacacctgttcaccggtttgtacgcctgcacgggccggactatttaccggtatctacgctaaccagtccggcccgtggaccaacaacgtcgcgccaggcaaaaacatctccactatggggcgctactttaaggatgccggctatcacacctgttacatcggcaaatggcatctcgacggtcatgactatttcggcactggcgagtgtccgccggagtgggacgctgattactggttcgatggggcgaactatcttagcgaactgacggaaaaagagattagcctgtggcgcaatggcctaaacagcgtcgaagatttacaggcgaaccatatcgacgaaaccttcacctgggcgcatcgtatcagcaatcgggcggtggattttctgcaacagcctgcgcgcgcagacgagcctttcctgatggtggtttcgtatgatgagccgcatcacccgttcacctgtccggtggagtatttagagaaatacgctgatttttactacgagctgggcgagaaagcacaggatgacctggctaacaaaccggaacatcaccgcttatgggcgcaggcgatgccatcgccagtcggtgatgacgggctttatcaccatccgctctattttgcctgtaatgactttgttgatgaccaaatcggacgggtcatcaatgccttaacgccagagcaacgtgaaaatacgtgggttatttatacctccgatcacggcgaaatgatgggcgcacataagctgatcagtaaaggggcggcgatgtatgacgacatcacccgcattccgctgatcatccgttcgccgcaaggggagcggcgacaggtcgatacgccagtcagtcatatcgatttactgccgacaatgatggcgctggcagatattgaaaaaccagagattctgccgggggaaaatatccttgccgtgaaagagccacgcggcgtgatggtggaatttaaccgctacgagattgagcatgacagctttggcggttttattccggttcaactaaataaacagccattggcggaagagtacgatatttactggtatgctggtgaagatgacgttagcaaaagctatgcttgtctgacaccggaactggtggcgcagtttggtttaaaagaagacgtggcgaaaaatctgcaatggagccacgatggtaaatgcctgaagcccggtcaactggaaggcgtggaaattaaggctgatttaagccagtccgcattagtcatttcactaccgcaggcttacctcgaatatacctggcccgactgggatccaccttctcgttgggatgatggcatctccgggatcattgcggactacagcatcactgcgcaaacacgacacgaagaaaatggcggcgatgacagtaacgagatcagcggcaacgggacggtcggggttaacctggggccatggcgtatgcgcgctgactggcagaccaactatcaacatacgcgcagtaatgatgatgacgatgaatttggcggcgatgacacacaaaaaaaatgggagtggagtcgctattatgcgatctacggtaccagtcacctgaaagctcgtttgcccggcgcttaccaacgcactgacatccgcatggttcaaagactgatgatcggccagcggtacacatttttccggttgtacgccacacatcttcagcgtggcaaaaaagcgcggcggatgcccaatccccgccatcgccactacatgttcaagctgagcaacgtcacaacgcgtaccgggtgttgcgccagaatggcttttaccgcatcagaacgaacgggagaaatgtttattggttttgattacggtacagcaaactgttcagtggcggtcatgcgtgacggtaaaccgcatttgctaaaaatggaaaacgacagcacgctgctgccttcaatgctttgcgcgccaacgcgtgaagcggtaagcgaatggctgtaccgccatcatgatgttccggcagacgacgatgaaacgcaggcgctgttacgtcgggcgattcgttataaccgcgaagaagatatcgatgttacggcgaaaagcgtgcagttcggtctttcctcactggcacagtacattgatgatccagaagaagtgtggtttgtgaaatcaccaaaatcgttcctcggtgccagcggcttaaaaccgcagcaggtagcgctgtttgaggatctggtctgcgcaatgatgttgcacattcgccagcaggcgcaggcacagctgccagaagcgattactcaggcggtgattggtcgtccgatcaacttccaggggctgggcggtgatgaagcaaacacccaggcgcaagggattctggaacgcgcggcgaagcgtgccggattcacggacgtggtattccagtacgagccggtcgcggctgggctggattacgaagccaccttgcacgaagaaaaacgggtgctggtggtggatatcggcggtggtacgactgactgttcattgctgctgatggggccgcagtggcgttcgcgtctcgatcgtgaagccagcctgctgggtcacagtggttgccgtattggcggtaacgatctggatatcgcgctggcgtttaaaaacctgatgccactgctgggtatgggtggcgaaaccgaaaaaggcatcgccctgccgatcctgccgtggtggaatgcggttgccatcaacgacgtacctgcgcagagtgatttctacagtagtgccaacggtcgtctgcttaacgatctggtacgcgatgcccgcgaaccggaaaaagtggccctgttacagaaagtctggcgtcagcgtttaagctatcgcctggtgcgtagcgcagaagagtgcaaaattgctctttcaagcgtagcggaaacccgcgcctcactgccgtttatcagcaatgaactggctacgctgattagccagcgagggctggaaagcgccctcagccagccactgacgcggattctggaacaggcgcaactggcctggataacgcccaggaaaaaccggacgtatctacctgaccggcgctttaacgataactgcgaaggcgtcagctttcagagaagcaccaccaaccggcgcgccgtcgatatccggctgagcaaacagttctgcagcgttagacgcgtttacagagccgccgtactgaatgatcacttgttcagcgatgttagcgtcaactttagcgatgtggtcacggatgaatttgtgaacagcctgtgcctgagccggagttgcagatttgccagtaccgattgcccatacaggttcgtaagcgataaccgcaccttcgaatgccgcagcaccctgagttttcagtaccgcgtcgatctgacgtgcgcaaacttcttcagttttgcccgcttcattttcagcttcggtttcaccgatgcacagaaccggagtcaggccctgctctttcagcaccgcgaattttttcgcgatcagttcgtcagattctttgtggtaagtacgacgttcagagtgaccgatgatgatgtactgtgcgccgatgtctttcagcatagcagcagaggtttcaccggtgaatgcgccggacaggttcaggtccacgttttgcgcacccagcatgatgtggctgccttcagcttcgcgcttcgccatatcgatatacatttccggtggtgcgattgcaaccgcacagccagcaacacctgccagctctttacgcaggttagaaaccagctcgtgaaccatgtggcggctgccgttcagtttccagttacccatcactaa

SEQ ID NO: 130150 - DNA, 941 bp, Homo sapiens
ttaataccaaaaaatttcactcccagcagacctcgccattttcagatcttccgcgcaggcacgacacgcgcgacccatgcgggaatagcgaatgaaaatcgtcagcgccagcatggcgaggaaggtaacaatccagatcaccgcctgcatggtggtaatagaggcagagaagttttcgctatgccccaccacccactgaccgttaaacaagggttcggagccccccgttcgcgccgaaccttcggcaaggcttaagttattttgccagaaagatggacataccgattgcagagatgagtgcaatcaggcgcttagagttacgcaccgggcggtaagccacccgttcgatactccagccgtaggcgctggcaatgacgattgcgccgacgaatcccgcagctaccagcagccagccggtatcaatgcccatcatcatcagcgcggcgatgatcataaatgagacgtagctgccaatcatataaacgcgtccgtgggcgaagttgatcatgccgataatgccgtaaaccatggtgtagccgatggctatcagcgcgtaggtactgcccagcgtgacgccgttaaacatctgctgcaagaaatacaaaaactgctcagacataaggtaacctttctaaacccgcccgcattttacgggcggtgggatgatcacttggctgccgtggatgaaccgtcggcgtgccactggaagacacccaaatcaaatcccttaagatcggctttttcatcccagttcaacggccccaatcacgggagtctgcaccgttgtctattaaattctttaccagcgccatcggctcatcgctgccggtacgctcaagggcagtcgccagagattgaccgccgcgtaggtgatccagacataaggcccggacggatctttcttgtctgctttcagcgcatcaacgatgccctggtttgcc

SEQ ID NO: 130151 - DNA, 1854 bp, Homo sapiens
atgcgccacttcccagggcgcgcaaccagcggccttgcgggtagtccgctgattcaaaaccggttctccgcgcacgtcagcctcgctggtcagcgccagttgctcgacacgctgcgtttacgccaggcatcgatggaatcaaataatttgacgatggtttttgggtcagcattgggaagtctggcggcgtcagccctttaccgagatcgtggcataaagttgcgaaacgacatcgactgcggactcagcatcgccgccattgagagcgtcattaaggttgaatacccgtatcgatttccggatgccacttggcaggggccggaacgcaaacagcgtcaggtgttccagttcacccgcatggtcatctcgcgcatcaacgccagagtttcatcggcaatacgaaaaccgagtgctggccgatttcttccgtaccgcctcaccattggtgagcgtgatgaaccgacatcggcgctggatccggagatgatcaacgagtactggacgtatggtggaactggcgaacgaaggaatgaccatgatggtggtgacccacgaatgggctttgccgtaaagtggcgaatcggcaggcggcgcggtaaaaccgttaagcgtgagttgattatcgcggacaatgtgcacggcgaaagcggtctcgacgcccggcattaccggaaccgacattcgcaccgcaaaactgtacggcgtccagcacaagacgtgatatccaggctcatagactccggcggtgaccgacagccacaacacgacccctgcacggacagcatcaactgccgagttaaacgcagctttacgtaccgtgttaccaccgcagctcagaccatctggcacttttaccgcgtaatcggcgaccacgatgcactctccgccatcccgccatcaacgctgtatccggcatttttaactgaacggcaagcgtttcgttaccactgttacagtattcgcaatgaccgcatccttcaattacgccgttttgtcaccaaaatcgccattcttaacatgaagatcgatgcgttagtgtaccgtatcaaaattggacgttgcatcgacgccataatcgcgcttaccttagttgtaaatattccagggtgtgatcatcataatcgacaagtcactgacatcgttacgatatccggaaatacgccagttcaccccacggttaagcattcaaacgcgccttccaactgtttgcttttctccgggtcagattcggatttccgtagaagccatacagttgccccagatttggtgcctataagatgtcccgtaggaagcaatgaagcgataaccttcgatgaattccaaccggcgctggtttgccagagttacgggtatcgagcaacggtgaaccgggagaataatacgcgtcataattgtacggttatcatagccatagccgcgcacaaagccgctccaggcatcagatccaatccaggataccatgttgcatttgttggtcattctcgttggcctcctccaatctgtgacaatttctcagtccttccttgttttcatgaccttgacagttctgaggagtactggacctgcaagaggagcgtagaccagaatggcgagaatgccgaagcgaggatacctccaataatcaccgttacaacccccgccagtgcaggctggcgtaggcaagggtcccagggaactgccaaagttgccgccgacctgaaagatagttgcgccaggccatgccgcccgccggaagccatacgggccacgcgagaaattccggatgaaagaccgatgaaccggtaccgaccagcgccgccgccagagaactgcgccaaaactgcccgccagcgcaagcagcaccagaccgcttag

SEQ ID NO: 130152 - DNA, 332 bp, Homo sapiens
atgcgccacttcccagggcgcgcaaccagcggccttgcgggtagtccgctgattcaaaaccggttctccgcgcacgtcagcctcgctggtcagcgccagttgctcgacacgctgcgtttacgccaggcatcgatggaatcaaataatttgacgatggtttttgggtcagcattgggaagtctggcggcgtcagccctttaccgagatcgtggcataaagttgcgaaacgacatcgactgcggactcagcatcgccgccattgagagcgtcattaaggttgaatacccgtatcgatttccggatgccacttggcaggggccggaacgcaaaca

SEQ ID NO: 130153 - DNA, 1830 bp, Homo sapiens
atgctcgcctgtgccgcgggtccgctgggttcgtttgtagtctggcgtcgtatgtcttatttcggtgatacgctggctcatgcctcattacttggcgtcgcgtttggtttgttgctggacgtgaatccattctatgcggtgattgccgttacgctgctgctggcgggcggtctggtatggctggagaagcgtccacagctggcgatcgacacgttattagggattatggcgcacagtgccctgtcgctgggcctggtggtcgtgagtctgatgtctaatattcgtgttgatttgatggcttacctgttcggtgatttgctggcagtgacgccagaagatctcatctctattgcgattggcgtggtcatcgtggtggctattttgttctggcaatggcgcaatttgctgtcaatgacgataagcccggatctggcaggcgatttcgtccccttctttgaaaatctgaccaccgcagctattgccctgctgttctttatgcacggcgcgaagttgtcgcgtgaggcgattattgctggcggtggtcactggcgactgcatttgtgggtaatgtgcagcaccttcgtgctgtttccgattctgggtgtactgtttgcctggtggaaaccggtaaatgtcgacccgatgctctactccggttttctctacttgtgcattctcccggctaccgtgcagtctgcaatcgccttcacgtcaatggcgggcggtaacgtcgcggcagcggtttgttctgcgtcggcatccagcctgctggggattttcctttcaccattgctggttggtctggtgatgaatgttcacggtgcagggggcagccttgagcaggtcggtaaaattatgctgcaactgctgctgccgtttgtgttggggcatctttcccggccgtggattggtgactgggtgtcgcgcaataaaaaatggattgcgaaaactgaccagacgtccattctgttggtggtttatacagcgttcagcgaagccgtcgttaatggtatctggcataaagttggctggggatcattgctgtttatcgtggtggtcagctgcgttcttctggctatcgtgattgtagttaacgtctttatggcacgccgactgagcttcaataaggcagatgaaattactatcgtcttttgtggttcgaaaaagagtctggcaaatggcatcccgatggcaaacattctgttccccacatcggtgatcggtatgatggtgctgcccctgatgattttccatcagatccaattgatggtctgtgcgctcaccgagcttcctgccgggaactcatctttgcgggcaaacgtccgcaggtcgatgtccgtttcgaaactttatgccacgatctcggtaaagcgtgacgccgccagaactctggccgcgtcatcatggtcatggcccggcggtgttaagttagtggaacaactatgccagcgtctgcgcgtgccaaatgaaattcgcgatttagccagactggtggctgagtttcacgatctcatccacaccttcccaatgctgaacccaaaaaccatcgtcaaattatttgattccatcgatgcctggcgtaaaccgcagcgtgtcgagcaactggcgctgaccagcgaggctgacgtgcgcggcagaaccggttttgaatcagcggactacccgcaaggccgctggttgcgcgaagcctgggaagtggcgcagtcagtgccgacaaaagccgtcgttgaagcgggatttaaaggtgtggagattcgcgaggagctgacccgacggcggattgcggcggtagccagctggaaggaacaacgttgcccaaagcctgaatga

SEQ ID NO: 130154 - DNA, 1608 bp, Homo sapiens
atgattgatgtcttagggccggagaaacgcagacggcgtaccacacaggaaaagatcgcaattgttcagcagagctttgaaccggggatgacggtctccctcgttgcccggcaacatggtgtagcagccagccagttatttctctggcgtaagcaataccaggaaggaagtcttactgctgtcgccgccggagaacaggttgttcctgcctctgaacttgctgccgccatgaagcagattaaagaactccagcgcctgctcggcaagaaaacgatggaaaatgaactcctcaaagaagccgttgaatatggacgggcaaaaaagtggatagcgcacgcgcccttattgcccggggatggggaacgaaccgatgactggatggatggccgccgcagtcgtcacactgatgatacggatgtgcttctccgtatacaccatgttatcggagagctgccaacgtatggttatcgtcgggtatgggcgctgcttcgcagacaggcagaacttgatggtatgcctgcgatcaatgccaaacgtgtttaccggatcatgcgccagaatgcgctgttgcttgagcgaaaacctgctgtaccgccatcgaaacgggcacatacaggcagagtggccgtgaaagaaagcaatcagcgatggtgctctgacgggttcgagttctgctgtgataacggagagagactgcgtgtcacgttcgcgctggactgctgtgatcgtgaggcactgcactgggcggtcactaccggcggcttcaacagtgaaacagtacaggacgtcatgctgggagcggtggaacgccgcttcggcaacgatcttccgtcgtctccagtggagtggctgacggataatggttcatgctaccgggctaatgaaacacgccagttcgcccggatgttgggacttgaaccgaagaacacggcggtgcggagtccggagagtaacggaatagcagagagcttcgtgaaaacgataaagcgtgactacatcagtatcatgcccaaaccagacgggttaacggcagcaaagaaccttgcagaggcgttcgagcattataacgaatggcatccgcataggctgacgccgccagaactctggccgcgtcatcatggtcatggcccggcgggtgttaagttagtggaacaactatgccagcgtctgcgcgtgccaaatgaaattcgcgatttagccagactggtggctgagtttcacgatctcatccacaccttcccaatgctgaacccaaaaaccatcgtcaaattatttgattccatcgatgcctggcgtaaaccgcagcgtgtcgagcaactggcgctgaccagcgaggctgacgtgcgcggcagaaccggttttgaatcagcggactacccgcaaggccgctggttgcgcgaacgctgggaagtggcgcagtcagtgccgacaaaagccgtcgttgaagcgggatttaaaggtgtggagattcgcgaggagctgacccggcggcggattgcggcggtagcagctggaaggaacaacgttgcccaaagcctgaatgagtattgggcattttgccggatgcggcgtaaacgctttatccggcctacattcgtgctcccgtag

SEQ ID NO: 130155 - DNA, 867 bp, Homo sapiens
tcattcaggctttgggcaacgttgttccttccagctggctaccgccgcaatccgccgtcgggtcagctcctcgcgaatctccacacctttaaatcccgcttcaacgacggcttttgtcggcactgactgcgccacttcccaggcttcgcgcaaccagcggccttgcgggtagtccgctgattcaaaaccggttctgccgcgcacgtcagcctcgctggtcagcgccagttgctcgacacgctgcggtttacgccaggcatcgatggaatcaaataatttgacgatggtttttgggttcagcattgggaaggtgtggatgagatcgtgaaactcagccaccagtctggctaaatcgcgaatttcatttggcacgcgcagacgctggcatagttgttccactaacttaacacccgccgggccatgaccatgatgacgcggccagagttctggcggcgtcagccctgcggactcagcatcgccgccattgagagcgtcattaaggtatgaatacccgtatcgatttccggatgccacttgggcaggggccggaacgccaaacagtgcgtcgctggactctacaggatctctaaggattttgcgccctggttttttaccattatcgatcagcagaacccggcgtctgcctgactggcttttgtgctgttctacgaagccatcaatggtttccatgacacagccaacgccgtggcaaccgttatctatacccgcgcgatgcgttctcagctcgccgtggttatggcggcggtattcaactttttgggtgttttgctgggtggtctgagtgttgcctatgccattgtgcatatgctgccgacggatctgctgcttaatatgggatcgtctcat

SEQ ID NO: 130156 - DNA, 819 bp, Homo sapiens
atggaacatggaagtgcccgggtcctgctagcagaaatcgggcaacaaacatcatccagctgtcacaagcacaagagtcaacctccaagggtccccgcactacactttgcgaccgccaagcggatcaacgcgcggccgcacgttcgtgtgaccgccgtggccatccctttattgtttgttccctcttggctctcgcttacccttatgttccgctcgtttttggggatttgctcggttcccgttgaccccggaacctgtatgcccttgtttccgattcgagcctcggtacccatgtcgcgattgctgagtccgcagctcgatgtccgtttcgcaactttatgccacgatctcggtaaagggctgacgccgccagaactctggccgcgtcatcatggtcatggcccggcgggtgttaagttagtggaacaactatgccagcgtctgcgcgtgccaaatgaaattcgcgatttagccagactggtggctgagtttcacgatctcatccacaccttcccaatgctgaacccaaaaaccatcgtcaaattatttgattccatcgatgcctggcgtaaaccgcagcgtgtcgagcaactggcgctgaccagcgaggctgacgtgcgcggcagaaccggttttgaatcagcggactacccgcaaggccgctggttgcgcgaagcctgggaagtggcgcagtcagtgccgacaaaagccgtcgttgaagcgggatttaaaggtgtggagattcgcgaggagctgacccgacggcggattgcggcggtagccagctggaaggaacaacgttgcccaaagcctgaatga

SEQ ID NO: 130157 - DNA, 3192 bp, Homo sapiens
tcacgatggtttaagttcgcggaaacggttgtcatccgggaaaatgtcgaagccagggatggattccagtttgtcgagcgtaccgccagtatgaccgaggccgcgaccagagatcatcggaatatagccgccgcaggctgcgaccatcggccccaacatcagcgaagtcacatcgccgacgccaccggtggagtgtttatcaacaatcgggccattcagatgcaggcttttccagtcgagaacggttcctgaatctcgcatcgccatggtcagcgagacacgctcaggcattgtcatatcgtggaagaaaatggtcatcgcgagggcggcaatctgcccttcggagatagtgttgtcgcgaataccgttgataaagaaacgaatttcttcatcgctcagcgcatgaccatcacgttttttacgaataatttcgtcgccgtgacccagcgctttcagcaggcttgccagcaggctggaagcgccaaagcggtagtgacgcgcatctgcccagtcagcaccgaacagttcatctgcaatggcgagatatttctgcgcatcctctttctccatgagatctttagcgaactcaacgatcaaaatagcgtttttggccgacaagccaattgtcgttagcaagcccaccataaagtagacgtcatttttttgattaaagagtgtcgccgccagcagcacgccgacaatccctaacggcactaccaacataaccgagacaggaattgaccagctttcatagagtgcagcaaggcacaggaaaacaaccacaaaggaaattgctaccagagcgggagcctggtttcccgataagcgttcctgatacgacatacccgtccagtcataaccaatgcccgcaggtaattttgacgcaaggttttccatcaacgccatggcatcgccggaactggttcctggcgcggcttccccctgaatctccattgacggcagaccgttgtagcgttccagtcgcggagagccatacacccaatgtgaagtggtaaaggccgagaatggcaccatttcgccgttggcgctgcggacataaagtttatcgacatcttctggcagcatacggaatttggcatccgcttgaacacccgccgggccatgaccatgatgacgcggccagagttctggcggcgtcagccctttaccgagatcgtggcataaagttgcgaaacggacatcgacctgcggactcagcatcgccgccattgagagcgtcattaaggtatgaatacccgtatcgatttccggatgccacttggcaggggccggaacgccaaacagtgcgtcaatttccgggaataaaacgcgcagtgcgccgcaatcgcgcagtacctggaagaacacctgtggattgcggatggtgagggcgctttccgtctctttccatacccgttcaggcgtcaggtgttccagttcacccgcatgggtcatctcgcgcatcaacgccagagtttcatcggcaatacgaaaaccgaggtgggcataacgcgcagcaaaacgcgccacgcgcaatacgcgtaacggatcttcgccaaaagcgggggaaacatggcgcaacagacgattttgcagatcgcccagaccgttgtacggctcgataactcttacaaaagcggcatgggtattgaccagaaaatcgtgaaagatactgccactaataaaggcaaagcgaagcagactctgaactttaaagcctggctggtcggcgcagctgatgcgccagatctgggtaatttcgaagcaaataccaccttccagattacttaccgcaagaatggtttcatcgttatcctgcaagctatattcttcagcccactgcaggaccttgcgagccttgaaccttttttcacactcggcgctttcaaatttatccatgccattgccgacccattctggctcatccatttccgcatcatcgtaaatgctatccagccattgccggtaagcatcagggaaaaataaggatgctccattaagctcctcaatatgttgctgcgtccgccacatgactctaacgttgctataaatatgctcatgtcgtccgtaaccctcgccatcaggcagcaaaatggtggcaacaggaatctcaaaaccagcgggacgatatttgcgatgatggcgatgtaaacggcccaatcgttggaaaagcaaatctgcaggacaatgcttcccttcgatcatccctttaatcgatcctttcacccaaaatgccatatacatatggatcaggatggcgtggatcaggatgatacccgcagccgcgtggatcagcaggctgtagcgaacaacctgcatcgggaagtactgcgcaaagtacggacgccagataatcaccccggtcaccagcagcacgaaaatcatgctcatgatcgaccagaacatcatcttttgcccggcgttgtacttaccgacatccgccactttatgctcattgcctttcaatacttcgacaatgttcaacagccacggaatatctttcttatccgggatgttgtgatgcacaaaacgcacaaacataaacatcagtgcgacgaaaatcgcaatgccgaagaacgggtgcaaaatgcgtcccatagcgccaccaggaagaagcaaatcaccacggtccagtgacaggcgcgatgggcgagtacgaccctgttcatcaaccggtgcgttcagtttgttaacgataacgccggtgatgttggtgtttttggcaccgccgaagctgttgcgggtcagttcgatacgctctttcagctgttccggggtgtcagtgccctgagacataacgaagacgatttccgcattcagcgttttagcgatttcgtagttcagagactgggcaaactggtgcttacgtgtcgggaccagaccttcaaccagaacgacttcagcgtctttggtgttagcgtggtagtttgcgacgatctcttccatcagcacatctttctgattgctggaaagcagaccttcaacgtagctcattttcagcggttcagcggccgtcgtggtggaagagttcgcacgcacgatagtcgtagtctgatcgggcgcatcgccaccggtacgcggctgagcgataggtttgaaaacgctcagacgaacgcctttgcgttccattgcacggatcacgccaaggctgacgctggtcagaccgacgctggttccggtagggatcagcat

SEQ ID NO: 130158 - DNA, 1016 bp, Homo sapiens
acgctctcaatggcggcgatgctggtccgcaggtcgatgtccgtttcgcaactttatgccacgatctcggaatagtgtcggatgcttggcgttgtcaacgattgcgtaggccgaaaaggcgttcacgccgcatccggcaatcaacgcctgatgcgacgcttgcggtcttatcaggcctacaactgtcgttgacatgtagccggataaggcgttacgccgcatccggcaaaatgcccaatactcattcaggctttgggcaacgtgttccttccagctggctaccgccgcaatccgccgtcgggtcagctcctgcgaatctccacacctttaaatcccgcttcaacgacggcttttgtcggcctgactgcgccacttcccaggcttcgcgcaaccagcggccttgcgggtatccgctgattcaaaaccggttctgccgcgcacgtcagcctcgctggtgcctgttctctttcctgatgtctaaaggccgtgacctgcagctgcgggtggtgcagacaacccggcaggtgttgatgataaagatctgtctgaaaacgttacggcatggcggcttctttccactccggagaaataaccacgcaccgaacaccggcaccctggcggatggttgtgatgtctcccgcccggtcaatggcgcacgacttagcgcaaacagcgtggcgtggtgccctcgtccgttacctgacacgctggcgacaatgacgccgcaggcttatacagtattcaatacgacgccgaaaaatcgctctggcataacgttgagaacgtcaactggacgctcagttcttccatatgggaatgggattccgtcgccggacattatgggctggtataacaaacgcccaagtctgtgggtggaccgcgtaacaagtgggattcgttccggtgcctttcctatccaggcaccacctgagaaagttgtcatttgggtcgcacttggaagttacatctgtgaagtttctgtcattcgtccagattgtgtgtgtagcatgtgctga

SEQ ID NO: 130159 - DNA, 2859 bp, Homo sapiens
atgaaggttttagagaagaggaacaatgcttcctctgagcctgaagaaaagaatgaaataagggctgcaagggaacatgcaggtttcacactacaggagcttgtctgtcttggtgcaagtgggagaaaagtacaaggtgaagcagcaaatgctgaggaagaagttgcagcaggtgaactggataatatagctaagataacaaatgaaggtagctacactgaacaacagattttcaatgaagggtacatgtggctttccacattaatgaaaataaaagaaaataaaatatcctgttcctgggccacacaatctcatttccagggctcaatagatgcgggtgaactggaacacctgacgcctgaacgggtatggaaagagacggaaagcgccctcaccacccgcaatccacaggtgttcttccaggtactgcgcgattgcggcgcactgcgcgttttattcccggaaattgacgcactgtttggcgttccggcccctgccaagtggcatccggaaatcgatacgggtattcataccttaatgacgctctcaatggcggcgatgctgagtccgcaggtcgatgtccgtttcgcaactttatgccacgatctcggtaaagggctgacgccgccagaactctggccgcgtcatcatggtcatggcccggcgggtgttaagttagtggaacaactatgccagcgtctgcgcgtgccaaatgaaattcgcgatttagccagactggtggctgagtttcacgatctcatccacaccttcccaatgctgaacccaaaaaccatcgtcaaattatttgattccatcgatgcctggcgtaaaccgcagcgtgtcgagcaactggcgctgaccagcgaggctgacgtgcgcggcagaaccggttttgaatcagcggactacccgcaaggccgctggttgcgcgaagcctgggaagtggcgcagtcagtgccgacaaaagccgtcgttgaagcgggatttaaaggtgtggagattcgcgaggagctgacccgacggcggattgcggctgcatccgacactattcctcaattaaatgaacacgacatacaccgcaggcggcacaataaagcgataaatggcgaacgggatcaacgaaatgcgcttaatcaattgcaggaaggttttaatcgctatcagcgccaccacaaaagcggtgatcaacccaacggcaaacatcgggatatcgccgcttgtcaggaagccccagctttagtagagatcgagcgccgttgcgcccatcatcatcggcaccgccagcaggaacgaaaatctgaacagcatgctgcacgctttggtattgcgaatggcgatctggtgcgtgtctggaacaaacgtggtcagattttgacaggcgcggtggtgactgacgggatcaaaaaaggcgtggtatgcgtgcatgaaggtgcatggccagatctggaaaatggcttgtgtaaaaacggcagtgcgaacgtgttaacggcggatatccccagctcgcagctggcaaatgcctgtgccggtaactcagcgttggtgtatatcgaaaaatatacgggcaatgcaccgaagttaacggcgtttgatcagccagctgttcaggctaataccagacctttacggcttgcgcgcaatcagcaccgcgcgtttaggtgccggataaccttccaccgttttacccggatcatgtgggtcgaggaaatcggccagcgattcggtaaccatccattcgggcgagtccgaatccaggactcactttgcgtctgtggtgctctacgctacatttctgctacattcaacgtttggcggaaacgcgcggtcacatgcgttcggtcttttggctcggattttactggaagccccccgctaagagcgcccaaaggagagtctattcgtcgcctacttgccttacgtgaagcgggaatcattcatattctcgccctcggtgaagactacaaaatggaaattaatgagtcgcgcaccgtcctgaaaacggaagacaacagctactcgtttgacgtttttattgatgcccgcggacaacgtccgcttaaagtgaaagatatccctttccctgggctacgcgagcaattacagaaaacaggggatgaaatccctgatgttggcgaagattatacgttacagcaacccgaagatattcgtgggcgcgtagcgttcggcgcgttgccctggttgatgcacgaccagcctttcgttcagggacttacggcatgtgcagaaattgctgctgcctgcggtcctttcgataaagatcgcattgaaggcggcattgtggtgcggatggcgaaagagggcgaaacgctggtgctgctcgacggtactgaagcgaagctgaatgctgacactctggtcatcgccgaccacaacaaggcgctggcgatgggcggcatcttcggtggcgaacactctggcgtgaatgacgaaacacaaaacgtgctgctggaatgcgcgttctttagcccgctgtctatcaccggtcgtgctcgtcgtcatggcctgcataccgatgcgtctcaccgttatgagcgtggcgttgatccggcactgcagcacaaagcgatggaacgtgcgacccgtctgctgatcgacatctgcggtggtgaggctggcccggtaattgatatcaccaacgaagcaacgctgccgaagcgtgcaaccatcactctacgtcgtagcaaactggatcgcctgatcggccatcatattgcggatgagcaggtaactgacattctgcgtcgtctcggctgcgaagtgaccgaaggcaaagacgaatggcaggcagttgcgccgagctggcgtttcgatatggagattgaagaagaagacgtttga

SEQ ID NO: 130160 - DNA, 688 bp, Homo sapiens
caggttcgtaaggttttggtgaaaaggttaaatcgtagaagctagtatatttttataattttgtaacaatggcttttttcatgggggagcggggttaagtattatagtcctaacaagtccagtaattttttataaatcttcagattataaacagcccctaaaaactttacaacgtttacacagttttttaaaaagagactgtatacacttgatttgctttcaaaataaataaggtccagctaagtcttaggaaggttaacgtcggttaggaatgctgaatcatgataaggtttggttttctacagattctgttccggtgcctttcctatccaggcaccacctgaagaaagttgtcatttgaggtcgcacttgggaagttacatctgtgaaagtttctgtcattccgtccagatcgtgtgtgtgtagcatgtgctgaggaagcacgtgctgggctgtgcctcagacagtgcatcaccgggcacccagaggcttgcctggctattcctgttctggtgtgtgtggagtgttggggaggaacagatgcagatcaacctgtggctgttttcccgtctaggttctcacaggtatctcctgacagaggtacttaacaatggctctgctggaaatttctataaataaaatgtccaaaatggtaaaaaaaaaaaaaaaaaaaaaaagggcggccgct

SEQ ID NO: 130161 - DNA, 606 bp, Homo sapiens
atgaatcgcccaacgctcttcttcaccgatctcgcctttcatgtcgaccggttcacccagtacgttcatgatacggcccagagtcgctttacctaccgggacttcaatcgggtgttcgaggtcttttacatccagaccgcgacgcagaccgtcggaggaacccattgcgatggtacgtacgataccgccgccgagctgctgctgaacttccagcaccagacgctcattacctatgttgagaaatacatactaacaaatgacagacaatgtcatcacaggaggatattttacacatttcttgaatctttagcttacctcacctcgaaagccatagagatctgccaggtgacttcgttagatattccaaccgtaagcgtgcgcaaatcccactggggaaatgcgctaacggcgacgctgcaaacagaaaaacgcccgctatgcctttccctggcgcgtcaggcgggagcagcgaaaaacgccacgttgccctctggaatgcaacaactgaacattgtcccgggtgcgcttccggactggctggttagcacagaggatctgaaaaatgttacccgcgacccattagctgaggccagacgggtgctggtg

SEQ ID NO: 130162 - DNA, 579 bp, Homo sapiens
gaaggcgttgctggataccctgctgcgtcgttatgtcgaatctcaggtttatcagggcgtggttgaaaacctggccagcgagcaggccgcccgtatggtggcgatgaaagccgcgaccgacaatggcggcagcctgattaaagagctgcagttggtatacaacaaagctcgtcaggccagcattactcaggaactcaccgagatcgtctcggggggccgccgcggtttaaacaggttatttcgtagaggatttaaagatggctacctggaaagattgtccaggtaatcggccgccgtagttgacgtccgaattccctcaggatgccgtaccgcgcgtgtacgatgctcttgaggtgcaaaatggtaatgagccgtctggggctggaagttcagcagcagcttcggcggcggtatcgtaccgtacctcgcaatggggttcctccgaacgtctgcgttcgcggtcttggatgtaaaagacctcgaccacccgattgaagtcccggtaggtaaagcgactctgggccgtatcatgaacgtactgggtgacccggtcgacatgaaaggcgagatccccgggtt

SEQ ID NO: 130163 - DNA, 919 bp, Homo sapiens
tgatgctgcactctactgcgttggcatttactgccacggtgccggatctgctgaaaatagcccgcgatattaacgccgccacgtatacaaccttttaccgccttcggcattgccgcggtgctctatttaatcatctcttatgtcctgatcagcctctttcgcagagcggaaaaaacgctggttgcagcatgtgaaaccttcttcaacgcactgagaatacgatgtccgagaataaatttaaccgttatcgatttgcacaaacgctacggcgaacatgcagcgtctgaaaggggtatcactgcaagcgaatgccggagatgtaataagcatcatcggatcgtcgggatcggggaaaagtacctttctgcgctgcattagcttccaggaaaatcagaggggaggctccatggtggtcacagtccagacgatcaatctggtgcgcgacaaagacggtcaactcaaagtcgccgataaaaatcaactgcgcttactgcgcacacgcctgacgatggtattccagcacttcaatctctggagccatatgacggtgctggaaaacgtcatggaagcgccgattcaggtgttgggcctgagcaaacaggaagcgcgcgagcgggcggtgaagtatctggcaaaagtcgggatagacgaagaacctgcagagacacgagtacgttcacctacgcccgcaaacacagaaccgcgacgcagaccgtcggaggaacccattgcgatggtacgtacgatacccgccgccgagctgctgctgaacttccagcaccagacgctcattaccattttgcacctcaagagcatcgtacacgcgcggtacggcatcctgagggaattcgacgtcaactacggcgccgattacctggacaatctttccagtagccatcttaaatcctctacgaaataa

SEQ ID NO: 130164 - DNA, 696 bp, Homo sapiens
atgtatttacgccttaatgaagtggcaacgaatcttgtggtactgggatatatagaacaagaacaaagcaaatggttatcccaggataacgccatgctggttacccacaatggacgtcttttaaaaaccgtcaaacttaataataatctgctggaagtgacaaattccgggcaggaccctctgcgtaacgcgctggcaataaaagatggcagccgctggacgcgcgatattctctggagtgaagacaaccattttcgctctgcgaccctgagttctactttttcctttgctggattagagacgctgaatattgcgggtcgcaatgtgctgtgtaatgtctggcaggaagaggtgacttccacgcggccagaaaaacagtggcaaaacacattctgggtcgattcggctactggccagtcgtatttcattgccagcgtactttacgtaatgacaccccatgcctttgcgcaaggaacggtgactatttatctgcctggcgaacaacagacactttccgttggccccgtggaaaatgttgtccagttggtgacacaaccgcacaggacaggcaagcttgcatgctgttgtcactctagaggatcccgcgggatttctatgctgacttatgcgcatcaagaatttgcacggcaatccacgttgccataccaccgcttccgcctgtgtcagttagtttga

SEQ ID NO: 130165 - DNA, 714 bp, Homo sapiens
tcgagcgcgactctagaggatccaggcgttgcttattccactatgtatttacgccttaatgaagggcaacgaatctttgtggtactgggatatatagaacaagaacaaagcaaatggttatcccaggataacgccatgctggttacccacaatggacgtcttttaaaaaccgtcaaacttaataataatctgctggaagtgacaaattccgggcaggaccctctgcgtaacgcgctggcaataaaagatggcagccgctggacgcgcgatattctctggagtgaagacaaccattttcgctctgcgaccctgagttctactttttcctttgctggattagagacgctgaatattgcgggtcgcaatgtgctgtgtaatgtctggcaggaagaggtgacttccacgcggccagaaaaacagtggcaaaacacattctgggtcgattcggctactggccaggttcgtcaaagtcggcaaatgttaggcgcaggggttattcccgtagaaatgacgtttcttaaacccgcaccatgaataaattacagtcgtatttcattgccagcgtactttacgtaatgacaccccatgcctttgcgcaaggaacggtgactatttatctgcctggcgaacaacagacactttccgttggccccgtggaaaatgttgtccagttggtgacacaaccgcaactgcgcgatcgcctctggtggcctg

SEQ ID NO: 130166 - DNA, 900 bp, Homo sapiens
agtacctgttcttcccgctcccacctccacctaattcaggcatccccaatccttccaaactatgtggccactgcagtagcagcacgcatcatagcagatgttcaaggaatctctgatacttgtgtgattgcgcagccttcaccaccacaccctggagctttgaggaccttagtattcaccacagatgaaccggagactcctcagcccccaggtgcagcaggattccagctggtccagaagaaacaagtgcagctgcataacgtactttatgtaatgacaccccatgcctttgcgcaaggaacggtgactatttatctgcctggcgaacaacagacactttccgttgcccccttgaaaaatgttgtccagttggtgacacaacagcatctgcgcgatcgcctctggtggcctggtgccttcctgaccgactttgcggcgaaagttaaagcgcttaaagacttcccaaccatgtcatggcacagcgtgcttccggggaagcagaagccgacgacgatgtggcggcaacgattaaatccgtgcgccagcagttactcaatctcaatatcactggtcgcttaccggtcaaactggaccctgattttgtacgagtggatgagaacagcaatcccccgttggtcggggactatacgctctataccgtacagcgtccgggtaccgagcaagggtcgttcaaggtgaagcgggcccgagctagagttcgtcaaacccgggcccctttatttggaccaaagtccccagctcctgagcacatggagtcagaactcgaatttgagcttatcggcccaagcaaatcaacaagtgggaatcctagagggcttcgttctgaaaggccagttctcttctgcctgtacccagagatgcccactgctgctgccaggg

SEQ ID NO: 130167 - DNA, 1062 bp, Homo sapiens
tcagatggccacactgttcggaatccggtctggggacaagtagtaatatggcagctgcttcttcttgttgcgctcagcaatcacgctgacaatggcctcgaggttcttgcggaatcgggccatggcttccttcacaggcttctcgataaaatgctcttctgggtacatgcccaggaacagctcgttttcctggaactggctcagcgcccacactgcacccagatgccagcaggagcggccgcggtcgggcagcgtgtccacgatctgctcaatggtcaccacgcccttggcagtcggtggcggggctcgcatggttgggggcgcattggggatccaggagcaccagtcgtactgcggagacgaccgccagcaagcgtgggcacccccgaagccctgctgcccagctgccccctgggccccgtcctccccgtgccccccaactccagcgggccctgcagtccgtccatcctctttccccgcggccagcgcccttggctggccgaagttgaccgcggcgtgctgggcggaggcggtgaagatcaccacggtcaggtactccgacagctgctcccggctcttgaccgacttggggaagcctgtccagtctatgctattaaaggacataagaaaggtatacaattggcagtaaacaatttccttcagctcttcatggatgtccaggaaaatgacaacccgcacacaatcagacgtgaatgatttctgctccagtgtcttcaggctctggacctcctgctccaagctgagctgccgctccaggctgcactctaccatctccgtggtcaccgggagcttctcgggcagctctgtgcagcgccggatcaacacagggttgcagccattcaggaactggtagccaaacatcaggtcttcctgccagtgattcatgacccgctcagaaatagtgttgctgatcttgacaaagattttctcaaagtcggcgaagtcattccaagaagactggaacatgtgcatgaagcggttgatgaacaggttctccatcctgcagaccaggagagaggtcaccttgcgcacactagccat

SEQ ID NO: 130168 - DNA, 1598 bp, Homo sapiens
  misc_feature (1)...(1598): n = a,t,c or g
atgggcctgagccctctacatggactggcgatgttgcgagaggtacggtcggcacacagtacatacaacgtggattctagtcggattgcagcggcacccctgccaccccctgcaatcgtcttccaggctgcaaacagcgagtggggaggtgaacacatcagcttttcctccctccacaccaccaggaaatttcgcaaaccacttggctctcggcggcctggcctcgccacacctgtgcccacagtctctctccgctgcagccccctgtgccattctccaggccccacgtacctctgcctgggcccagtaagacctggtcagatggcccccggctgcaaagccttcctgggccccatcagagaggacgcccaggaggtgaggagcgcctctggccagccgccccacctgggaggcgaggagcgcctctgcctggccgccccatctgggaggatctgccactgtgaaggagatgatgagagccccctgatcaccccctgccactgcacaggaagcctccacttcgtgcaccaggcctgcctgcagcagtggatcaagagctccgacacgcgctgctgcgagctctgcaagtatgagttcatcatggagaccaagctgaagccactgagaaaatgggagaagttgcagatgacgtccagcgagcgcaggaagatcatgtgcttcagtgacattccacgtcattgccgtcccatgtgtggtctggtccttgtatgtgctcattgaccgtactgctgaggagatcaagcaggggcaggcaacaggaatcctagaatggcccttttggactaaattggtggttgtggccatcggcttcaccggaggacttctttttatgtatgttcagtgtaaagtgtatgtgcaattgtggaagagactcaaggcctataatagagtgatctatgttcaaaactgtccagaaacaagcaaaaaaaatatttttgaaaaatctccactcacagagcccaactttgaaaataaacatggatatggaatctgtcattccgacacaaactcttcttgttgcacagagcctgaagacactggagcagaaatcattcacgtctgattgtgtgcgggttgtcattttcctggacatccatgaagagctgaaggaaattgtttactgccaattgtatacctttcttatgtcctttaatagcatagactggacaggtgactatttatagtggcttctctttttctaaaccctccttagtctcctagaaaaccttcctgtgggccaggcatgcctgggtcctgcctctgcctggcagctctgtgggaaagtggaagaccccatgatgacatcatggggagccagcagagttcctgcccatggtcttgagctgaatgagagaataaaatgccaatcccaagggaagaggaaggagcaaggggtgcccagggncctgataccccagccgcctccagcttgcagtggtccccagcctggagcagagcatttggggagtgtctaagccatgacgagaagattccctctgcatcacggcgaacccccaggagatggtatttgaaaacagacccccaaacacagactcctgcctgccctcttgccgatg

SEQ ID NO: 130169 - DNA, 1194 bp, Homo sapiens
atgggtcagaaaggcctggttaaaatctttgcttggatgcatacttactattcttatccgcatctgaccacttttcagcatccgttatcggaagtcctgagcaaatgctggatctatttcaatctttaccttgccccctttcgtatgccggtttttttctttatatccggctatttgattcgccgctatatcgacagcgtaccgtggggaaattgtctcgataaacggatctggaacatcttctgggtgctggcgctttggggcgtggtgcagtggctggcgttaagtgcgctgaaccagtggctggcacctgagcgcgatttaagcaatgcctccaatgccgcttatgccgattccaccggtgagttcctgcacgggatgatcaccgccagcaccagcttgtggtatctgtatgcgttaattgtctatttcgtggtatgtaaaatttttagccgtctggcgctgccactattcgccttgtttgtactgctgagtgtggcggttaatttcgttcccacgccgtggtggggaatgaacagtgtgatccgcaatttgccttattacagccttggcgcatggtttggcgcaacaataatgacctgtgttaaagaggtgccgttgcgccgccatctgctgatggcttctttgcttaccgttctggcggtcggtgcctggttgtttactatctcgctgctgttgtcgctggtatcgattgtggtgatcatgaagctgttttatcaatacgagcaacgattcggtatgcgctccaccagcctgctgaatgtgattggctccaacaccattgctatctacaccgtcagcaaaaaccacgcaatgatagtcattgaggatttgaaggtcagcaacatgtcaaagtcagcagcggattgtattctcccaccatggctgaaatcagataaactgggggttttatttaatattgtcggcctggcgaaccccggtgctgaatacgccgcaacgcgacataatgctggtgcctggttcgttgacttactggcagagcgtttgcgcgctccgctgcgcgaagaggctaaattctttggttatacttcgcgagtcactcttggaggcgaagatgtccgcctgttagtcccgactacatttatgaatctcagcggcaaagccgttgcggcgatggccagttttttccgcattaatccggacgaaattctg

SEQ ID NO: 130170 - DNA, 717 bp, Homo sapiens
tcatgcccgcaggtccatctccgtgctgtaacgctgcatggaagccgcgtctgcaaccggtttgcccgcctgttccaggttcagcagtttaaccgtaaccgcctgctgataaccctgcggcttaacagagatttgataacgaccacgatactgctcgtcttcgtccagacggttccattgtacccaatcggtggtcagtgtctgaccagcatcatcacgttgggtgatggtgtagtttttcgcctgcagcacgctaaccacctgcggccacagagtattgccacgaccattttccaccagcaatgaagcggtatcgccgtgaactgggtacgcgcgccagaaaccagtgccagcgctgggctggtggacgaatgtcagcgccagcaccgcaccgccgataatattacccagcatcaccgggagcagattggcggtaataaaatggctgaccgtcagtgccggaaaattgtctgcgctactgtgcgccagctgccagaaggggggaggggcgaaatggcgaatggcaatggcgaacggaatcacaaacaaattggcgatacagtgctcacccccccacagcactatcgaaaaatttaccagccaatcgcagcacgttcttgcataaggtgtgtctgcggttcgtagcatggtttccagcggataaggtcgccggccattaccagccttggggtaaaacggctcgatgacttccaccat

SEQ ID NO: 130171 - DNA, 1782 bp, Homo sapiens
atggcaggtattcgctcaaccttaattaaggagaaaaacatgattaccaattatgaagccactgttgtaactaccgatgacattgttcacgaggtgaatctggaaggaaagcgcattggctacgtaattaaaacagaaaataaagaaaccccattcactgtggttgatatcgatggtccatcaggcaacgtaaaaacacttgatgaaggtctctcgctgctgttgtcgctggtatcgattgtggtgatcatgaagctgttttatcaatacgagcaacgattcggtatgcgctccaccagcctgctgaatgtgattggctccaacaccattgctatctacaccacccatcgcattctggttgaaatattcagcttaactctgcttgcgcaaatgaacgcagcacgctggtcgccgcaagtcgaactgacactcctgctggtttatccctttgtcagtttgttcatctgtactgttgcgggcttgctgaatctgacaaccgttatgcctgaacaatatcgttatacgctgcccgtcaaagcgggtgagcagcgtctgctgggcgagttaaccggcgcaccctgtgcaacgctggtagcggaaattgccgaacgtcacgccggtccggtggtactcattgcaccagatatgcaaaatgctctgcgtttgcatgatgaaatcagcaagtttaccgatcaaatggtgatgaatctggcggactgggaaactcttccctacgacagttttttcgcttcatcaggacaattatctccttgtggcctttcaacccttttaccagctaacggacgatgcagcggtgggcgtactgattgttccggtgaatacgcttatgcagcgcgtttgcccacacagttttctccacggtcatgcgctggtgatgaaaaaaggtcagcgcctgtcacgagatgcattacgaacccaactggacagcgccggttatcgccatgttgaccaggtgatggagcacggcgaatacgccacgcgcggcgcgttgctggatctcttcccgatggggagtgagctgccttatcgtcttgcaatcggggtgaatgtggcgcaggcggaagtgttgaatctggagtccggagctaaacaggttttacaagaaacctttggctaccaacagtttcgccccggccaggaagaaattatcgacactgtgctttccggccgcgattgcctcgtcgtcatgcccactggtggcggaaaatccctttgctatcaaatccctgccttattgctaaacggccttaccgtggttgtttcaccgctgatttcgttgatgaaagatcaggtggatcaactgcaagccaacggcgtggcggcggcgtgccttaactcgacgcaaacccgcgaacagcaacttgaagtgatgacgagaccgcgcattggggatggaactggagcgttacgaaaaagagtcgcacagctggcctttaaaaatcagccaatgatggtgggcaactgggcgcaaagcattttgcacggcggggtcattgcgtcggcgctggatgtcgccgccggtctggtgtgcgtgggaagtaccttaacccgccacgaaaccatcagtgaagatgaactacgccagcggtatcgcggatggggaccattgatcttcgcgttgattatctgcgcccaggcaggggcgagcgttttactgctactagtagcctgttgcgtgcaggcaataaagtcgccgtcgcccgcgttgaattacacaatgaagaacagctttatattgccagtgccaccgccacctatatg

SEQ ID NO: 130172 - DNA, 1434 bp, Homo sapiens
atgaagctgttttatcaatacgagcaccgattcggtatgcgctccaccagcttgctgaatgtgattggctccaacaccattgctatctacaccacccatcgcattgtggttgaaatattcagcttaactctgcttgcgcaaatgaacgcagcacgctggtcgccgcaagtcgaactgacactcctgctggtttatccctttgtcagtttgttcatctgtactgttgcgggcttgctggtaagaaaactttcacagcgtgcattcagcgatctgttgttctccccgccttcactgcccgctgccgtcagttactcccgttaagccatcgccccagccggggcgattcaatttgctaaaccatgtcgattacggataatgaacagcattgcttatcagagatatgcccccatatgttgaggcatatcctaacgagaatctgacaaccgttatgcctgaacaatatcgttatacgctgcccgtcaaagcgggtgagcagcgtttgctgggcgagttaaccggcgcagcctgtgcaacgctggtagcggaaattgccgaacgtcacgccggtccggtggtactcattgcaccagatatgcaaaatgctctgcgtttgcatgatgaaatcagccagtttaccgatcaaatggtgatgaatctggcggactgggaaacatcttccctacgacagtttttcgcctcatcaggacattatctcctcgcgcctttccaccctttaccagctaccgacgaatccaggggggggtactgattgttccggtgaatacgcttatgcagcgcgtttgcccacacagttttctccacggtcatgcgctggtgatgaaaaaaggtcagcgcctgtcccgagatgcattacgaacccaactggaccgcgcccgttatcgccatgttgaccagccagcgcacgctggcggcaaagtgctggagatgatcgtggtggggatcgccacctggctggggttcttgctcttcgggctgaactattcgctgctgctggcagtgctggtcggcttctcggttcttattccgtacattggcgcatttgtggtgaccattccggtggttggcgtggcgctattccagtttggcgcaggtactgaattctggagctgcttcgcggtgtatctgattattcaggcgctggacggcaacctgttagtgccggtgttgttctccgaagcggttaacctgcatccgctgcatcaccgggagcagattggcggtaataaaatggctgaccgtcagtgccggaaaattgtctgcgctactgtgcgccagctgccagaaggggggaggggcgaaatggcgaatggcaatggcgaacggaatcacaaacaaattggcgatacagtgctcaaagccactgggagcaaacagggtgatgggcaaaatcatggcgacgattttgtcgcgtaa

SEQ ID NO: 130173 - DNA, 940 bp, Homo sapiens
atggaccagaccgtcaagtccctgatggcctcagaggaggagtattccaccaaagaagagaaatatgaaaaggagatgaaactgctggaggagaaactgaaggaggctgagaccagagcagagtttgtcgaaaggtctgtggcaaagttggagaaaaccaccgatgacctagaagagacgttggccagtgccaaggaggaaacgtggagattcatcagacctgggaccagaccctactggaactcagcaacctgtttcttacttcctggtcacaaaatggctgccgaagtccataagctaaatcctaatgtgagtgaacatgatcaagaaagatggcatgatgcttttgggaacggtggtgcagataatcactcaaagctccaagcaagcaccagaagaggaggacccttgagtcaggagctgctgcaatccctggcagctagcctagcagcaggaggtctgacggcgcttagtgctgaattcactatcggcaaaggtgagttgatggctcatgatgtcctctggggatgcgctccggatgaatatgatgatctcatatcaggaacttgttcgcaccttcccaaggggaaaacgcacgacgtgctgaccggaagtgatgacggtcgccacagcaacacgtctctggcgtggggagctggcgtgcagtttaacccgaccgaatccgtggccattgatattgcttatgaaggccccggcagtggcgactggcgcactgacggtttcatcgtgggcgggcttttttgtggggtgaatatggcagtaaagatttcaggtgtactgaaagacggcacaggaaaaccggtacagaactgcacaatccagctgaaagcaaaacgtaacagcaccacggtggtggtgaacacgctggcctcagaaaatccggatgaagccgggcgttacagcatggacgttgagtacg

SEQ ID NO: 130174 - DNA, 1383 bp, Homo sapiens
atgcgtaatgtgtgtattgccgttgctgtctttgccgcacttgcggtgacagtcactccggcccgtgcggaaggtggacatggtacgtttacggtgggcttatttccaagtgaaaccgggtacattgccgtcgttgttcgggcggggataccggtgtgagtcatctgaaagggattaacgtgaagtaccgttatgagctgacggacagtgtgggggtgatggcttccctggggttcgccgcgtcgaaaaagagcagcacagtgatgaccggggaggatacgtttcactatgagagcctgcgtggacgttatgtgagcgtgatggccggaccggttttacaaatcagtaagcaggtcagtgcgtacgccatggccggagtggctcacagtcggtggtccggcagtacaatggattaccgtaagacggaaatcactcccgggtatatgaaagagacgaccactgccagggacgaaagtgcaatgcggcatacctcagtggcgtggagtgcaggtatacagattaatccggcagcgtccgtcgttgttgatattgcttatgaaggctccggcagtggcgactggcgtactgacggattcatcgttgggatttcaggagtcctgaaagacggcacaggaaaaccggtacagaactgcaccattcagctgaaagccagacgtaacagcaccacggtggtggtgaacacggtgggctcagagaatccggatgaagccgggcgttacagcatggatgtggagtacggtcagtacagtgtcatcctgcaggttgacggttttccaccatcgcacgccgggaccatcaccgtgtatgaagattcacaaccggggacgctgaatgattttctctgtgccatgacggaggatgatgcccggccggaggtgctgcgtcgtcttgaactgatgggtggaagaggtggcgcgtaacgcgtccgtggtggcacagagtacggcagacgcgaagaaatcagccggcgatgccagtgcatcagctgctcaggtcgcggcccttgtgactgatgcaactgactcagcacgcgccgccagcacgtccgccggacaggctgcatcgtcagctcaggaagcgtcctccggcgcagaagcggcatcagcaaaggccactgaagcggaaaaaagtgccgcagccgcagagtcctcaaaaaacgcggcggccaccagtgccggtgcggcgaaaacgtcagaaacgaatgctgcagcgtcacaacaatcagccgccacgtctgcctccaccgcggccacgaaagcgtcagaggccgccacttcagcacgagatgcggtggcctcaaaagaggcagcaaaatcatcagaaacgaacgcatcatcaagtgccgattatgcagcatcatag

SEQ ID NO: 130175 - DNA, 405 bp, Homo sapiens
gttcgcgggctttcccggtcaagctttaaatcgggggcctcccttaagggttccgatttagtgctttacggcacctcgaccccaaaaaaacttgatttggtggactcttgttccaaactggaacaacactcaaccctatctcgggctattcttttgatttataagggattttgccgatttcggaaccaccatcaaacaggattttcgcctgctggggcaaaccagcgtggaccgcttgctgcaactctctcagggccaggcggtgaagggcaatcagctgttgcccgtctcactggtgaaaagaaaaaccaccctggcgcccaatacgcaaaccgcctctccccgcgcgttggccgattcattaatgcagctggcacgacaggtttcccgactggaaagcgggca

SEQ ID NO: 130176 - DNA, 390 bp, Homo sapiens
atggggtccaagagttgggtaacacagaaggggccagctaaagcacaaagcagtcaagtgggcagagtgaaacaagctacagccactgacactggaagaaccagagacagccatatggaaagacccaaatgctctaagggatatctgtgtttgccttacatggcattgcagcagcatcatcttctctccgatgtcaccgttcgggggtttgttgctggagctactaacatcctttttcgacaacagaaacacctcagtgatgccattgtggaagtacgtttatgtggttccgatttagtgctttacggcacctcgaccccaaaaaacttgatttgggtgatggttcacgtagtgggccatcgccctgatagacggtttttcgccctttga

SEQ ID NO: 130177 - DNA, 414 bp, Homo sapiens
tcaaagggcgaaaaaccgtctatcagggcgatggcccactacgtgaaccatcacccaaatcaagttttttgggggtcgagggtgccgtaaagcactaaatcggaaccctaaagggagcccccgatttaaagcaggagttgggagagcccaggcagcatgagctggcatttccaagcctgcgggggatggaggaacttcttgggccaccaagggtgcagggatgcctgggtccacagctgcagctgggtgactgtagctgtgccttctccactgcagcaaatgtctttgcagctgctgctccagatgggctgttgcttccatcaaaaggatcttttcaatcaagataataatgaaagcaatgctgtcttggaattcagcattgaatgtatctatagctacctgattttcactcat

SEQ ID NO: 130178 - DNA, 390 bp, Homo sapiens
ggggcttccgaggcgatcaggcagcatcagtcttcagccactaagccaagaagatctgggaaggagtcagtcagagagcctcgggccagagttccaggggctctggcagtggctgtcagactttcaaacttaacaccagtgatttgccaggggcttttgggccatcagccacagactgaaggctgtacttttggcttccctacttttgagattttgggacttggaatgacttctttgctcttcagcatgaagacagcctattgtggaactttaccttatgatcatggttccgatttagtgctttacggcacctcgaccccaaaaaacttgatttgggtgatggttcacgtagtgggccttcgccctgatagacggtttttcgccctttga

SEQ ID NO: 130179 - DNA, 1611 bp, Homo sapiens
atgcatgccagctgcagtggggcaggcagctctaggcgccgacacaggcactggctctctgcaaggctgcgactggaccaggtgtactataggtggcttccactgtgggcaccagggaatgcagtggcacccagaagcttgaagatgccaggaaccacagagccccaagagggtgtcacatccctggcttggggtgctcctaggtctggaatccctgaagggctgcagctcttctctccttctttattctcttcttgtcacctgcaacgtgaaaggggcggggctcctacctgtcctggatcctgcaggctccatggagcaggcagccccagcggcacctcccacacggcagccggcgtcatggcagctgctccagacaggccacctctgccatcacttccaaaaaggcatgcaagcttggcactggccgtcgttttacaacgtcgtgactgggaaaaccctggcgttacccaacttaatcgccttgcagcacatccccctttcgccagctggcgtaatagcgaagaggcccgcaccgatcgcccttcccaacagttgcgcagcctgaatggcgaatggcgcctgatgcgcggcgcattaagcgcggcgggtgtggtggttacgcgcagcgtgaccgctacacttgccagcgccctagcgcccgctcctttcgctttcttcccttcctttctcgccacgttcgccggctttccccgtcaagctctaaatcgggggctccctttagggttccgatttagtgctttacggcacctcgaccccaaaaaacttgatttgggtgatggttcacaaacgctggtgaaagtaaaagatgctgaagatcagttgggtgcacgagtgggttacatcgaactggatctcaacagcggtaagatccttgagagttttcgccccgaagaacgttttccaatgatgagcacttttaaagttctgctatgtggcgcggtattatcccgtattgacgccgggcaagagcaactcggtcgccgcatacactattctcagaatgacttggttgagtactcaccagtcacagaaaagcatcttacggatggcatgacagtaagagaattatgcagtgctgccataaccatgagtgataacactgcggccaacttacttctgacaacgatcggaggaccgaaggagctaaccgcttttttgcacaacatgggggatcatgtaactcgccttgatcgttgggaaccggagctgaatgaagccataccaaacgacgagcgtgacaccacgatgcctgtagcaatggcaacaacgttgcgcaaactattaactggcgaactacttactctagcttcccggcaacaattaatagactggatggaggcggataaagttgcaggaccacttctgcgctcggcccttccggctggctggtttattgctgataaatctggagccggtgagcgtgggtctcgcggtatcattgcagcactggggccagatgtggcgataagtcgtgtcttaccgggttggactcaagacgatagttaccggataaggcgcagcggtcgggctgaacggggggttcgtgcacacagcccagcttggagcgaacgacctacaccgaactga

SEQ ID NO: 130180 - DNA, 768 bp, Homo sapiens
ttatgccggtactgccgggcttcttgcgggatatcgtccattccgacagcatcgccagtcactatggcgtgctgctagcgctatatgcgttgatgcaatttctatgcgcacccgttctcggagcactgtccgaccgctttggccgccgcccagtcctgctcgcttcgctacttggagccatgtcagctgtccttgctccaggatgctgtttttgacaacggatgttttattgcctttgatgttcattaagaagcttggcgcaaatgttgcctttttatcctcgaagaagcctctgtttgtcatgtagcttgtgataaccacattgttgcctttggcttgcggcacccaggctttacactttatgcttccggctcgtatgttgtcccaactggagcggataacaatttcacacaggaaacagctatgaccatgattacgaattcgagctcggtacccctgggtggtgagaactacgacatcatcgcagagtttaacggccaaccggcttccggtctggggatcaagctggcgaccggtgcaaacgcgctggataccgctggacccccaaaaacttgatttgggtgatggttcacgtagtgggccatcgccctgatagacggtttttcgccctttgacgttgaagtccacgttctttaatagtggattcagcacatccctgaagagtaactgcggcccggagtgcactgtccagtccaccgcgccactatttgggatcttgatgcgaattaccagcacctggttctccat

SEQ ID NO: 130181 - DNA, 674 bp, Homo sapiens
atgggccctaaatccaatcataagtgtccttatatgagagagaaagagggagatttgatacagacacacagtagaaacggccatgagaagacagaggcagagatcagagtgatgcagccacaaaccaaggaatgccggcagccaccagcagctgaaacagtcaagaaagggattctcctccagaaccttctgaagggcatttctgaaagaaacacagcagccccagtcagggactgtgggcgcagctttagcagacttaaacgttcctgcctgctggctctgaagacagcagcagatctcccagtacagcattcgagctatgctaagggacagactgcctcctcaagtaggtacctgacccatgtgcctcctcatggggagacacctcccagcagagatcgacagacatctcatacaggagagctccagctgacatctggcaggtgctcctctgggatgaagcttccagaggaaggaacaggcagcaatgtttgctgttctgcagcccctgctgttgatacccaggatcacaactcctcgccagcaagggaacaaaactggacggagaatgagtttgacgaagtaggcttcagaaagtgggtaataacaaactcctccaagctaaaggagcatgttccaacccaacgcaagaaagctaagaaccttgaaaaaag

SEQ ID NO: 130182 - DNA, 1837 bp, Homo sapiens
tttcgtcccaggcagcttgtggcggcgaagccatcggtgttcgctgatgtccagtctatggagtcagttggtaccggtggcggcgcggaggcagaaggcggtgtccgtagtaggggcctctgccccaccaggatgttaccgggcttggccgccgccgcggcccacagatgtagctggtcctccctgtgccggctccgtctgcgatgcagggcggcggcctgtaatcccagcgaccgccaggagtggcagaatttagtgacatttggaagcttttacaaacgtggttccctgtactcatccatatattggtaccctgagtcaagaaaagctgtactccacaaatgttcacaaagaaggacagggatcacacacactcagagaggaaaaagtaccatcctttgtaacagcagaaggtgtaggcgcaaaactcatatctccacttaagcaagaacctctccaagtaagagttaaagcagtccttaagaaaagggagtatggatcaaagtacactcagaataatttcatcactggagtcagagcgataaatgagttctgcctcaaatccagtgatctagaacaacttcgaaaaatcagacgacgaagtccccatcaagatactgagtcttttactgtatacttgagatcagatgtggacgcaaaatctttggaagtttggggaagccctgaagctcttgccagagagaaaaaattgcgtaaggacgcagaaatagaatacagagaaaggctatttagaaaccaaaaaatattaagagaatacagagatttcttgggaaataccaagccacgctccagaacagcatcagtgttttttaagggaccaggaaaagtggtgatggttgcaatttgcatcaatggattaaactgcttctttaaatttcttgcctggatttataccggttcagcaagtatgttctcagaagctatacactcattatctgatacttgtaatcagggtttactagcattgggcatcagtaagtctgttcaaacaccagatccttctcatccgtacggattttcaaatatgcgctatatttcttcgctaattagtggtgttggtattttcatgatgggtgcaggactatcttggtaccatggagtcatgggattgcttcatcctcaaccaatagaatcccttctatgggcatattgtattttagcaggatcattagtatctgaaggagcaacacttcttgttgctgtaaatgaacttcgtaggaatgctcgggctaaaggaatgtcattttacaagtatgtaatggaaagtcgtgatcctagtacaaatgtgatattattggaggatactgctgcagtcttgggagttataatagcagccacttgcatgggccttacttctataacaggcaatccactgtatgacagcctaggttctttgggtgtgggcaccttattaggcatggtctcagcattcctcatctacactaacacagaagcactcttagggcggtccatccagccagaacaagtacaacggctcactgaactcctggagaatgacccatcagtaagggcaattcatgatgttaaagccacagatctgggattaggtaaagtaagatttaaggcagaagtagattttgatgggcgagttgttacaagatcatatttggaaaaacaagattttgaccaaatgttacaagaaattcaagaagtgaaaactcctgaagaactagagacctttatgcttaaacatggagaaaatattattgatactttaggagctgaagtagatagacttgagaaggaactgaaaaaacgaaatcctgaagttcgacatgtagatttggagatactg

SEQ ID NO: 130183 - DNA, 1065 bp, Homo sapiens
atgcctcctgatggggagatacctcccagcagggatcaacagacacctcatacaggagagctccagctgacatctggcaggtgctcctctgggatgaagcttccagaggaaggaacaggcagcaatgtttgctgttctgcagcccctgctgttgatacccaggtcgaatcaaggtccaagtacggcatcacatctggaattaagatccttgttccagtgacgtgtcaaaccttacgtcccaaccgaagagaaaaagatccttttcagcttgccaaggcactggaaaagctccagcatcttatggcagcccttaaatcaccaaaagaagaattaacacatataatgtgggtagagttaacaaacaacaggcgcgatacaatctgccatccaaaggctacaagaaaggtggtgcgtgaacggttcacaaggcccttgaacccttccagagtcgtcaattccaccccccggagcgaagtacccgcgggacagccccgaggcgcacgtaaacctttgtttgtccaaacggttcggcttctacggagccagcggctagcgcgggacactccaccctggcggtcgctgggattacaggccgccgccctgcatcgcagacggagccggcacagggaggaccagctacatctgtgggccgcggcggcggccaagcccggtaacatcctgactggacatcagcgaacaccgatggcttcgccgccacaagctgcctgggtgacccggaaacggcaacgtcatttagcgacgcctgccgtggagggtttactagcattgggcatcagtaagtctgttcaaacaccagatccttctcatccaaattcctctctctctgacgttccagaacaatttttcccaactgccatcctcattggctttccagcaggtcatggcatcagcaggtcagcagctgccgcagtcccaagtaagcggctttcccgttcaagctttaatcgggggctccctttagggttccgatttagtgctttacggcacctggaccccaaaaaacttgatttgggtaatggttcacgtagtgggccatcgccttga

SEQ ID NO: 130184 - DNA, 1660 bp, Homo sapiens
ttaaagaggagcaaaggggtttccatatgggttatgaagaactggccgcacacccgtcactcgagggaggttcccctcaccagcgatgtcaaacacgaggcctgggctcttggccagggtgctgggcaagccatccaaggtagcctcaaagatgcactggtagttctgcatgatctgcggggtgaaggacaccgtggcaaaggcatgggaatgactggcaatgcacatcttgctgggttccacttcaaaaatgtcgacgacccccccaaagggcttcacctcatagaagttgatgatgttagtctggttgggagtcaacagagtgatggagcctgtcctgtccttgcacttgatctccacattcatagtgtagccctcggccttgacatttaatgtcacagggtggactttcttttccacattgcagatcaaattaaagttcacatctccttcctgggaccccaaaaaacttgatttgggtgatggttcacgtagtgggccatcgccctgatagacggtttttcgccctttgacgtttggagtccacgttctttaatagtggactcttgttccaaactggaacaacactcaaccctattctcgggctattcttttgatttataagggattttgccgatttcggacaccaccatccaaacaggattttcgcttgttggggcaaaccagcgtggaccgcttgctgcaactctctcagggccaggcggtgaagggcaatcagctgttgcctgtctcactggtgaaaagaaaaacccctctggcgcccaatacgcaaaccgcctctccccgcgcgttggccgattcattaatgcagctggcacgacaggtttcccgactggaaagcgggcagagaagaggttgccgctctttagagttaccagttatcctgctctgctttttccccaatccttgcgctcccaccaactattgcttctctgatgatggtgaatgtacagatggctttttgggtgtggatgtcccttctgctcgtcagttctcccttttaacagaacaggaccactcagctgcgagtttgatctcagactgctgtgctagcaatcagcgagactccgtgggcgtaggaccctccgagccaggtgcgggatataatctcgtggtgcgccgttttccaagcccgtcggaaaagcgcagtattcaggtgggagtgacccgattttccaggtcccgtccgtcacccctttctttgagtaggaaagggaactccctgaccccttgcgcttcccgaattcatatcaaaaagttggaaggagagacttaccgataccactgtgctattcctgaaagcaagaagacaatccttatgtttacaaataggtggggatcctctagagtcgacctgcaggcattttgtgtgctgagtgtggctaaagaaagccagctatatacttatctccacgcaataatgagaaccctcaagagtagcatcgcaagaggggcccgtactttccagagcacttctgacggaaccgtgaaaagcagaccttcaaaaatcattttcctgccccgcttgcatgaccggttccgatttagtgctttacggcacctcgaccccaaaaaacttgatttgggtgatggttcacgtagtgcccatcgccctgatagacggtttttcgccctttga

SEQ ID NO: 130185 - DNA, 1080 bp, Homo sapiens
gcagcatagtagtagtaggcggccgctctagaggatccaagcttacgtacgcgtgcatgcgacgtcatagctcttctatagtgtcacctaaattcaattcactggccgtcgttttacaacgtcgtgactgggaaaaccctggcgttacccaacttaatcgccttgcagcacatccccctttcgccagctggcgtaatagcgaatgaggcccgcaccgatcgcccttcccaacagttgcgcagcctgaatggcgaatgggacgcgccctgatagcggacgcattaagcgcggcgggtgtgagtggttacgcgcagcggtgaccgctacacttgccagcggccctagcgcccgctcctttcgctttcttcccttcctttctcgccacgttcgccggctttcccccgtcaagctttaaatcgggggctccctttagggttccgatttagtgctttacggcacctcgacccccaaaaaacttgattagggtgatggttcacgtagtgggccatcgccctgatagacggtttttcgccctttgacgttggaagtccacgttcttaataagtggactcttggtccaaactggaacaaaaactcaaccctatctcggtctattcttttgatttataaggggattttgccgatttcggccctattggttaaaaaaatgagctgatttaacaaaaatttaacgccgaattttaacaaaatattaacgcttacaatttaaggtggcactttttcggggaaaatgtgcgcgggaacccctatttggttatttttctaaatacattcaaaatatgtatcccgctcatgagaacaataacccctgataaatgcttcaataatattgaaaaaaggaagagtatgaagtattcaacatttcccgtgtcgcccttattccctttttttgcggcattttgccttcctggttttggctcacccagaaacgctggtgaaagtaaaagatgctgaagatcagttgggtgcacgagtgggttaccatcgaactggatctcaacagcggtaagaaccttgagagttttcgccccgaagaacgttttccaatgatgagcactt

SEQ ID NO: 130186 - DNA, 625 bp, Homo sapiens
  misc_feature (1)...(625): n = a,t,c or g
nggttctgtatccctacttccattaccctcggctcctcccactcctcgggggctccgtgctttccgcgggtctgtccgggggctccggnccatcggcgcngtgagttgatggcttccggagaactggcatagctgcagaatatgagtagtgtcccaagaagagtgctttgcctttgnacaaaggatcagaataaagttatttgccatacagtaaccagagacctccaactaggggcccccaaactgtatcctgcctgtagaacctgccaggtaaaggtatatttttgctttttaatttagccagaagcaatttttaaaagaaaatatgtctcctctnaagatacatggtcctatcagaattccgaagtatgcagactgggattacaaagtggaaagaaaggatcctttgaaattgtagaaaaagagaataaagtcagcctagtagttcactacaatactggaggaactccaaggatatttcagctaagtcataacattaaaaatgtggtgcttcgacccagtggagcgaaacaagccgcctaatgntaactctgcagataacagcttcttgtctattgacaagtaccaagtaaggatgcngaggaatgaaggttgntctagatnc

SEQ ID NO: 130187 - DNA, 443 bp, Homo sapiens
cgcatacttggaattctgataggaccatgtatcttcagaggagacatattttctttaaaaattgcttctggctacaggcaggatacagtttgggggcccctagttggaggtctctggttactgtatggcaaataattttcagtgacttttaccgaaaaaccctatgtaatagcaattcacctttattctgatccttgtgccaaaggcaaagcactcttcttgggacactactcatattctgcagctatgccagttctccggaagccatcaactcagctgcgccgagggtccggagcccccggacagacccgcggaaagcacggagcccccgaggagtgggaggagccgagggcaatggaagtagggatacagaacccaaaggagggaggccgctagctacccctagtcagggagagcggctgatggcgggaactgtgacgaaa

SEQ ID NO: 130188 - DNA, 1606 bp, Homo sapiens
gtgatctggtgccagctggtggaacagtgggtgatggcgtccctgctgcaagaccgtgagtgccggggccctgcaggggaagaggccttagtgtacagctcagggaagggaaggaggttggacccctgttccagagctctccctgggcctgctaccctctctgctggctacctaacccctgcttttcctgacctagagctgaccactgatcaggacttgctgctgatgcaggaaggcatgccgatgcgcaaggtgaggtccaaaagctggaagaagctaagatacttcagacttcagaatgacggcatgacagtctggcatgcacggcaggccaggggcagtgccaagcccagcttctcaatctctgatgtggagacaatacgtaatggccatgattccgagttgctgcgtagcctggcagaggagctccccctggagcagggcttcaccattgtcttccatggccgccgctccaacctggacctgatggccaacagtgttgaggaggcccagatatggatgcgagggctccagctgttggtggatcttgtcaccagcatggaccatcaggagcgcctggaccagtatcggcaggatggagtcagggtggggagagattattctagaagctgtgtggagaatggattggcaccggggagagagactggcaggaaagagaggggagagatgtcagtggacgaaggtgcacacacaactgcacacacaaacagatacattagtgcttttgccttgactcatacctggatggctgagcgattggtttcaacgtggagacaaaaatcaggatgggtcctcattctccatttgaaacgatatagcttcaatgtggctctctcgcttaacaataagattgggcagcaagtcatcattccaagatacctgaccctgtcatctcattgcactgaaaatacaaaaccaccttttacccttggttggagtgcacatatggcaatgaaattcaccttcaaatccaagagctccttggctttatgccttgattcagacagtgaggatgagctaaaacgttctgtggccctcagccagagactttgtgaaatgttaggcaacgaacagcagcaggaagacctggaaaaacctgtgcctactacactggcacaagtggatagagaaaagatctatcagtggatcaatgagctgtccagtcctgagactagggaaaatgctttgctggagctaagtaagaagcgagaatctgttcctgagcattgcacccatgctgtggcattcatttggtactattgcagcacttttacagccagaagcaatttttaaagaaaatatgtctcctctgaagatacatggtcctatcagaattcgaagtatgcagactgggattacaaagtggaaagaaggatcctttgaaattgtagaaaaagagaataaagtcagcctagtagttcactacaatactggaggaattccaaggatatttcagacattccgttatttccacaaagggaccatgaataacgtaacagccatggtggcagatagaagctataaaaaatgggttccccttcaccaaggtttatctactgtggctgctgaatgtccagttggttaa

SEQ ID NO: 130189 - DNA, 376 bp, Homo sapiens; identical to SEQ ID NO: 118341
  misc_feature (1)...(376): n = a,t,c or g

SEQ ID NO: 130190 - DNA, 612 bp, Homo sapiens; identical to SEQ ID NO: 129419

SEQ ID NO: 130191 - DNA, 910 bp, Homo sapiens
ggcacgaggcccaagatgccgaaaggaaagaaggccaagggaaagaaggtggctccggccccagctgtcgtgaagaagcaggaggctaagaaagtggtgaatcccctgtttgagaaaagggcctaagaattttggcattggacaggacatccagcccaaaagagacctcacccgctttgtgaaatggccccgctatatcaggttgcagcggcagagagccatcctctataagcggctgaaagtgcctcctgcgattaaccagttcacccaggccctgggaccgccaaacagctactcagctgcttaagctggcccacaagtacagaccagagacaaagcaagagaagaagcagagactttttggcccgggccgaggaagaaggctgcttggccaaaggggacgttcccaacgaagagaccacctgtcccttcgagcaggagttaacaccgtcaccaccttggtggagaacaagaaagctcagctggtggtgattgcacacgacgtggatcccatcgagctggttgtcttcttgcctgccctggtgtcgtaaaatgggggtcccttactgcattatcaagggaaaggcaagtctgggacgtatagtccacaggaagacctgcaccactgtcgccttcacacaggtgaactcggaagacaaaggcagctttggctaagctggtggaagctatcaggtccaattacaatgccagatacgatgagatccgccgtcactggggtggcaatgtcctgggtcctaagtctgtggctcgtatcgccaagctcgaaaaggcaaaggctaaagaccttgccactaaactgggttaaatgtacactgttgagttttctgtccataaaaataattgaaataatacaaattttccttcaaaaaaaagcggccgcgtcgacgtg

SEQ ID NO: 130192 - DNA, 799 bp, Homo sapiens
gcgcttatcagcgtttgtgccgccgcctgcgcgccagtcagcgccatatccatgccgcgcacggaaattccggtattgacgcaactgcgcaacgcatcgcccaccagcagccagccgttaccggcgtattgcaccggcatactgtgcaagccaccttctggcaccagatgcgcaccatactccagtgattccgtgtttttgataagcgggcgcacttggtcatcctcagcgtttttccccattcacgtccgttttttacatagtcggccagttcccaggctgctacgctttcaggtcacttttagaggatccccgttaacctcacgtcattggcaacatgaccgccagcggtttcgccgggcgatgtttgcgcgccagttgcttaccacgcccgccgcgccgattgtgctggtggataaaaaatacgttcctgagctttgtgatgatatcgcccctgaccttaacgaagtcggggtaatgttgcctgcgaacccgctccagcatttgctgttacaggaactgcaatgcccgctggtgatgacctccggcaacctgagcggtaaaccaccagctatcagcaacgaacaggcgctggcggatttgcagggcattgccgacggattcttgatacataaccgcgacatcgtgcagcggatggatgattcggtggtgcgcgaaagcggcgaaatgctgcgccgttcgcggggagatccccacagtgatgatactgacgggcttcattacttccacagggaaacagatctggagacctgtgaagacaaagttactcacccgtcat

SEQ ID NO: 130193 - DNA, 804 bp, Homo sapiens
atgcaccagactactgcaaaaacaccccacactagctacccgaacaactacgaagaacacaaccgacgagcgaacagaagcaaaaactacgaccgcatacgacatacgacaataatacttaaaagaactaaccctgcccagacgatcacgaatctactaaaaagccgattcaatagatacaactacgtacagccaagatcatgtaggagcatcttcatccatattcctggtgaaagagatctaaatctctgcatagcaccaaaccccccggcaattttccccaccagtataggatatttgggtccagatctcaataacctcccaacttatgctccatttatcaccacgaacctcactggaccggcacctacaaccacacaccctgtgggaaatttagggaccaccggcaaccccgagcctggaggatgcggtattctgattgtctggtgctgtgtcaactgggcctgcctctgggatagtgttgtggctgccccacgagaaccctatatgccagccggacttctacgccatcgccgtcattacagacatcgccgtgaagatttaattgctgtgccagctgccagacaaacggacgaaaaccgacgccctgcactttgccacgaatacgcagttggacaccgcaagattaagacaaatgtcgaacacactgaaccatacatcctcccgttgatcacccattcccagcccctcaatcgaggggcttttttttgcccaggcgtcagatttctggttgtatctgtgctggattttgagaagagattagcatttgcatccacagactga

SEQ ID NO: 130194 - DNA, 1323 bp, Homo sapiens
atgcacatcatcacaccatcagcttcagagaatggcagccatttatttgtcccgtgcaaacaggcaagaatactgccaatccagaattggggcgttccagcaaggcgaaagcacgagaagcagagccactcctgggtggaggatgtaggcggaattgacgcaagcgaggcgccccctcttttccggtactggctccgcgagcctgagcgaggtttacccatggttgtccttgatttcggagggagcaagtgtactggtagtggaacgggtgacccatgtgggaaaggcctctatgcatccagtgaatgtatctacccagacaaaaagaactgttctgccatcaaaggaattcccggaattattcgtagaatacgagcggggcggtatcgccgacctgtgactgccggatgcgacgctgtcgtgtccggcagggcgggttacgcaattcatgatggcgggaataactcaatggcaaaaaacacatcttgcggtgtccaactgcgtattcgtggcaaagtgcagggcgtcggttttcgtccgtttgtctggcagctggcacagcaattaaatcttcacggcgatgtctgtaatgacggcgatggcgtagaagtccggctgcgggaagacccggaaacgtttcttgttcaattgtatcagcactgcccgccgctggcgcgtattgatagcgtcgagcagcacaggcggcaccatgaatacgcaaattgttcccgatgccgctacttgccctgcttgccttgccgaaatgaataccccaggcgaacggcgttatcgttatccgtttatcaactgtacccactgcggcccgcgtttcaccagacactagaggaggagagctggtcgattccgttctccgttatgctggtcgttccgctggggattatcgatgcgttgctggctgccaccttccgtggcctgaccaatgacgtttacttccaggtaggcctgctcacccccattgggttgtcggcgaagaacgcgatccttatcgtcgaattcgccaaagacttgatggataaagaaggtaaaggtctgattgaagcgacgcttgatgcggtgcggatgcgtttacgtccgatcctgatgacctcgctggcgtttatcctcggcgttatgccgctggttatcagtactggtgctggttccggcgcgcagaacgcagtaggtaccggtgtaatgggcgggatggtgaccgcaacggtactggcaatcttcttcgttccggtattctttgtggtgaatcgccgccgctttagccgcaagaatgaagatatcgagcacagccatactgtcgatcatcattga

SEQ ID NO: 130195 - DNA, 1359 bp, Homo sapiens; identical to SEQ ID NO: 129912

SEQ ID NO: 130196 - DNA, 1527 bp, Homo sapiens
atggtgaatctggcgctgtggctgaaaaagcaccgcttccgcctcgaccaggtgcagaacttctatccgtcgccgctggcgaactcaaccaccatgtattacaccgggaaaaacccgctggcgaagattggttataagagcgaagacgtcttcgtaccgaagggcgacaaacagcgtcgtttgcataaagcgttgttgcgttaccacgatccggcaaactggccgttaatccgccaggcgctggaagcgatgggcaaaaagcatctgattggcagccgtcgcgattgcttagtgcctgcgccaaccattgaagagatgcgtgaagctcgtcgccagaaccgcaatacccgtccggcgttgacgaaacatacgccgatggcgacccagcgtcagacgcctgctacggcaaaaaaagcgtcgtctacgcaatctcgtccggtgaatgctggtgcgaagaaacggcctaaagcggcggaactgcaatgcccgctggtgatgacctccggcaacctgagcggtaaaccaccagctatcagcaacgaacaggcgctggcggatttgcagggcattgccgacggattcttgatacataaccgcgacatcgtgcagcggatggatgattcggtggtgcgcgaaagcggcgaaatgctgcgccgttcgcggggcttccttcccacagggagaggattgaggatagattataaacagaagatgagagggaccagaagagcaggctgtaacttcaaccagagtggccagggaagaccctcactgaaaaggggcatcgagcagacagatataaagaaggcaaagaagcaggccacaggactggctggggaaagcatgctccaggacgacgcgttttatgcggtgatcacccacgcggcggggccgcagggcgctctgccgctgaccccgcagatgctgatggaatctcccagcggcaacctgttcggcatgacgcagaacgccgggatgggctgggacgccaacaagctcaccggcaaagaggtgctgattatcggcactcaggatcacgtcatccggctctacgccgtcctgctcgcgcaggcactggcggaagcgcgcccggcgctcggacgcctgccaccattcaaggttctcgcccaccgtctggccggtcacgcagccgaaaaagggcaggcatgggtagccaatgcaattactgaagaatatctgcgccaggggggcggcgaattgcccctggttccaggcaaggactggaacaatcagcagaatatctatcaccgttggttgaaaggtgaaacgaaaacgcaaagagaaaaaattcagaagctgatcccagcaattctggcaatccttccgcgcgagctgcgtcaccgactctgcatcttcgatacccctggaacgcccgtgcattacctggcggcgcaggaagcgttaagtacggcaattgatgcgcatgatgatgcagtccaagccgtttaccggaaagcgcatttcagcggcggcggttcttccgacgattctgtcattgttcattaa

SEQ ID NO: 130197 - DNA, 2313 bp, Homo sapiens
atgaacgtggacgctggtgttgattatcgtctgcgtacactcactcaggcgcatctgtggctttcgccacttcacgatgaaacccgggcgcaaatggataaactatggttggcgctggcgggggggaaacgagaaaattcaccgacgttagaaatcaaccatcggccattagcaacaatgggcgtcgagaaccagacgctggcggtctcttattactacgctgtgcgtcgacgcccgcagtcagcatgactatattgcgctctcacgtctctttcatacggtcatgttgtttgatgtaccagttatgacgcggttgatggagagcgaagcgcggcgctttattgcgctggtggatgagttttacgagcgccatgtcaaattagtggtgagtgcagaagtgccgctgtatgaaatttatcagggcgatcggctgaagtttgagttccagcgttgcctgtcacgtctgcaagagatgcaaagcgaagagtatctgaagcgcgagcatttggcggctaaaccagaaaccgtaaaacgcgactggtatgttgttgacgcgaccggtaaaactctgggccgtctggctactgaactggctcgtcgcctgcgcggtaagcacaaagcggaatacactccgcacgtagataccggtgattacatcatcgttctgaacgctgacaaagttgctgtaaccggcaacaagcgtactgacaaagtgtactatcaccacaccggccacatcggtggtatcaaacaagcgacctttgaagagatgattgctcgccgtcctgagcgtgtgattgataatcgcagaggatccctccggcaggcgggttacgcaattcatgatggcgggaataactcaatggcaaaaaacacatcttgcggtgtccaactgcgtattcgtggcaaagtgcagggcgtcggttttcgtccgtttgtctggcagctggcacagcaattaaatcttcacggcgatgtctgtaatgacggcgatggcgtagaagtccggctgcgggaagacccggaaacgtttcttgttcaattgtatcagcactgcccgccgctggcgcgtattgatagcgtcgagcgtgagccgtttatctggtcacaactgcccaccgagttcactatacgccagagcacaggcggcaccatgaatacgcaaattgttcccgatgccgctacttgccctgcttgccttgccgaaatgaataccccaggcgaacggcgttatcgttatccgtttatcaactgtacccactgcggcccgcgtttcaccattattcgcgccatgccttacgaccgcccgtttaccgtgatggcggcgtttccgctatgtccggcctgtgacaaagagtaccgtgacccgctcgatcgtcgcttccacgcccagccggtggcctgcccggagtgtggcccgcatcttgaatgggtaagtcatggtgaacatgcggaacaagaggcggcattacaggcagctatcgcacagttaaaaatgggcaaaattgtcgccatcaaagggattggcggatttcatcttgcctgcgatgcacgtaacagtaacgcggtggcgacacttcgggcgcgcaaacatcgcccggcgaaaccgctggcggtcatgttgccagtggctgacggtttaccagacgctgcgcgccagttgcttaccacgcccgccggcgccggattgtgctggtggataaaaaatacgttcctgagctttgtgatgatatcgcccctgaccttaacgaagtcggggtaatgttgcctgcgaacccgctccagcatttgctgttacaggaactgcaatgcccgctggtgatgacctccggcaacctgagcggtaaaccaccagctatcagcaacgaacaggcgctggcggatttgcagggcattgccgacggattcttgatacataaccgcgacatcgtgcagcggatggatgattcggtggtgcgcgaaagcggcgaaatgctgcgccgttcgcgggggtatgtgccggatgcgctggctttgcctccgggctttaaaaatgttccgcctgtgctgtgtctcggcgcggatctgaaaaataccttctgcctggtgcgcggtgaacaagcggtgttgagtcagcatctgggggaattaagtgacgatggggtccaaatgcagtggggccaaaggttatgccggatggggacccaggttttgccccctaccttcaacatcgaaaaaaaagtacaatcagctcggtaccgacatgggattaactcgaaactcagtcacaacatgcctgcctgtgtgagtgaacatgtctacctgcaatgctaa

SEQ ID NO: 130198 - DNA, 184 bp, Homo sapiens
atgggacgaggagaggactctgttctgcaggacccagctcagtgtggcagggggctggctgtcagcagcacagaggagccgcaggaactggcctttttgggcttccaggccacactcacaggccacacggagtcggacggtcctctgtgcgctcacaccctttctggagaagtccacatggcag

SEQ ID NO: 130199 - DNA, 416 bp, Homo sapiens
acgtccgaattccgcacgagagggaaacgtcatatatctggaagttcagaaaggccagttcctgcggctcctctgtgctgctgacagccagccccctgccacgctgagctgggtcctgcaggacagagtcctctcctcgtcccacccctggggccccagaaccctggggctggagctgcgtgggatcctccagagaacctgagagtgatggtttcccaagcaaacaggacagtcctggaaaacctcgggaacggcacatccctcccggtcctggagggccaaagcctgcgcctggtctgtgtcacccacagcagccccccagccaggctgagctggacccggtggggacagaccgtgggcccctcccagccctcagaccccggggtcctggagctgccacccattcacatggagca

SEQ ID NO: 130200 - DNA, 570 bp, Homo sapiens; identical to SEQ ID NO: 114268

SEQ ID NO: 130201 - DNA, 1974 bp, Homo sapiens
atgctgctgctgcccctgctgctgcccgtgctgggggcgggtgagtgggtcggtggctgggggtcccaggcaggggctggggctgccgctgagcctctgcatctccccagggtccctgaacaaggatcccagttacagtcttcaagtgcagaggcaggtgccggtgccggaggcctgtgtgtcatcgtgtcttgcaacctctcctacccccgggatggctgggacgagtctactgctgcttatggctactggttcaaaggatggaccagcccaaagacgggtgctcctgtggccactaacaaccagagtcgagaggtggaaatgagcacccgggaccgattccagctcactggggatcccggcaaagggagctgctccttggtgatcagagacgcgcagagggaggatgaggcatggtacttctttcgggtggagagaggaagccccctgactcagaagcctgatgtctacatccccgagaccctggagcccgggcagccggtgacggtcatctgtgtgtttaactgggctttcaagaaatgtccagccccttctttctcctggacgggggctgccctctcccctagaagaaccagaccaagcacctcccacttctcagtgctcagcttcacgcccagcccccaggaccacgacaccgacctcacctgccatgtggacttctccagaaagggtgtgagcgcacagaggaccgtccgactccgtgtggcctccctggaactccagggaaacgtcatatatctggaagttcagaaaggccagttcctgcggctcctctgtgctgctgacagccagccccctgccacgctgagctgggtcctgcaggacagagtcctctcctcgtcccacccctggggccccagaaccctggggctggagctgcgtggggtaagggccggggattcagggcgctacacctgccgagcggagaacaggcttggctcccagcagcaagccctggacctctctgtgcagtatcctccagagaacctgagagtgatggtttcccaagcaaacaggacagtcctggaaaacctcgggaacggcacatccctcccggtcctggagggccaaagcctgcgcctggtctgtgtcacccacagcagccccccagccaggctgagctggacccggtggggacagaccgtgggcccctcccagccctcagaccccggggtcctggagctgccacccattcaaatggagcacgaaggagagttcacctgccacgctcagcaccctctgggctcccagcacgtctctctcagcctctccgtgcactaccctccacagctgctgggcccctcctgctcctgggaggctgagggtctgcactgcagctgctcctcccaggccagcccggccccctctctgcgctggtggcttggggaggagctgctggaggggaacagcagtcagggctccttcgaggtcacccccagctcagccgggccctgggccaacagctccctgagcctccatggagggctcagctccggcctcaggctccgctgtaaggcctggaacgtccacggggcccagagtggctctgtcttccagctgctaccagggaagctggagcatgggggaggacttggcctgggggctgccctgggagctggcgtcgctgccctgctcgctttctgttcctgccttgtcgtcttcagggtgaagatctgcaggaaggaagctcgcaagagggcagcagctgagcaggacgtgccctccaccctgggacccatctcccagggtcaccagcatgaatgctcggcaggcagctcccaagaccacccgcccccaggtgcagccacctacaccccggggaagggggaagagcaggagctccactatgcctccctcagcttccagggcctgaggctctgggagctgcggaccaggaggcccccagcaccaccgagtactcggagatcaagatccacacaggacagcccctga

SEQ ID NO: 130202 - DNA, 1578 bp, Homo sapiens
ttgttacgcagctcctatgcactagtaacggccgacgggcgctggaattcgcccttttcccgggtcgacgatttcgtcctgtggccacaaaccaccagagtcgagaggtggaaatgagcacccggggccgattccagctcactggggatcccgccaaggggaactgctccttggtgatcagagacgcgcagatgcaggatgagtcacagtacttctttcgggtggagagaggaagctatgtgagatataatttcatgaacgatgggttctttctaaaagtaacaggtatggaatggggtgggaacccctgcctctcacactggggagggaccctggggacagcctatgggctgagcagagagggctctcagggacccctgcagcacaagaatctcccaccacggtctctgtcccagccctgactcagaagcctgatgtctacatccccgagaccctggagcccgggcagccggtgacggtcatctgtgtgtttaactgggcctttgaggaatgtccacccccttctttctcctggacgggggctgccctctcctcccaaggaaccaaaccaacgacctcccacttctcagtgctcagcttcacgcccagaccccaggaccacaacaccgacctcacctgccatgtggacttctccagaaagggtgtgagcgtacagaggaccgtccgactccgtgtggcctatgcccccagagaccttgttatcagcatttcacgtgacaacacgccagccctggagccccagccccagggaaatgtcccatacctggcaagcccaaaaaggccagttcctgcggctcctctgtgctgctgacagccagccccctgccacactgagctgggtcctgcagaacagagtcctctcctcgtcccatccctggggccctagacccctggggctggagctgcccggggtgaaggctggggattcagggcgctacacctgccgagcggagaacaggcttggctcccaacagcgagccctggacctctctgtgcagaatcctccagagaacctgagagtgatggtttcccaagcaaacaggacagtcctggaaaaccttgggaacggaacgtctctcccagtactggagggccaaagcctgtgcctggtctgtgtcacacacagacagccccccagccaggctgagctggacccagaggggacaggttctgagcccctcccagccctcagaccccgggggtcctggagctggctcgtgggttcaagtggagcacgaaggagagttcacctgccacgctcggcacccactggggctccccgcaggactctcctaccctctccgtgcactactccccgaagctgctgggcccctcctgctcctgggaggctgagggtctgcactgcagctgctcctcccaggccagcccggccccctctctgcgctggtggcttggggaggagctgctggaggggaacagcagcccagggactccttcgagggtcacccccagctcagccggggccctgggcccaaacagcttcccctgagccctccatggagggcctcaactccgggcctcaagcctcccgctgtg

SEQ ID NO: 130203 - DNA, 1029 bp, Homo sapiens
tcgggccccggcctagtgcgggcgtacgtgcgcaggaattcgtccttttcccggatcgacgatttcgatctgcgcctcctattctgtagatgttactgccactgctgctgtcctcgctgctgggggggtcccaggctatggatgggagattctggatacgagtgcaggagtcagtgatggtgccggagggcctgtgcatctctgtgccctgctctttctcctacccccgacaagactggacagggtctaccccagcttatggctactggttcaaagcagtgactgagacaaccaagggtgcttcttgtggccccaaaccccccagagtcgagaggtggaaatgagcacccggggccgattccagctcactggggatcccgccaaggggaactgctccttggtgatcagagacgtgcagatgcaggatgagtcacagtacttctttcgggtggagagaggaagctatgtgagatataatttcatgaacgatcgggttctttctaaaagtaacagccctgactcagaagcctgatgtctacatccccgagaccctggagcccgggcagccggtgacggtcatctgtgtgtttaactgggcctttgaggaatgtccacccccttctttctcctggacgggggctgccctctcctcccaaggaaccaaaccaacgacctcccacttctcagtgctcagcttcacgcccagaccccaggaccacaacaccgacctcacctgccatgtggacttctccagaaagggtgtgagcgcacagaggaccgtccgactccgtgtggcctatgcccccagagacctttggtatcagcatttttacggtgacaaacacgccagatcctccagagaacctgagagtgatggtttcccaagcaaacaggacagtcctggaaaaccttgggaacggcacgtctctcccagtactggagggccaaagcctgtgcctggtctgtgtcacacacagcagccccccagccaggctgagctggacccagaggggacaggttctgagcccc

SEQ ID NO: 130204 - DNA, 1001 bp, Homo sapiens
gcggtgtggaaaaagtatgtcggcaagtcagctggtttcccagtgcaggacgcgctgacagctcgagtgagcggactgcccaggacttcggaactagacgagttctgtagaaatcctgtcaaagaatatgaagaaaaacagagaaagattctgcaatagagagagagaatttgtatataaatttaaagtaggaagtcagtgcttagaactgagagtgccactcaaatttcctgttcaagagaatgccagtcatttgcatggacgtctgatgctgctgcacagtttaccgtgcttttattagaaaaagacttaaaagaagctctgactcagtttatagaagaaagaatccctcagcgagttatgatagagatgctgaagcatccctggcagctgtgaaatcaggtgaagtagatttacatcagctggcgagtacatgggccaaagcttatgctgagaccacgttagagcatgcaaggcctgaagaacccagctgggatgaagattttgcagatgtgtaccatgacttaattcattctcctgcctctgaaactctcttaaatttggaacataattactttgttagtatctcagaactgattggtgaaagagatgtggagctgaaaaaattacgagagagacaaggtattgaaatggaaaaagtcatgcaggaattgggaaaatcactgacagatcaagatgtaaattcactggctgctcagcattttgaatcccagcaagacctagaaaataaatggtcgaatgaattaaaacaatcaactgccatccaaaaacaagagtatcaagaatgggtaataaaacttcaccaagacctaaaaaaccccaacaacagctcccttagtgaggaaattaaagttcagccaagtcagttcagagaatctgtagaagcaattggaaggatttatgaggaacagagaaagttagaagaaagttttaccattcacttatgagcccagttgaagaccatgcataatttgagattg

SEQ ID NO: 130205 - DNA, 648 bp, Homo sapiens
cttcgactgctgcccccaggacttacggcctgtgctctttttgtctcttcctttagtgactggccatgtcattgtcccacttataccgggatggggaaggccgcattgatgatgatgatgacgagcgggagaactttgagatcactgactgggatctccagaatgagttcaaccccaaccgacagcgccactggcagaccaaggaagaaaaaggatcgctgcagagaaaagagttctttaccgacctggtggggctttgtttctgtgcctacagggcccgtgactactctgcgccagtcaacttcatcagcgcagggctcaagaaaggggcagcggaggaggcagagttggaagattctgatggctttcttagatttttcttcattttgtttttccattaactaagctttgatttttcttttttgcagggtggcaattttaagcccagccagaaaggttttgcaggaggaaccaaatctttcatggacttcggcagctgggaaagacacacaaaaggaatctgattcacatacatgaattgctgtgatcgtaagactctcttttttttttgctgaaattcctcaggtatcattaacccaattgaagccaagcagagaaagggaaaaggtgctgtgggggcttatggat

SEQ ID NO: 130206 - DNA, 450 bp, Homo sapiens
tttcgtgtaggagcggcgtcttctcgcgcggttggagattctgaatttggtacgctggaccctcggacagacagcaagagagagacaagcccgaggcctgacttctagcactcctgagtttgagccctatgagcagtggaacctagggaccaccaaggatccagatataattctttcctcagtaatagaaaaaagaatctgggatctaagaagatacctactcattttctaagtgactggccatgtcattgtcccacttataccgggatggggaaggccgcattgatgatgatgatgacgaagcgaggagaactttgagatcactgactgggatctccagaatgagttcaaccccaaccgacagcgccacttggcaggaccaaggaagaatccacctacggggtgtgggcagagcgagactcggatgatgagaggcccagctttggaggg

SEQ ID NO: 130207 - DNA, 361 bp, Homo sapiens
ggcagacttgagtctcctttctgtccatgggctcgggccactgtatcaggtccacccgtggctccaaaatggtctcctggtccgtgatagcaaagatccaggaaatatggtgcgaggaagatgagaggaagatggcgcgagagttcctggccgagttcatgagcacatatgtcatgatgaacatacatatgatagttgagaaaaatacttgatctgaaggtcccagcaaggagccgactcacagaagaatgcagttttcacatcatgatgatttaatcttccttgacctgagcaattgacaaccccaattctccagaacctcacccgccacaatccccttaaaaaccctggcccagaaccc

SEQ ID NO: 130208 - DNA, 481 bp, Homo sapiens
ttaactcagctgtgagttgaagagccgatgggcagcaggcaaacttgagtctcctttctgtccctgggctcgggccactgtctcaggtccacccgtggctccaaaatggtctcctggtccgtgatagcaaagatccaggaaatatggtgcgaggaagatgagaggaagatggtgcgagagttcttggccgagttcatgagcacatatgtcatgatggtgagtgggtgggcagcacgaagtgggtggggctccaccagggctgtccatgaaccccctccccatgctgaccccatgggtcacattgtccattccttgcctctgagctgggagcctggggaagcagtgaggaaagtaaggagtgggggctttctcatcaagtctttttggacagaaagggctcataatatgtgggggtcaaatgaaaccatgcactggggtatccggggcacggctggaaatggggagaagggaaacccagagt

SEQ ID NO: 130209 - DNA, 604 bp, Homo sapiens
ggcacgagggcagacttgagtctcctttctgtccatgggctcgggccactgtatcaggtccacccgtggctccaaaatggtctcctggtccgtgatagcaaagatccaggaaatatggtgcgaggaagatgagaggaagatggcgcgagagttcctggccgagttcatgagcacatatgtcatgatgaacatacatatgatagttgagaaagacacatattctgatcatgaagaaataaacacaagttaaatatgactaagcagaaagatggaaggaccaggaatggtgatgctaacttggaaccacgatgcaggctctaaactcctctacaatcatcctcccttgtgagaaaaatacttgatctgaaggtcccagcaaggagccgactcacagaagaatgaagttttcacatcatgatgatttaatcttccttgacctgagcaattgacaaccccaattctccagaacctcacccgccacaatccccttaaaaaccctggcccagaacccctcaagcagacagatgtgaagcttgaggattccttcatctctttgcccaatggcattgtgattattaaactctttttctgctgcaaaaaaaaa

SEQ ID NO: 130210 - DNA, 1046 bp, Homo sapiens
cgggtcagaaactgagccttcgcagaatcgaagccttgaaacaaccgcccacccacgcgttcgtgctgtgggtagagtgcctcactgttgccatgccctggcctgtgaccccaaagttctggctcgggcagataggcagacagacagatggacagacatagactactgagctctactttccagcctgctctctcccaccctactttttcccagaggcttgttggcaccgtggattgcactttcagctccccacctgtccgtctgcaaagtggcctcattggtgtgccatttttactggtccagtcccaactacaaggggcatggcttggccatctaccccagttcctctccatgtccccatggctctcaagtgtctccaattccagctgtcccagctgccccgggcaagaggaggtgtgtgtggcaagtctgctgggttacctattaactcagctgtgagttgaagagccgatgggcagcaggcagacttgagtctcctttctgtccatgagctcgggccactgtatcaggtccacccgtggctccaaaatggtctcctggtccgtgatagcaaagatccaggaaatatgatgcgaggaagatgagaggaagatggcgcgagagttcctggccgagttcatgagcacatatgtcatgatggtgagtgggcgggcagcacgaagtgggtgggctctgccagggccttccatgaccccctccccattctgaccccatgggtcacattgtccattccttgcctctgagctgggagcctctgttcccgtgaaaaataaagattccttcttctgcttcttggcaactgcttccatatagacagtgatctggacgacacttccattgacacggaaagacaaaaaggctttcgcatccgcctcccgccagccaggaagccactgcggcctgcggcttcccgccaccacggcccgctccttcctccggggacacggggagctggctgaaggcgtaaaggagcgagcagaagcctcaggccagacacagagccaccacgcgcggtagcgccgcat

SEQ ID NO: 130211 - DNA, 309 bp, Homo sapiens
tcctggacctgaggcctggccccgccatcactcactgggatccgctgatgggaagccttcctcatgattaccatgacgacaagttgccaggttggagggccttgcactgattcggactggctggagctggtttgagccagctccagcagggaggggctcaccaaattcgccaaattcaccaaattcaccaaaattcaccaaatctgaatcactctaacgagctacagcataaaatcacttgaaaaggtgtgtgctgacttgatcagaggcacaaaggaaaagaatctcaaagtgaaaggaccggtttga

SEQ ID NO: 130212 - DNA, 1216 bp, Homo sapiens
atggcagatctccagtcagtacctggaagttccaagaggaagatttcgggtcaacataaagaagaaatctgtaacagccagagctgcttggtaatagaacctcctcctgaaaagcaagagactccatctgtgggagtccatggctcagtgtcctccatgctagaaccggactccccctgcctcacgtgccacacccaatccccacattcgtcctgtttcacctcctggaaatttctggcatccatccctccatttccagccccctcaccacgcagccattctaagctgctcttcgcctccctgcctgtgctcaggccatctccatccccttgccaggactcagctgaagatggctccatgaagacgactgtgcctaactcatcccagcgtctagttcaggcctggcgtatcaccggtactaatacatgtttgcgggctgagtacaagtgtgggcctgtggcacacatccctccttcctgttgggaaagtcggtccttgctcagtactgaatgggttccacgactgggctcggggcgggacccttctgagacagtgtctgtgaatgatgttttggcccgagctgcagccaagggtctgctggatgggattgagttgggtaaatcatcaaaacgggagaagaagaagaaaaaatcaaaaacatcattgacaaaaggtgccactactgataatggcatccaaatgaaaattgcttgagttcctgaatcgagaaactaaagccagtgctaatctatcagagactgtaacaaaaccacctcttccccagaaaaatactgctcaagtgggggcttcctcacagaccagaaaacccaacaagctggccccccatcctgcagtgcctgcatttgtgaagaacacttgtccctccagaccgcgtgaacggcagacacacttcttaagacctcggccagaagacagaatggttgctctgaaacccatcaagattgttctgcctccagtctttatgccattttcaagtccccaagggatcagatctcggatgccaactcaacatttgtactgtcgttgggttgcacccaaggcacttgtgcccacctgccttcccacacactcactatccagaaaagaggaaaagcctaaaagaatggacacacctttcctcccttactccaggcctccctcgggcgaatggcttttgattgtcttgtggttttttaataggagccaaagaagcagg

SEQ ID NO: 130213 - DNA, 206 bp, Homo sapiens
gagcagcagcaagatttattgcaaagagcgaaagaacaaagcttccacagtgtggcagggagaccgagtgggttgccgctgctggctggggcagcctgcttttattctcttatctggcctgattggtgcgtttacaatccctgagctaggcacaaaggttctcgacttcccgaccagagtagctagatacagagtgtcaattggtg

SEQ ID NO: 130214 - DNA, 389 bp, Homo sapiens
cagtcagcaggatgtgggtcgggccggataagagaataaaagcaggctgcccagccagcagtggcaaccctctcaggtccgcttccacattgtggaagctttgtcctttcgctctttgcaataaatcttgttgctgctcactctttgggtccacactgcctttatgagctgtaacactcaccgcgaaggtccacggcttcactccgcgagggtccgcggcttcattcttgaagtcagtgagaccaagaacccaccaattccggacacaatactgctgctgatctgacaggagacagaactcagatggtaatgctcgcgtgcccactgcccacagcctcctgctgtgccatcctgttcctagaggccacgaaccagtaccagtctgcagc

SEQ ID NO: 130215 - DNA, 355 bp, Homo sapiens; identical to SEQ ID NO: 119887

SEQ ID NO: 130216 - DNA, 472 bp, Homo sapiens
tttactagcaagatttattgcaaagagcgaaagaacaaagcttccacagtgtggaagtgggacccgagcgggttgcccaactaaattcttaattctgaattataaactaaaaaattaaatcaaagctatgtatatataaaaacacttacatataggtatatatgtaaacacatgctacttacacattgcttttttaatagttcttttgtgatcaacactcctataatctcatggtagcaccaccaagtgtagtttactatcagaggtcttacctggattgctattttgagaatttttagataccttttgttatattccaaaagttgttgatcaatgagattaaacccacaagcaacagcataacgttgcaatcattccacacgtatcttcagcacagatgtcaacattttgctgaagaaccatgccaactatctctgatgatccatggcatatggcaagcatgagggctgtg

SEQ ID NO: 130217 - DNA, 553 bp, Homo sapiens
cttcactcctgagccagcgagaccacgaaccccaccagaaggaagaaactccgaacacatccgaacatcagaaggaaaaaactccggacacgccgcctttaagaactgtaacactcaccgtgagggtccacggcttcattcttgaagtcagtgagaccaagaacccaccaattccagacacaaaactgagaggcggaggttgcaagggttcggtctcgctggctttaggagtgaagctgcagaccttcgccgtgagtgttacagctcataaaggcagtgtggacccaaagagtgagcagcagcaagatttattgcaaagagcgaaagatcaaagcttccgcagtgtggaaggggacccgagcggcccttgggtggttgatgggactgggtgctgtggagtgggggcggcactcgttggggaggctcgggccacacaggagcccacggagcagcggggaggctcaggcatggcgggctgcaggtcccgagccctgccccatgcgaaggcagctaaggcctggcgagaaattgagcacagcagctgctggcccag

SEQ ID NO: 130218 - DNA, 800 bp, Homo sapiens
ctgagggacacctttaccaggtccccttcctaaccctccagtcccaaatccaagattctttaaccacactctaaaagttcttcagactcaggacttaaacatagccacgccaccttgggccttcaaatgacaagggatctagcaattgtggcttcatcagccttccaataccaggtttaagggttttttaaacccagctcttcttaaaatcctccaatctcagtacccagtgttttagccatgctcgggtggctaaattacatccaggaatggtgccagggcctttagccatttgtctctcctcacactccagggcccatatggcccaggttctgacagtttgccttactcccttggcctggggcaagcccctacctgaataccctgtgtcaatgagtgtaccttggagagctatcccactcaggcccccagtgcctcctatttgcctaagggactctgcccacagaaaagaaggggagagatgttcatgtaacctcaaaatacttaggcttggttttgatgctagagaggaaaaaggacttggagagagagaaggaatggctggtccagaggcttttgtccactccctctcactggaagttggttgatctccagggaatccccaaggttagcctgcttaggggaagggctaggggtacctggaatgtaggatctcccccatgcctggcctaccaccctaatgtgtccggaattggtgggttcttggtcttgctgacttcaagaatgaagccgtggaccctcacggtgagtgttacaattcttaaaaaaaaaaaaaaaaa

SEQ ID NO: 130219 - DNA, 2943 bp, Homo sapiens
ctgggccagcagctgctgtgctcattttctcgccgggccttagctgccttcccgcagggcagggctcgggacctgcagctcgccatgcctgagcctcccccaaccccgtgggctcctgtgcggctggagcctcgcctacgagcaccgccccctgctccaaggcgcccagtcccatcgaccacccaagggcaatcagcaggatgtgggtggggccagataagagaataaaagcaggctgcgggagccagcagtggcaacccgcttgggtccccttctacactgtggaagctttgttcttttgctctttgcaataaatcttgctactgctcactctttgcgtccacactgcctttatgagctgtaacactcactgcgaaggtctgcagcttcactcctgaagccagccagactacgaacccaccgggaggaacgaacaactccagatgcgccaccttaagagctgtaacactcaccgcgaaggtcccgcagcttcactcctgagccagcaagaccacgaacccaccagaaggaagaaactccgaacacatcttgaacatcaggaagggaacaaactctggacatgccgcctttaagaactgtgacactcaccacgagggtccgtggcttcattcttgaagtcagtgagaccaagaacccaccaattccagacacattttggcaaccacaaagggactatcacctattgccaagcggtgagactatcgccaagtggtgagaccatcgtctatcgctgagcagcaaaacaatcgcctatcgccaagcaaatcgaagccatcaagctacagatggtcttacaaatggaaccttcaatgagctcaactaacaacttctaccgaggacccctggaccgacccgctggccctttcactggcctaaagagttcccctctggaggacactacaactgcagggccccttcttcacttctatccagcaggaagtagctagagcagtcatcggccaaattcccaacagcagttggggtgtcctgtttagaggggggattgagaggtggcagtgtgctggcagccctcgcagccctcgctcactcttggctcctcctcggccttggcgcccactctggccatgcttaaggagcccttcagcctgccactgcactgtgggaacactggccaaggccagagccagctcactcagcttgtggggaagtgtggagggagaggcgcaggcgggaactggggctcgatgcggcgcttgcgggccagcgtgagttccggtggttggtggcttggcgggccccagactcggagcggctggcctgccctgctggccccaggcagtgaggggcttagcacccaggccagcagctgtggatggtgcgctgagtctcccagcagtgctggcccaccccaccagcactgcactcgatttctcgccgggccttagctgccttcccgcggggcaaggcgcgggacctgcagcccaccatgcctgagtctcccctgctgccgccgtgggctcctgtgcgaccccagcctccctgaccagcgccgccccctgctccacggagcccagtcccatcgaccacccaaagggctgaggattgcaggcacacggcacgggactggcgcaggactggcaggcagctccacctgcagctctcctgcgggatccactgggggaagccagctgggcttctgagtctggtggggacggtagagaacctttatgtctagctaagggattgtaaatacaccaatcagcactctgtatctagctcaaggattgtaaatacaccaatcagcaccctgtgtctagctcagggtttgtcaatgcaccaatcggcactctgtatctagttaatctggtggggagttggagaatctttatgtctagctaagggattgtaaatacaccaatcagcactctgtatctagctcaaggtttgtaaacacaccaatcagaaccctgtgtctagctcagggtttgtgaatgcaccaatcagcactctgtatctagttaatctggtggggacttggagaatctttatgtctagctaagggattgtgaatgcaccaatcggcactctgtatctagctcaaggtttgtaaatggaccaatcagcactctatgtctagctcagggtttgtgaatgcaccagtcgacattctgtatctagctaatctagtggggacgtggagaacttttgtgtctaactcagggattgtaaatgcaccaatcagaaccctgtaaaaatggaccaatagctctctgtaaaacagactgactttctgtaaaatggaccaaccaatcagcaggatgtgggtggggccagataagagaagaaaagcaggctgcctgagccagcagtggcaacccgcttgggtccccttccacactgtggaagctttgttctttcgctctttgcaataaatcttgctgctgctcactctttgggtccacactgcctttatgagctgtaacactcaccgcgaaggtctgcagcttcactcctgaagccagcgagaccacgaacccaccagaaggaagaaactctgaacacatctgaacatcagaaggaacaaactctggacacgctgtctttaagaactgtaacactcaccgcgagggtccgcggcttcattcttgaagtcagtgagaccaagaacccaccaattccggacacaggaggatcgcttgagcccaggaattcaagaccagcctgggcaacccagcaacactccatctctacagaagttgtaaaattagctgggcgtgatggggcgcatctgtagtcctagctacttatcctagccttggcgagaggatcacttgagcccaggaggttaaggctgcagtgagccatgattgcaccactgcactccagccggggtaacaaagtcagaccgtgtctctaaaaataaataaataaataaaaataaaataaataatgacaaccaat

SEQ ID NO: 130220 - DNA, 258 bp, Homo sapiens
  misc_feature (1)...(258): n = a,t,c or g
agcaggacgctgcgcacaacatgggcaaccacctgccgctcctgcctgcagagagtgaggaagaagatgaaatggaagttgaagaccaggatagtaaagaagccaaaaaaaccaaacatcataaattttnacaccagtctnccgacatcacatacatacctaggtgcggaatttaattcagaaagatagaacctttgctgttcttgcatacagcantgtacaggaaagggnagcacagttttggacaacagcagggnt

SEQ ID NO: 130221 - DNA, 431 bp, Homo sapiens
cagctacgtgaatgggatgaaaatctaaaagatgattctcttccttcaaatccaatagatttttcttacagagtagctgcttgtcttcctattgatgatgtattgagaattcagctccttaaaattggcagtgctatccagcgacttcgctgtgaattagacattatgaataaatgtacttccctttgctgtaaacaatgtcaagaaacagaaataacaaccaaaaatgaaatattcaggtatgcctggactgttgcccagtgtaagatctgtgcaagccatattggatggaagtttacggccaccaaaaaagacatgtcacctcaaaaattttggggcttaacgcgatctgctctgttgcccacgatcccagacactgaagatgaaataagtccagacaaagtaatactttgcttgtaaacagatgtgag

SEQ ID NO: 130222 - DNA, 1045 bp, Homo sapiens
  misc_feature (1)...(1045): n = a,t,c or g
gggaagcacagtttggaacaacagcagagatatatgcctatcgagaagaacaggattttggaattgagatagtgaaagtgaaagcaattggaagacaaaggttcaaagtccttgagctaagaacacagtcagatggaatccagcaagctaaagtgcaaattcttcccgaatgtgtgttgccttcaaccatgtctgcagttcaattagaatccctcaataagtgccagatatttccttcaaaacctgtctcaagagaagaccaatgttcatataaatggtggcagaaataccagaagagaaagtttcattgtgcaaatctaacttcatggcctcgctggctgtactccttatatgatgctgagaccttaatggacagaatcaagaaacagctacgtgaatgggatgaaaatctaaaagatgattctcttccttcaaaatccaatagatttttcttacagagtagctgcttgtcttcctattgatgatgtattgagaattcagctccttaaaattggcagtgctatccagcgacttcgctgtgaattagacattatgaataaatgtacttccctttgctgtaaacaaatgtcaagaaacagaaataacaacccaaaaatggaaatattcagttttatcccttatgtggggccgatgggaggcttatgtggaatcctcatggatatgtgcatgagacacttactgtgtataaggcttgccaacttgaatctgataggccggccttctacagaacacagctggtttcctgggtatgcctggactgttgcccagtgtaagatctgtgcaagcccatattgggatgggaagtttacggccaccaaaaaagacatgtcacctcaaaaattttggggcttaacgcgatctgctctggtgcccacgatcccagacactgaagatgaaataagtccagacaaagtaatactttggcctggaaacagatgtgatagagataaggtagttanctacaaatgggtanatccaagatctgccttgggaattatgccccggaacaaccnaagtaacatac

SEQ ID NO: 130223 - DNA, 3462 bp, Homo sapiens
ttaattagcattctggctgcaagtgctttgcaaaacaatacgttggtgttgaacgctgttgtccataagtaaagtctgagaaaatacattctgggtcacatcagaatctttgtcatccagaaacagcatgggaaaattacttttatgctttccaaagagatcttttattttattcataatgtctaattcacagcgaagtcgctggatagcactgccaattttaaggagctgaattctcaatacatcatcaataggaagacaagcagctactcctaggtatgtttcatacctagtcatatgatcttgcaagtgccggagtaagatcaccggctgtgcgtcccggttcctaacaggccacagaccagtgctggttcgtgggccaggatttggggacccctgattgggtagcttctccttgggaccccaaacatgaaggtgttgatgactgtccctcccagtgccatggcattgctgacctatccttctagggatggctccactgattgcatctggagaactataatttagaatcagtggcagccctgagctgcttttcctgcaactagatgatcccatctcctccacctcttctacctgagacagcaagatcaacctctcctcttcctcctcctcctcggcctgctcaactgtgtgtttttcaattttgtttttaaaccctgggcctatgacaccaacagacattatcaggcatatcactgtatcatctcccagggaggaggtggcctcaggaccagcagacaattttgtctgagctgccaagtgcttctgagtcattgcatctttgctgctctccaccctgaggaacttggttaagtaaaacccatctgactgtgttcttagctcaaggactttgaacctttgtcttccaattgctttcactttcactatctcaattccaaaatcctgttcttctcgataggcatatatctctgctgttgttccaaactgtgcttccctttcctgtacattgctgtatgcaagaacagcaaaggttctatctttctgaattaaattccgcaccatactgacttcttgagggtgaaaaagctgaagaggtaatgtctgtccgggaatcaggatcatcatcacttgtggaagaactggaatcacctgacagctgtcgtcatcgtgcaaagtcctgccatgaaattcttccatatcagcacctaggtatgtatgtgatgtcggcagactggtgtcaaaatttatgatgtttggttttttggcttctttactatcctggtcttcaacttccatttcatcttcttcctcactctctgggctcggggcaacagagcagcgaagaaagcgccgcgactccatcgctggccgagggccgacgtgaagcagctttccggtgcggccctgctgggctggctcgccaggcttggcgcccccacgcccgcctcccaggcccagctgcaccgctagcggctccgagcctcgccccactcccgacaggcaggagcggcaggtggttgcccatgttgtgcgcagcgtcctgctgatctccttcgccggccatgtctgtttacccgcaaaggaggctgggacagggcggtgccgaagactccgagggagggcccgtgtcgcgcggctgccgcgcaccggggccacagcgccccctggcggccccaggggagcagacggcggcgcgtacccaagccatttgtttaatttggtaactttatcctgaaagaagatatcatactgagttgttcctaacatttcctcttgcttgcgtgcagtatcaatggataaggagctctgtaactttggttggggtatttcaatgtcttcctccctggacttgtattcttggtcttgcacataagggtttacaaaggccaggatatgtgaagttttgtccttcctgtctgcttctgctcctgggacatcatgctcgtcccacttcttcatgtcattgtgttccttgcccttccagtgtctagaggctgcccagattctttggttcatggccttcttctcagtcttcaaagcagcaatatcccatctctgtgacccttcttccatcctcacagctccctttcgctctgtgatcccaggtggcaaaggttctctgattttaaggtgctgggctctgtggagctccttgccacacttccctgagctggtaccgttatctggcccttggtatatgtgtttcaggagcaacacaaagtagcccattggcctccttggtggattgggaactccttcctcccttcttgccctgtgcaactcatagtcattctttgggaacccgtaaccatcatcacttcctccatgaagcttttctcctagagcctccacagccacgggatcagaacaaacatgcttttccaagatatccgttccaatagggatttttagcccaatttctttccttggcatttggaattcactgcgtgcagcatgggggagtgttgatatctttggaattcgaatttgttcactgctgctgccatctcctccgtcgctgaatggcttaatttctattatataatcttcatcgaaaggcaaagaaagctccaccgatgttttatttgtttcaatgacagatgtgctgctttgtctgttccatctgtacaagaccttccttggggtgtagttgaggaggtgtagggtgtctggctcttccagtaccactctctcaagggtggtgatatccccttgatcattttttattgcatctatttgattcttctctcttttcttctttattagtcttgctagcagtctatcaattttgttgatcttttcaaaaaaccagctcctggattcactgattttttgaatggttttttgtgtctctatctccttcagttctgctctgatcttagttatttcttgccttctgctagcttttgaatgtgtttgctcttgcttctctagttcttttaattgtgatgttagggtgtcaattttagatctttcctgctttctcttgtgggcatttagtgctataaatttccctctacacactgctttgaatgtgtcccagagattctggtatgttgtgtctttgttctcgttggtttcaaagaacatctttatttctgccttcatttcgttatgtacccagtagtcattcaggagcgggttgttcagttgccatgtagttgagcggttttgagtgagtttcttaatcctgagttctagtttgatcgcactgtggtctgagagacagtttgttgtaatttctattcttttacatttgctgaggagtgctttacttccacctatgaggtcaattatggaataagtgcgatgtggtgctgagaagaatgtatattctgttgatttggggtggagagttctgtagatgtctattaggtctgcttggtgcagagctgagttcaattcctggatatccttgttaactttctgtctcgttgatctgtctgatgttgacagtggggtgttaaagtctcccgtcat

SEQ ID NO: 130224 - DNA, 1159 bp, Homo sapiens
ttagtctatcattgctttgtaaacattctccggttttacattactacagaatatggtccagatataaagttctactgtgtcataagacagctgattttcagaattacgtgatttattcataatgtctaattcacagcgaagtcgctggatagcactgccaattttaaggagctgaattctcaatacatcatcaataggaagacaagcagctactccatctgactgtgttcttagctcaaggactttgaaaccctttgtccttccaattgcctttccactttccactatcctcaattccaaaaatccctgttccttcctcgataggcatatatcctctgctgttgttcccaaactgtgcttccctttcctgtacattgctgtatgcaaagaacagcaaaggttctatcttcctgaaattaaattcccgcaccataactggacttcttgaagggtgaaaaagctgaagaggtaatgtctgtccgggaatcaggatacttcatcacttgtggaagaactggaatcacctgacagctgtcgtcatcatgcaaagtcctgcccatgaaattcttccatatcagcacctaggtatgtatgtgatgtcggcagactggtgtcaaaatttatgatgtttggtttttttggcttctttactatcctggtcttcaacttccatttcatcttcttcctcactctctgggctcggggcaacagagcagcgaagaaagcgccgcgactccatcgctggccgagggccgacgtgaagcagctttccggtgcggccctgctgggctggctcgccaggcttggcgcccccacgcccgcctcccaggcccagctgcaccgctagcggctccgagcctcgccccactcccgacaggcaggagcggcaggtggttgcccatgttgtgcgcagcgtcctgctgatctccttcgccggccatgtctgtttacccgcaaaggaggctgggacagggcggtgccgaagactccgagggagggtccgtgtcgcgcggctgccgcgcaccggggccacagcgccccctggcggccccaggggagcagacggcggcgcgtacccaagcatctgtgtatcttttactcccccattctcctcctctcctctccgctcttcacattcatcacctgctccctccttcat

SEQ ID NO: 130225 - DNA, 1185 bp, Homo sapiens
ctacttggtcatgatgagatgccctgttttgtattgctggatttgtttgctaatattttcagagactcttgtgcctatgtctatgttaatgaaggcttggtttgaagtctccttctcttgtagcgtcttcttcatgttttgatagcagggttttactagcttcaaccatgagctcacatctatgcatggctgtgtggtcttcttcccttcttctccaccagcaacggatggtgtttcatcactcttaaaacatttacccctccagtgagtagaaactgatattgtgctgtcttcgctgacctctcgcctgcttcttgtggttctgagcacctctagataacttcccagccacttggattggttcttccgtaaactgtttcttaagcgtcctgtgcccattttcccctcacttgttgctttgttggtgccacacagcggatgttctctgcatctggtaaacattagcgcctccgccccctgcccatggcctgtgctcccaaacgctctgtccaaagctgccacttctctcccgttcagttcacatctctggggagagacaaggaagctcgtgacactagaacgaggtctggtaggtttgcctctggaattccgagtgacctgggacaagtcattctgtccagtgagaagacaagtatttagaagcgtcttctccaggaccccagaaggctccctcgccctcggcccattctgctccaagacgcaggcaggcattccccgcagagctgtgctgccttgctgaggttcattatctggccggcagctgagcctgcgatcccccagcagctttctaaatgtggcagggatcggtatagaggtctctcttccgacaccacaggccgtctgctgccttcccacggaccccgtgctccgactgccctcgctgcagtgcgggaaccatggaggactgctggcttgtcctgggcagtcctgagctgcgttaaaaaagtctgcatgaacggccttttcattggctgccaagtccatcaagagcccggtgctgcctcccgcgctcggagactcccgccgggcccgtgccacctcgtccaggtccacgtagggcccggcgccctcggggaacatctcgtccaccgccggcttcatctcggggccgcggcgctctaggctcacttccggcctcagagccgcttccggcgcgcgccacat

SEQ ID NO: 130226 - DNA, 482 bp, Homo sapiens
tttttttgacattgctttcttttaattggagtgaggacaaaacctgatcccgttcagagatgaacagaatcatctaggtcgttaagaacagtcttatctttctggttaaccaggtcctaaattcaagggatttccacgtgttctttaaaaccacctgaaactgtcctgcgcaggctcacactgcggctctgtaccaagggcttggccccgcctgcagccagagggcatctcactggatgtcatcatcatcaaaaagatcttcaaaatcgttaaaaaagtctgcatgaacggccttttcattggctgccaagtccatcaagagccccggtgctgcctcccgcctggggaatggaaaggcaaggttatgtcaggtgcgttttccgaaagaacaggtgataagtgcattgcagggccactacccccacaaaaaaagaagatgggtgaggggaaacaggctcaagttggagtcaacattttagttc

SEQ ID NO: 130227 - DNA, 1656 bp, Homo sapiens
aattgacgccctcatggaccgttgaggatctttcgggtcgacccacgcgtccggaagaagctagtcaaaaggaaatagaagaatgggaaagaaaacttctagctcaagcagctccaacttgtatggagaccatgtgggaaattccagctattgggcatttcctttgtttagctcagcaaattctaaatttgccagaaatagtcttttacgaattggaaccgttgtcttctgatgcctcagtgtaatgcttttctatcgaaaataatgacttctctattaagtcctccccatcgcagacctaccttacatcgaagacctactttgccttataggacctgggaagcagcgctgaaggcagaaagtacaacagtggtacactgctgtagggcaaactgaaaatcctgataactgtgctgaaaaactggggttgtgtcctcagttttttaaagttcttgggagaagttaatccattgggaaggaaaaaccttttcacggaactacctttttaccaaaaagtgtgggctactttaaggggtctttgtggactttgtgtatggaaacacaaaagggaagttccaagatgctgttacttgggacagcctatcccatggaatgcaggggaagttattcttggggttatggattatttgggagaatgcttatggtaccattttccacagttctgtggtgcagatgtacggatttataaacagagaccctttcaggccccagaatttccaattccacccattaaaatacaaagagtacctcggattaaattggagaaattgaagtgtgactatgttagtacaagtaatcggagaacatagatgtagcagagatagcctgccctcttccttcaagaaagagcaggaaaataattttgatcccagcttgctgtccctgcctaaaatgatccttggataatccatgaccatcctctgttgaaaatgggagtaaaaatcccaacctatgaaattagaattccgcagggccttgtgaaattaaaaaaactgattgttgtaaagaaaatttagagaaacccaaggagtcccaggggaagttactggcctttggagagcctctcagtcccaggtgaaaataaggtttatagaaaatcaggaaaaataccggtgaagcttccagaataaagattgaacccagtcccattaaaagaaaatactctaaaatcttgcccaaatacatgtaaatggaagtcacagtgatcatccagaaaattaactgcccacaaagttggtaagggatattctattagagccagtcacttacagagcaaaaaagaaacttcaaacttaactaaaatgagggcaaaaaagaagaaaaagaaaaaaaagaaattgaaagatgttttgaatgaaaacttacagagaaagcgtgaaggtcttcattctcttgcattcaagtcttacaaacctgagatccagaataagttattgatcatcaaaaaaaaagcaaaacacaagaagcacaaatctggaaaaaaatccgtctctaaaaaagcaatcacaaagaagaggaaaactgtcataaagtcacctactgtaccagagtttcagcttatttgcactaatcttgatgaactcagggaattaatcacaaaaatcgagaatgaactcaaagatctggaaaaaaaaa

SEQ ID NO: 130228 - DNA, 408 bp, Homo sapiens
  misc_feature (1)...(408): n = a,t,c or g
aagatagaagacaacaacacacttgtgttcattgaggatgttaaagccaacaagcaccaaattaaacaggctgtgaagaagctgtatgacattgatgtggccaaggtcaacaccctgattcggcctgatggagagaagaaggcatatgttcgactggctcctgattacgatgctttggatgttgccaacaaaattgggatcatctaaactgagtccagctgcctaattctgannnnnnnnnnnnnnnnnnnnnnncaccatannnnnnnnnnnnnnnnnnnnnnnnnnnnnnnnnnnnnnnnnnnnnnnnnnntnnnnnnnnnnnccttttnnnnnnnnnnntttttacnnnnnnnnnnnnnnaaaaaannnnnnnnnnnnggggggcccaaaaataaaatccggggg

SEQ ID NO: 130229 - DNA, 666 bp, Homo sapiens
tcaacgtccaaaggcgaaaaacccgctattagggcgatggcccacttcctggaacctcacccaatcaattttttgggggcgagggcccgaaaagctgacctctcgccaacctagtaccacttcttcaagcatctcgacaactttttgcaggggaaatgcttccacaaccagcaggatgcagaaaatgctttccaacagtttttcaaatcccaaagcacgaatttttacgctggatctagtttcgtgactgaagtttaatttctgctccaccctcttcttcttctttgtgatcttggggataactgtccaagattcaccctggtgggtcgaagaagacctgaatgcagttctttggttttttcccggatgaggatattctcctttttggttgggctctggcctgctttccctccgccctgtcggggccttgtgttttcgtttctcgtgtggcggctcaggttgggctctctccgcgccctctggtgccttgttagcctccactatggttcctccggcatttggtttgttcgccctgggcccttcaccctcccgtggagtaagttcctgggtgcgggcctgtacgccatccagttggggtgccttctcctcgcgccccccgcgtgtcgagtgagcgcttcgtggcttcgcccgcagaggccacagcat

SEQ ID NO: 130230 - DNA, 1020 bp, Homo sapiens
  misc_feature (1)...(1020): n = a,t,c or g
aaaaatcacggcagttcacattaaatttgggcccccccaaaatttctttagaggggcgcccccccnntgtttgnnnnnnnnnnnnnnnctttccttgtgngtattttgggatggtgacannnnnnnnnnnnnnnnnnnntcagaattagccagccagactcagtttagatgatcccaattttgttggcaacatccaaagcatcataatcaggacccagaagaatatgtgccttcttctctctatcagtcctaaccagggtgttgaccttggccacatcaatgtcacagagctttttcacagcctgtttgatctggtgcttgttggctttaacatccacaatgaacacaggtgtgctgttgtcttctgtcttcttcatgggagactcagtggtcagcagaaacttgatgatgacatagtggccaagcttgtttctcctgggggtcctaagccagtttctggaattctttacgtaaaaggcatggttacatgttatgaaagcgcggaagaacggctgttttctttgtgtgactaaagccttgggattcgtgggcatatcaccagcgaggggatttctgctttaaatattctcacagttttcaaacattttcagcaccttagcaggaaactcagaggccactgaacctgctaaggataaacttaatactggttgatgccggagcccaggtgaagtcctgtgctccagagagcctttaagaatggcccaggaactgctaacgaacgtacagtacagtggtggttcaaaaagctttgcaaaggagatgagagccttgaagatgaggagcatagtggctgaccatcggaaatttacaacaaccaattgagagcaatcttcaaagctgatcctcttacaattacacgggaagaagttttccctcatccactatattcacctgacctctcgccaaccagctaccacttcttccagcatcttgacaactttttgcagggaaaatgcttccactaccagcaggatgcagaacatgctttccaagagtttg

SEQ ID NO: 130231 - DNA, 666 bp, Homo sapiens
atgcaccgaagctgcggcagcgacgcttatgcgttgttgggggagcgttctgtaagcctgcgaaggtgtgctgtgaggcatgctggaggtatcagaagtgcgaatgctgacataagtaacgataaagcgggtgaaaagcccgctcgccggaagaccaagggttcctgtccaacgttaatcggggcagggttagtccaatctctgtctccgattcagtctgcagcagacgcgggtgagttgggtagcaacggcattctgccagacgtcgaaagcttgcgtattccggtacagtatctggcgaatttgctgaccgccggtgataccaaaccggtactgcgcgcactgaaacgtatgctggcgatgcgtcattacaaacgtgctgaaaccgttgacggtaaagttgatacccgtgcgctggaagaggtcggtctgaccgaagcccaggcacaggagatgtaccgttatctggcgattgctaactacgaagatcgctttgtggtgccgagtagtcatcgtgaactggcacgggaagccttcccggagaaaaatggctgcggctttacctttggtgatggctgccacggttcagataccaaattcaatctgttcaacagccgtcgtatcgatgccatcgatgtgaccagcaaaacggagccgcatccatga

SEQ ID NO: 130232 - DNA, 1980 bp, Homo sapiens
atggaaacattgcgtatttttggtcgtggtgaagctgaaattgaaagtattcgttctgcttcggaagatttccgccaacggacaatggaagtgctacggctggcgtttttatcctccggcattctcgaattttttacctcgctgtcaattgctctggtggcggtctactttggtttttcctatctcggcgagctggattttggtcactacgataccggtgtgacgctggctgcgggttttctggccctgatccttgcgccagagtttttccagccattacgcgatctcggtgccaccctccataaaccgaaattttctgaagcattgcgaaccggccttatttttggtgccgtcgaaaccctgacgccgctgatcggctggggaatgggcatgttagccagccggtttgtccttgaatggaaccactggattgcgtttgtgctgctgatattcctcggcgggcgaatgattattgagggttttcgtggcgcagatgatgaagatgaagagccgcgccgtcgacacggtttctggctactggtaaccaccgcgattgccaccagcctggatgccatggctgtgggtgttggtcttgctttcctgcaggtcaacattatcgcgaccgcattggccattggttgtgcaaccttgattatgtcaacattagggatgatggttggtcgctttatcggctcaattattgggaaaaaagcggaaattctcggcgggctggtgctgatcggcatcggcgtcaagatctctggagcacatcaccgtaacaccaagtacaggaatattaacctgtttcccatcgactacgcctttcggcctcgccttaggggaacccttggtcttccggcgagcgggcttttcacccgctttatcgttaccaaatccagcattttcagcgtcacgccattggtccagccaaagccatcctgtaatggatattcgccaccgccgccccccgttccgcatcgccgggagtttcagcggcgtgttattgccgagaagattttttgccagcaccatcgcgctaagttgaatcggctggaggaacggcaatacctgaccgttaatttccgcgcaatcgcccagcgcgtaaatatcggtattactggtttgcagataactatcgacgcaaacgccgcgattaatcgtcagcccggcgcgtcgtgccagggccggtttccgggcgcagtccggtgtggcggcaattaccgcatccacttcgatattgcgctggcggtccagcgttggcctgaatgccagaatccgttttttccagcccctgtaactgagatttcaacagcagatgaacgcccatctccgttaaccggatgtctgcaacggcttgttactttcgggtcggtcatcttcggcatcatcaatatgatcatgcgtctggcacctattggtcgcttcggggcaatggcgtttaccatcggtaaatacggcgtcggcacactggtgcaactggggcagctgattatctgtttctacattacctgtatcctgtttgtggtgctggtattgggttcaatcgctaaagcgactggtttcagtatcttcaaatttatccgctacatccgtgaagaactgctgattgtactggggacttcatcttccgagtcggcgctgcgccgtatgctcgacaagatggagaaactcggctgccgtaaatcggtggtggggctggtcatcccgacaggctactcgtttaaccttgatggcacatcgatatacctgacaatggcggcggtgtttatcgcccaggccactaacagtcagatggatatcgtccacccaatcacgctgttaatcgtgttgctgctttcttctaaaggggcggcaggggtaacgggtagtggctttagcgtgctggccgcgacgctctctgcgggtgggccaattgccggtagcgggtctggcgctgatcctcggtattcgaccgctttatgtcagaagctcgtgcgctga

SEQ ID NO: 130233 - DNA, 1154 bp, Homo sapiens
gagagagagtaactgcatggaaggccttgaagactgggcttgggcctgctgtacccacatgactgcttctgccacgttctactggccaagctctatgggcagctcagacacaagggaagagactctgctgcttcctgggagaagctgcaagaccacattgcgaaggaacatgttgttgctgctcccatgttaccttcgtcagtgacctgagatgcagactggatctagggaatggtgtttcctgtgtgatgccttccaggagtatctgcaccacgggcagtgccaggccgaggacagagggcctaatggaggacactctacaactccatcctgctgctgggggggcttgggggcgcctccacgagggtcttcagaggaaaggcatgtgtgtgggtctgtggcctgccagcaggagagctgggggaggccggcatcttgaggctgttggcagcaagtgcaggcagaggcctcgggccagaggggaggtggcagggctcaggtgccctgtgcttcctcggagaaggcacttgggatgaaggcttagtcctgcctggtaaacctggaggcctgtgaacactggggttagccccaacaagggaggaggttcccgctgcgtcactaagaacagcctgctgctacactcaccctgacagctgctccgctcccagtgaaccccaccccgagaaggctcatcggggccacggacctccctcagcgctgcattcagaatccctcaggaggttgtaaacttcctgatttctggacccatcaccagagcccaacgtcacggtaacaccaagtacaggaatattaacctgtttcccatcgactacgcctttcggcctcgccttaggggtcgactcaccctgccccgattaacgttggacaggaacccttggtcttccggcgagcgggcttttcacccgctttatcgttacttatggggtgacccccgcactggacactgggttgatgtgactgcggagctgtggcccgccaaggtcaatgctgtgacacagaacgcagcagaaatgctgatcccaccccagacacaggcgaagtcagaccccacctccctcccccaagagtggccgcatctcacagccatcgagcttacaggacagaagaagacttctgcaaacacctactgctaa

SEQ ID NO: 130234 - DNA, 313 bp, Homo sapiens
atggtctacgggacttccgaagctatcgggcagcgtcagtcttcagccgctaagctgagaaggagtcagtcagagagccttcggccagagttccaggggctctgggagtggctgccagtccgtgaccggcaccggagttttgggtctacggataaaacgtgtctcctttgtctctaccagaaaatgaaaggaactgaaattaaaagaagggagagattgaagtgtggcgccaagattgaaaggagaaagaggctgagggttagggaggttggagaagagagtaaaaagaggccgcttactggatttgaaattg

SEQ ID NO: 130235 - DNA, 290 bp, Homo sapiens
cttggtcccacacccatgaggctggcctgggcttcctgttgagaggtctcaaaagctacactgcagtcttgcagagtgagcgggaggtataaagatagtatagtcaaatcatcaagactgtttgctggcagccactcccagagcccctggaactctggcccaaggctctctgactgactccttctgggcttagcgtctgaaaactgacactgcccgatcgcctcagaagccccgtagaccaccacggacaccgagctttgggtaactctcacagtggaaggtaagtccat

SEQ ID NO: 130236 - DNA, 251 bp, Homo sapiens
atggtctatggggcttctgaggtgatcaggcagcatcagtcttcagccgctacgccaagaaggagtcagtcagagagccttgggccagagttccaggggctctgggagtggctgccaggaaatttgcttgtgattgtatttgtaagttactttggatctaaactacacagaccgaagttaattggaattggttgtctccttatgggaactggaagtattttgacatctttaccacatttcttcatgggata

SEQ ID NO: 130237 - DNA, 1136 bp, Homo sapiens
gactgaaagcctccttctctctctcactgaccttcacttcgagactggcccctgatccttccctggtgatctatgccatttttcccagtggaggtgttgtagctgacaaaattcagttctcagtcgagatgtgctttgacaatcaggggacagacttaacttccactgtgagagttacccgaagctcggcatccgtgatggtctacggagcttccgaggcaatcgggcagcgtcagtcttcagctgctaagccgagaaggagtcagtcagacagccttgggccagagttccaggggctctgggagcggctgccagggcctagggctgtgaagcgtctcagggttatatttgatgaaaaagagcctaaacgctatctgatttgggataaagaaaaaggagcattaaccttgactatgcctttggctccagccacctttttaagagtaaattgctgggcagctgtggaagtttatgacggcaatggtgtagattttctaggggaaggggcaccaggttgtttttcaggccaggtgcatgtggatgcagcaagccagcagcttgtgtggcaggctctccaagaaggtgctgctgtcaggctggatgttggattgagtgtgagtatgcataccagataccatgatattgaatcttccattgcttattataaaggaaattggattcctggttttctgaaagtgttgatgcaggagcagggtactgatgggggtggagctggtgggctctgttcctgccaatgctctgactacagtggtactgtggtgggggaagaggtagtgggatgcactcacgccagccgtagtggcacagcatggtacatcagcacattggcaccggtggggaaggcaagcacccatgcacacatgctccagcaaagcaatgtagggggtgctgttgggcaagtgtttgcagacagagtgccgggggaaggctgcagtgggggcagggcacaggcaggcttgtgtgggtccacagggccatctctgctggagcactctgccagtcatgtgcagtccaccaatgcaggagctatatatgggcctccaggaagtattggggactacacttcaaggaggcccaaccttattgggaacccaggagagcccattagaccatga

SEQ ID NO: 130238 - DNA, 364 bp, Homo sapiens
ggcacgagacaggcccttgaaaagaaggtaatgtggagcgggtagcctccgtattgattaagaaggggacgggcttaccttccactgtgagagttaccggaagctcggcgtccgtgatggtctacggggcttccgaggcgatcgggcagcatcagtcttcagccgctaagccgagaaggagtcagtcagagagccttgggccagagttccaggggctctgggagtggctgccagcaaagtctgcaaatgttgagagtgtcttcagtcacagaactgactccccggagggctcgctgccttgcttttctctggtccttgttcatcgcatacctccaggcaacttcagcctcacctttgccctaag

SEQ ID NO: 130239 - DNA, 748 bp, Homo sapiens
tcacatgatcaccggcctttccccagatgcagcatggccctgttgtgaacggaatgattgtgaacggaatgatggccaaggagctttatgcttctgcaccgccagctcacacgatggtccgtgtattgccccgtggaaaaccgggggtggaaagctgtctccacgttctgctgccgaagcagcaagctgattcacacatctccccttctctctgctctgcttctctttcatctgaggagcaatggagtccagttggtaagcatgggagtccggttccaccaattcggatgttttttcagacttctgtaggaacacctctgggctcttcttgtacccattgacatcacccccttcagcccttcctttttctctcttgtacctagcctcactgtgtgcctcctccatgccaggcactgtttcctggtgccatggatacagcagggagcaagaaagagcaccattcttgtccttggccagctggatccctcgtgggccctcaacttcctcccaaaggcttcctgctccactcctcacttcacccctgccactctcctccaggccacatggactccttctgtgtcctggcagccactccacagcgcccctggaactctggcccaaggctctctgactgactccttctcggcttagcggctgaagactgacgctgcccgatcgcctctgaagctccacagaccatcacggacaccgagctttgggtaactctcacagtggagggtaagtccat

SEQ ID NO: 130240 - DNA, 444 bp, Homo sapiens
ctaaacatccaagttgaggagaaggatagccagtgagatccccaggtggggaagctgctccagcactgcccagccaggatcaagatgaccgtcaccttcaacaaccacaggaagccacagctctccaagttccaccagctctacagtgaagacacacaacagcaaatcatcagggagactttccacttggtatttaagagagatgaaaatgtttgtaagtttcttggcaccatctggagcctcacgactgggaaactcaacagaggccaggctcctctctttggcatatttcatactgttgagctccatcttgaaatccgttcctcctgccagggcatcgttcacttctgactcacctgcttttccagctgtccctgctcgggacccttcgtcaactctcctttctacttgcctcttgaatctgggcattctaaatggccccat

SEQ ID NO: 130241 - DNA, 422 bp, Homo sapiens
acatcactcatgtctttatttagggtaggccactgtcctctaattccatactgattcttctgggtactctggtgagccactcaaaaaacaatttctgccaaacctttgggaaagtatcagtggtttggtggccaaattcctcatcaaatagtgcaaactggtttcctccaagctgtgacttcaactaggtccaaaagaaaagcaaagtcgtgtcctgggttcctttttccaagttccgagttgtgggaagatgggttgtggcagctccgggagcagacacataggatttcctccttcctcagctctcaggagggccgctggatccaaggcaggggtcaggtatttccgagatgaagtgaactgaatagggcggctacccgaaaggcagtcctcagcattattccaggaaacatcagggcagt

SEQ ID NO: 130242 - DNA, 1374 bp, Homo sapiens
agcggccgccctttttttttttttttttttttttcagggtttaaagctattttctggcaataacaatttctaacttctaattaccctttttccggcttgaaaatctaaagttggattgaagaagagaaatgacaacatctcccttttacttatccaagctgtgaatttaaaaatacctttcgtttttgtttgtttgtgcctatcaactttgacccatagctcccagaataattttgatattttctgaataaattgacactagactttatacatcactcatgtctttatttagggtaggccactgtcctctaattccatactgattcttctgggtacctctggtgagccactcaaaaaacaatttctgccaaacctttgggaaagtatcagtggtttggtggccaaattcctcatcaaatagtgcaaactggtttcctccaagctgtgacttctgcagagacaagaaatgtccttgttaagtaacactgtcctcaaattttctatgtgtatcatagcctacttcctcctgaatactacctttctccaaatcaagactcaaaataatatgttttctttttaatttctatcctaaatcccatatagaaggaaggatgcaagacgtggtctccatgggagacagagtataatcaccaactaggtccaaaagaaaagcaaagtcgtgtcctgggttcctttttccaagttccgagttgtgggaagatgggttgtggcagctccgggagcagacacataggatttcctccttcctcagctctcaggagggccgctggatccaaggcaggggtcaggtatttccgagatgaagtgaactgaatagggcggctacccgaaaggcagtcctcagcattattccaggaaacatccagggcagaacctttgcagcttcaaagcacagtaaagttgaaagcagtcccaccttggcaattgtgtataaaacgacaatgtgcagatacaggaaaagtcccaggtccgaagccacctaggaacgatgaccccaggacagaagtgtgcccaaacaaatgcctggggtaggtcattttaaaaggaacaatgtttacaagccctttctagcgtgaaaaacagagaaaagagacccagctctttccacccaatctgctggagcgccgtttcgttttcagttgggcgagagggagacatgtggcctctcgccccttttcctgactctgagaatgtggccggagccggggcgctcctgctccgcctcgccgccctcccggggctgtcctgggccctccggccgccgcctcccgctccagttcgcagctgggcgacaagtggctggtaaggaggccaggggcgggagcctgggcgcggaattccaccacgctggag

SEQ ID NO: 130243 - DNA, 515 bp, Homo sapiens
  misc_feature (1)...(515): n = a,t,c or g
actccccggacggcgtttctcctccgagcggcgccggtttcgngttggggggggcggggtacagccatccatgaccatgggcgacaagaagagcccgaccaggccaaaaagacaagcgaaacctgccgcagacgaagggttttgggattgtagcgtctgcaccttcagaaacagtgctgaagcctttaaatgcagcatctgcgactgtgaggaaaggcacctccaccagaaaacctcggatcaattctcagctggtggcacaacaagtggcacaacagtatgccaccccaccaccccctaaaaaggagaagaaggagaaagttgaaaaagcaggacaaaagaggaaacctgagaaaagaccaaggaaatttagtccttagttgttaccaagaaaaataccaacaagaaaaccaaaccaaagtctgacattctgaaagatcctcctagttgaagcaaacagcatacagtctgcaaatgctacaacaaagaccagcgaaacaaatcacacctcaagg

SEQ ID NO: 130244 - DNA, 1065 bp, Homo sapiens
ttagtggctaagctcatccgaaagcattgtcaaagccagaatatccgtggcagtatcttgaaggcttctgtgatcctggtgggcacctggttggaaaattttccatgcaaaggttaccttaaatgaccgagcacccagcatccatttgtggcacatgtagcttgatcctgttatttttcctatggggatattcaggatcatagattggcccactagactgatttcaaggctttcagtgatattttcatgtttgccagacagggccactgtgaagagctgcacaggccatgactgatcaaccctggtgtgaacagcacccactagagtcttctcagcttcagagaagagtctggctttttcttcagcttctggagggcctgagactctgggcgttcctggaagaggctcctgtccccaccaaggcctatgtgtgacacctgggcccttggctcttacccgcgtctgtgttttgctgtctctcccccgttttcctgctccctgcctcttccctcccttttcccccactctccactcctcggaaggccaaaaagacaagcgaaacctgccgcagacgaagggttttgggattgtagcgtctgcaccttcagaaacagtgctgaagcctttaaatgcagcatctgcgatgtgaggaaaggcacctccaccaggtacttgaagatctgtgttacctgggtagttgtggtcatttgacaagtttttattgagcacacagccatttgcgctcttggtgtacagtggtataaagacagaccaggtccctgttcttacggagcttaaaatactggatctggtccctattcggcaccaatccctgttctgcagtgctgccctctccagggaagcctcgctatgtcctgaggccccttgggggatgaggactgggggcatctttgacggggcccgggtgtggagcagcaagagtctttctggggaagcggcttgctcccaggcagccattgtgggggcctgtttgctctggtcatccatttctcctgggcacatgctggcttcctgtttatgcttcctgttgtgcagcgtggccat

SEQ ID NO: 130245 - DNA, 384 bp, Homo sapiens
cggggacctgctggagacctgccatttccaggccttctggcaagccctggatgaaaacatggacctcttggaaggtataactggctttgaagactctgtccgaaagtttatctgccatgttgtgggtatcacttaccagcacattgaccgctggctgctggccgagatgctcggggatctgtcggacagccagctaaaggtgtggatgagcaaatacggctggagtgccgacgagtcggggcagatcttcatctgtagccaagaagagagcattaaacccaagaacattgtggagaagattgactttgacagtgtgtccagcatcatggcctcctcccagtaacttcaggtgtttaataaagatgtgttgactcagtaataaag

SEQ ID NO: 130246 - DNA, 985 bp, Homo sapiens
tcaacaagatggtgaattgactagtgggtagatccacaggacgggtgtggtcgccatgatcgcgtagtcgatagtggctccaagtagcgaagcgagcaggactgggcggcggccaaagcggtcggacagtgctccgagaacgggtgcgcatagaaattgcatcaacgcatatagcgctagcagcacgccatagtgactggcgatgctgtcggaatggacgatatcccgcaagaggcccggcagtaccggcataaccaagcctatgcctacagcatccagggtgacggtgccgaggatgacgatgagcgcattgttagatttcatacacggtgcctgatttccaacaacctttctaggctctttattgcacctggtaagtgaagacgtctgggtttgaaactctgctcttgaaccactacttccattcatctctccattgtcactcttacaaaacctgttctctctcattaaaaaacttccctgttccagcactggttgtggaaggtgaccatagtcatagtgatgttttagtagttgagagtgaatgtgggcaagttgctcaacaatatccacaggtataattctgagaacctggcctccctggggagccagtggaagtttccatgatgaggaagttgtgtgacatgggggttcggaaaaggttggcaggcccaggggggagggttaaagggactgtgggtctcccatcccccctttttcgcctgccccggaactcccgggcttggaaaggagaattatcctggatgttggcgtgcgccgtggccggtgcctggcgactgggcttctctccgcctcctgggggcttggcggggatttcgctagcctcctgggtcgcgctccttcgctttgcttctcttggcgcagcatcttcctctgggtctcctcgagttggttgtgataccaattgtgccaactgtgtgacctccaccccctcggagaaggactcatttgggggaattttcat

SEQ ID NO: 130247 - DNA, 885 bp, Homo sapiens
tcatgttgttactctaggaccctggcttttcttatctgtggctccactatccctttgacgtaatcttttgcatttttccagccagctttgcatctggggctggccacatgacctgagctcgtaatcaaaatgtaagcagaaatctggtgttggggcctctggaaaagcttttgcaaatgctttcttgaggtaggcactgttcctgctgtttccaacaacctttctaggctctttattgcacctggtaagtgaagacgtctgggtttgaaactctgctcttgaaccactacttccattcatctctccattgtcactcttacaaaacctgttctctctcattaaaaaacttccctgttccagcactggttgtggaaggtgaccatagtcatagtgatgttttagtagttgagagtgaatgtgggcaagttgctcaacaatatccacaggtataattctgagaacctggcctccctggggagcacccagatcccgctgaaggcctttaccaacccatgccacaccagcttcaccctgtgcaagcacatggtcatccaagcgcatcaagaaaagcagctgatccaacagattttgtacctgggagatctgctggagacttgacacttccaggccttctggcaagccctggatgaaaacatgacccttttggaaagtataactggctttgaaggtttctagcttgtgggctttgctgattcccaacttttggtgaacaccaaaatctgttccttcagctgtcacttctggagactgaattctcctctgcttccattctttcccttctataattgcccctttttcccctccaaaataagttcccacataggtgcctttgatcccatctgcttttttgcaatcctgccccat

SEQ ID NO: 130248 - DNA, 534 bp, Homo sapiens
ctatcgaatgtcctcttcatccaaaccaaactcttctttgctccctacacacactctttgctttactcctttgggtcttggtttatggcgtttctttgctgtggaaccaaatgctgcttttctgtccaggttcagctcaattgccagcacctccaggaagttttccttgattctagccgtttgagtcagtacaaaacacttaacttttctgagctttgttttcttcgtcagcaaaattagagccataacagtaacgatttcatagggttgttgagaagactgaatgaaaaaaacgtatttaaagctcttagaatagcctccctggctgtctgaggatagaccgccatcatgaatgacatggtaactatctgaactagaaagttcatgaccaaccaacgacttcagaggaaacaaatggtcattgacgtccttcaccccgggaaggcaacagtaccgtacttgatattgattgagcagctgcggtttgccaggcactgtgcttggtatgggggagacagcgatgaaactagtcat

SEQ ID NO: 130249 - DNA, 685 bp, Homo sapiens
gactcccgggtcgactactactactaaatttccgacagcgtcgacagatagatcgcccctccatgaacgacacccgtaacctatcccgcacctagaaaagttccatgccccaacccgacgtacgttcagaggaaaccaaatgggtcattgatgtcctttcaccccccgggaaggccgaccagtgcccctaagcacaggaaattccgggaaaaacctagcccaaaatgtaccaagacccacacccggatgtcatcctttgtattttggattccagaacttcattttggctcgcgtggcaagaccaaactggcttttggcaatgattttatgacttccctgggatttattgcaaaggaaaaatggaaccccaaacataggactttgcaaggacatgggcctggtatggaggaaggaaaaagacctccaaaggaaagccaacggaaagggaacggcaaggaaccggattggaaggaaagttccaggggggacttgcaaaaggcccattttttggtgcttgggcaaaaagaagaaatgaagtgtctagcagttgagctgggagattggattcacagcccgaaggagttaaaaggtgctgcaatgatgttagctgtggcccactgtggattttttgcaaagaacatttaataaactaaaaacttcaaaaaaaaaaaaaaaaaaactcgga

SEQ ID NO: 130250 - DNA, 521 bp, Homo sapiens
tcacatccctttggtctgaactagttgcctggccccgtttagctgttctctgtctggtaacacagtctcgggcaggtccacatctttggtggtcacctggccattgtcgccatgccctcgtctgtcaatgtaaggattttggtctttatcctgtaggtaatgctttgattctagcttctctgatggtacctcatcatattttatgcttgtttgagataatgcatgcaaaaacacattgcacttgtaataccctgagacgccggagtcccccacacagctgtcctcaggacagccacaccgagagcagccacctgagatgccggagtcccccacgcagccgtcctcaggacagtcatgccaagagcagccacctgagacgccggagttgcccatgtagccatgcctggcacaaccgtctcagaaacacatgattaaggggtaacaaaacaacaaacaccatgagaacaaaatgtgaaccatgttgtgaagaaacagtcaaaaactagaaaggatagcaagac

SEQ ID NO: 130251 - DNA, 669 bp, Homo sapiens
ccctccgcacttcagaaatgggctcatccagcgtccccatgactgccgggtgggagaaaccaaagcgctgggatggggctcgattggccaatgagagtgcgtccttggcgtgacatgcggtatagcgacccaatcgctgcccggtaataggcggaaagctccgacgccggtgtgcgtagaaaagagttcgtgtgacaggacctgggggagggctcacattaaccccgtccttcccttcctgcttgcagcccatggcgaattgtggatgattgcggttctcttaaaagttggaaacgtgtctgccagtggcttcagccctgccctaacgcccttccttcctgccttggaagtcccctgagatgtgaattctcaggatttcccaggaactaattaggcctcggttccactacaggtagcttcgcagtgtgggggggcctgttctccaccattgactgtggcctggtgcggcgccctggccccagccccttccaccctgttctgcctgctctcacctctgtttctctgcctccaactcccccaggtggcccactggccatggtgggctcagcaatgatgggggggtggtcgggggagtgggaaatactccacctggcctcttccactcatccttacccaagtctcccttctccagcgcccccattcctggag

SEQ ID NO: 130252 - DNA, 1311 bp, Homo sapiens
gtgcctggtggggtggaggtgccaggtgtgtccagaggagcccaatgggcagtgaggcagccatggggctggatgcactggtgcccctggcagtgacagtggccatcttcctgctcctggtggacctgatgcagcagcaccaacgctggactgcacgctacccgccaggccccctgctggggggaccctggcctgatggaggccctgacccaacggaggccctgaccctccctctacagctgcggcaccgctttggggacgtgttcagcctgcagctggcctggatgccggtggtcgtgctcaatgggctggcggccgtgcgtgaggctctggtgacctgcggcgaggacaccgccgaccgcccgcctgcgcccatctaccaggtcctgggcatgggcggcggagggcggggccaaggcctccatgaccacgcccatgtgtccgtcccgcccccaggggtgtttctggcacactacggacacgcgtggcgcgagcagaggcgcttctccgtgtccaccttgcgcaacttgggcctgggcaagaagtcgcgggaactgggaaggtggaggactgggaaggcgacccctgacccgcatctcccgcccccaggacgcccctttcaccccaacggcctcctgaacaaagcggcgagcaacgtgatcgcctccctcacctgcgggtgccgcttcgagtacgacgacaggtgcagaatgtggaggtcatttgggggctttcccgttctgtcccctgagtaccctctcagccctgctcaggccaaggggaaccctgagagcagcttcaatgatgagaacctgcgcatggtggtggctgacctgttctttgccgggatggtgcgtgtctgtccaggccgtgtccaacagatcgacaacgtgatagggcaggtgtggtgaccagagatgggtgaccaggctcgcatgccctgcaccactgccgtgattcacgaggtgcagcgctttggggacatcgtcctgcttgggggtcccagcatcctagagtccagtccccactctcaccctgcatctcctgcccaggggatgatgctcttcaccaacctgtcatcggtgctgaaggatgaggccgtctgggagaagcccttccgcttccaccccgatggagtcttgcaggggtatcacccgggagccaggctcactgacgcccctcccctccccacaggccgccgtgcatgcctcggggagcccctggcccgcatagagctcttcctcttcttcacctccctgctgcagcacttcagcttctcggtgcccaccggacagccccggcccagccact

SEQ ID NO: 130253 - DNA, 610 bp, Homo sapiens
aggtgcagaatgtggaggtcatttgggggctttcccgttctgtcccctgagtaccctctcagccctgctcaggccaaggggaaccctgagagcagcttcaatgatgagaacctgcgcatggtggtggctgacctgttctttgccgggatggtgcgtgtctgtccaggccgtgtccaacagatcgacaacgtgatagggcaggtgtggtgaccagagatgggtgaccaggctcgcatgccctgcaccactgccgtgattcacgaggtgcagcgctttggggacatcgtcctgcttgggggtcccagcatcctagagtccagtccccactctcaccctgcatctcctgcccaggggatgatgctcttcaccaacctgtcatcggtgctgaaggatgaggccgtctgggagaagcccttccgcttccaccccgatggagtcttgcaggggtatcacccgggagccaggctcactgacgcccctcccctccccacaggccgccgtgcatgcctcggggagcccctggcccgcatagagctcttcctcttcttcacctccctgctgcagcacttcagcttctcggtgcccaccggacagccccggcccagccact

SEQ ID NO: 130254 - DNA, 356 bp, Homo sapiens
gcggtggaattccagcaggttggctcacagcagaaggcaaaggccatcatcagctccctttataagggaacggtcatgcactgggtgtgctgagagtgtcctgcctggtcctctgtgcctggtggggtggaggtgccaggtgtgtccagaggagcccaatgggcagtgaggcagccatggggctggatgcactggtgcccctggcagtgacagtggccatcttcctgctcctggtggacctgatgcagcagcaccaacgctggactgcacgctacccgccaggccccctgccactgcccgggctgggcaacttgctgcatgtggacttccagaacacaccatactgcttcgaccag

SEQ ID NO: 130255 - DNA, 1641 bp, Homo sapiens
gtgcctggtggggtgggggtgccaggtgtgtccagaggagcccagttggtagtgaggcagccatggggctagaagcactggtgcccctggccatgatagtggccatcttcctgctcctggtggacctgatgcaccggcaccaacgctgggctgcacgctacccgccaggtcccctgccactgggtcgtccaaggttcaaataggactaggacctgtagtctggggtgatcctggcttgacaagaggccctgaccctccctctgcagttgcggcgccgcttcggggacgtgttcagcctgcagctggcctggacgccggtggtcgtgctcaatgggctggcggccgtgcgcgaggcgatggtgacccgcggcgaggacacggccgacgttcccaaggcaagcggcggtgggggacagagaccgcgtttccgtgggccccgggtggacagtgaccgtagcccaagcagcgccgacagggcgtggggtcctggacgtgaaacgggtggcggagggtggggccaaggccttcatggcaacgcccacgtgcccgtcccgcccccaggggtgatcctgtcgcgctatgggcccgcgtggcgcgagcagaggcgcttctccgtgtccaccttgcgcaacttgggcctgggcaagaagtcgcgggaactgggaaggcgggggacggagaaggcaaccccttacccgcatctcccacccccaggacgcccctttcgccccaacggcctcttggacaaagccgtgagcaacgtgatcgcctccctcacctgcgggcgccgcttcgagtacgacgaccctcgctgagactggtccaggtgaacgcagagcacaggagggattgagaccccgttctgtctggtgtaggtgctgaatgctgtccccgtcctcccgcacatcccagcgctggctggcaaggtcctacgcttccaaaaggctttcctgacccagctggatgagctgctaactgagcacaggatgaattggaggtcatttgggggctaccccgttctatcccctgagtatcctctcggccctgctcaggccaaggggagccctgagagcagcttcaatgatgagaacctgcgcatagtggtgggtaacctgttccttgccgggatggtcacaggaggaaggagagtgtcccctgggtgctgacccattgtggggacgcatgtctgtccagtccgtgtccaacaggagatcgacgacgtgatagggcaggtgcggcgaccagagatgggtgaccaggctcacatgccctgcaccactgccgtgattcacgaggtgcagcgctttggggacatcatccgtggcaggggtcccagcatcctagagtccagtccccactctcaccctgcatctcctgcccagggaacgacactcatcaccaacctgtcatcggtgctgaaggatgaggccgtctggaagaagcccttccgcttccaccccgatggagtcttgcaggggtatcacccaggagccaggctcactgacgcccctcccctccccacaggccgccgtgcatgcctcggggagcccctggcccgcatggagctcttcctcttcttcacctccctgctgcagcacttcagcttctccgtggccgccggacagccccggcccagccact

SEQ ID NO: 130256 - DNA, 484 bp, Homo sapiens
tttgagactttccagtatttcgacctttaccttttccaggttcagaatcagagccactgccactatccacttgtaacagggcaaaacgagaagcggtggtgggaacagaactaagtactgctgaggccatcgtaaagatttttcttttaaaatacttctgtcaagaataatttacttgtaatcctagcactttgggagagtcgaggtgggcagatcacaaggtcaggagttccagaccaggctggccaacaaggcgaaacaccatctgtactcattcatgaatgaaagccaaatttcacccataggctgttaaccgatgctccgaaacttattcgcaaagtacatagagaaaaaaattgcgctgggcgaaacctaactcggccagagaagcggcttcaaaaccgggcctcccgggccgccggctcggccctcctctcccacactccccccgccgccgcctctcccgcggctccccaggcggccg

SEQ ID NO: 130257 - DNA, 497 bp, Homo sapiens
tttttttttggttgattataatgtatttatgttaagatgggggggtttttacacctaattttgaggaaataatatctaattttttggtttggggattatttttagatcatgaggctggagatggagtcctgaagccagaaggaggcatgctttcagaagaattaaaatgggcatccagacctgtaaaactgtgtcgaaaagaattacgtcaaatttccgccttggaactatcattgcgacgttccagtcttggagttggcattggatcaatggctgctgattccatcgaagtatcttttccttttgtcctttcctctgttgctgtggatttgatcatctcacataggacccaaactgtcaccctgtgctcaaagactcaaggcttcctttctctcattgctagcccctagggagtagagtttcttggtctccttgctaaaaaccagttcttttcatttcccacaatgatccaggattccaatagctctaagacagat

SEQ ID NO: 130258 - DNA, 893 bp, Homo sapiens
tttttgggtgataataatgtatttatgttaagatgttttgattaaaatacctaattttgaggaaatagtatctaattttttggtttggggattatttttagatcaagaggctggagatggagtcctgaagccagaaggaggaggcatgctttcagaagaattaaaatgggcatccagacctgtaaaactgtgtcgaaaagaattacgtcaaatttccgccttggaactatcattgcgacgttccagtcttggagttggcattggatcaatggctgctgattccatcgaagtatctgtggaacaggtactatggatacacaggggaacaagatagtatctgttctcaggatgattaccatctactgggaaagcagacaacacagataattgtgttacctcatttgcttcactctgttgctgttccttcttttttcttcttttctctctttttttctcatttggtagttgacttgccttccctaaagtttgaggactttcccagtaatttcggacctttacccttttccccaggttcagaatcagagcccactgcccactatcccacttgtaacaggggcaaaacggagaagcgggtggtgggaacagaacttaagtactgctgaggcccatcgtaaagatttttcttttaaaatacttctgtcaagaataatttctcattcatgaatgaaagccaaatttcacccataggctgttaaccgatggctccgaaacttattcgcaaagtacatagagaaagaaattgcgctgggcgaaacctaactcgggcagagaagcggcttcaaaccccgggcctccccgtgccgccggctcggccctcctctccctcctccccaccgacgccgcctctcccagcggctaccccgggcggccgc

SEQ ID NO: 130259 - DNA, 491 bp, Homo sapiens; identical to SEQ ID NO: 119905
  misc_feature (1)...(491): n = a,t,c or g

SEQ ID NO: 130260 - DNA, 829 bp, Homo sapiens
tcaattcatcaaactcattctccatccagttttgttcctttgctggcgaggagttgtgctcctttggaggagaagaggcattctggtttttggaattttcagcctttttgcgctgctttttcctcatcttcagggatttatctacctttggtctttgatgctggtgaccttcagatggggtttttgtgtggttgtcctttttgttgacgttgaggctactgctttcaagctcgagcatcccagattgacttgagaatgctgtgctgccagcaagaatttcaagccagtagatcttagcttgttgggctccatcggggtgggatctgctgagcaagaccacttggcatcctggcttcagccccccttccagggtagtgaacagttctgtctcactggagttccaggtgccactgttgtttcctgacttcttaatgatcgccattctaactgatgtgagatggtatctcattgtggttttgatttgcatttctctgatggccagtgatgatgagcattttttcatgtgtcttttggctgcataaatgtcttcttttgagaagtgtctgttcatatcctttgcccgctttttgatggggttgtttgtttttttcttgtaaatttgtttgagttcactgtagattctagatatcagccatttgtcagatgagtaggttgcaaaaattttctcccattctgtaggttgcctgttcactctgatggtagtttcttttgctgtgcagaagctctttagtttaattagatcccatttgtcaattttggcttttgttgccattgcttttggtgttttagacatgaagtccttgaccat

SEQ ID NO: 130261 - DNA, 887 bp, Homo sapiens
gaattccgccagaaacccttaagaaaaagcgaaggaatttcgcagagctgaagagaagaagaaggaggttcctgctgtgccagaaacccttaagaaaaagcgaaggaatttcgcagagctgaagatcaagcgcctgagaaagaagtttgcccaaaagatgcttcgaaaggcaaggaggaagcttatctatgaaaaagcaaagcacttatcacaaggaatataggcagatgtacagaacctgaaattcgaatggccgaggatggcaagaaaagcgtggcaacttcgtatgtacctgccagaacccaaattggcgtttgtcatcagaattcagagggtatcaatgggagtgagccccaaaggttccgaaaggtgttgcaagcttcttcggcctttcgtcaaaatcttcaatgggaaccttttgtgaaagctcaacaaaggcttccgattaaccatgctgaaggattgtaggagccatatattggcatggggggtaccccaatcttgaagtcagtaaatgaactaatctacaagcgttggttatggcaaaatccattaggaagcgaattgcttttgacagattacgctttgattgctcgatctcttggtaaatacggcatcgtctgcatggaggagttgaatcatgagatctatactgttggaaaacgcttcaaagaggcaaataacttcctgtggcccttcaaattgtcttctccaccaaggtggaaatgaagaaaaagaccacccattttgtagaaggtggagatgctggcaacagggaagaccagatcaacaggcttcatagaagaaatgaactaacgcgtctaacatggatatttttctaagctggttcggtaaataaccagtacctggtctcaaattgaaaaaaa

SEQ ID NO: 130262 - DNA, 1200 bp, Homo sapiens
tcattgcttggctgtgaactcgagggcagagcaggtggaattcatttttgtgctccggggcctgacagctagaaggggcttgggaatcatttgtgtagtgattttcagaataatgtcagggcctaaaactgtaacagcaaaatgcagcacctgctcccccagctcctccttctggggttggcgggtcaggacccgtggagggagggagcccagtgaccccaggggccacggcacccacggcagccacggcacccgtgctttccacagcaggccccagcagctttcggcctgcgctttgctgtcaaacttgtctgtcgcagttgtcccgggcagtaggtcttcccctgggggcagtcggctgcgtgctgccctcctgctgcgacttaggatctcacccgagggccaggagattggcttggtctgtgcaccatcgacccgagggccagaaggttggcttggtctgtgcacaattgacccgagggccagaaggtgggcttggtctgtgcaccatcgacccgagggccagaaggtgggcttggtctgtgcaccatcgacccgagggccagaaggtgggcttggtctgtgcacaatcgacctgagggcgagaaggttggcttggtcttgcaactgccgtggactctggaagccgagggagagagctaccagccttgcagacagatgggccttgccccagttccccgcagattctgggaagagggagccatcgcccatgcctgtgcccaggtcagggggacaaagggagccctcgaatctgatagttgtttctgacctgtcctccggccagctccatcgcgtggccaccacattcctcgcattgcggtcggcaccgtagtacaggtggctagcccctgtgaacacgaccatcttggccttccgcagcacatgccctcggcagggggagctgcccggggcagcctggctcttcttcaagacggccgcgctgttcaccggcacggggccctcggtgtcactggtgtcacagctggagatgggcgagttttccagggtccggtgccggaacactggagactgtggactcgatgtccctgacttgggctcgatggccagccccagggtgactccgcccgccagcgctttcttcaggctctccttgacctccgtcagctccagctccaggctgacacgctccgcctccttctgccggcactcctcctccag

SEQ ID NO: 130263 - DNA, 1480 bp, Homo sapiens
atgaacgagtgcagaggagtggaaattaccacagtttgttctgaagactggatacagcggcaccttcctggagcagtggtaccccttaaaggtgaagggaacgtgggtgttgcaacagaggaccattatcaagaagactcttttgggtttggtctgagaggcactgggaaacctcttaaacttgaaaaatcacgaccaggtgcagtgactcatacatctcccagtgatggcctgacccagtatgtgcctgacagcctgacagccatgccagctgcagcagttgtcatttgggtcatcagacctggctgtggggtacagcagcagattgggtttttgaggcacagcaacattgatgacattaggccacggacaattattagggctgtggctcctgtaaaacttcatggcattagaataaaaatggctagttttactagtgctacaagacttacggatgaacaggtaattactgctcctgctgatagtgggatagttatacctagattttctgataattgggtggctggtgggaagactcacctaacacataaggactcacataaacttaaagttaaggggtggaaaaaggcatttcatgcaaatggacaccaaaagcaagcaggagtagctattcttacatcggacaaaacaaactttaaagcaacagcagttaaaaaagataaagagggacattatataatggtaaaaggccttgaccaacaggaaaatatcacaatcctaaacatatatgcacctaacactggagctcccaaatttatgaaacaattactaatagatgtaagaaatgagatagacagcaacacaataatagcaggggacttcaatactccactgacagcactagacaggtcatcaattcagaaagtcaacaaagaaacaatggatttaaactataccttggaacaaatggacttaaaggatatatacagaacactccatccaacaactgcagaatacacaatctattcaacagtgcatggaacattctccaagatagactatatgacaggtcacaaaacgagcctcaataaatttaagaaaagtgaaattatatcaagcagtctgtcagaccacagtggaataaaactggaaatcgactccaaaaggaaccatcaaaaccatgcaaatacatggaaattaaataacctgttcctgaataatcgttgggtcaacaacgaaatcaagatggaaattatacaattatttgaactgaacaacaataatgacacaacttatcaaaacctctgggatacagcaaaggtggtgctaagaggaaagttcatagccctaaatgcctacatcaaaaagactgaaagagcaaaaaagacaatctacagtcacacctcagggatctagaaacaagaacaaaccaaacccaaacccagcagaagaaaggaaataatcaagatcagagcagaactaaatgaaattacaacaaaaaaaaccatacaaaaaaaaa

SEQ ID NO: 130264 - DNA, 511 bp, Homo sapiens
attccacccattttatagatgagggaactgagcttcagagaggctgggtgggccaggttcacctgggtagctgtaaacccaaggacggatggaagtggagcagcatggctttcacagcgtgcccagtgtactcagagtgaccccagagtctgagaagtccctgagcatctgtctccctcgactccaagtcaggaataccgtgggcttcctgccctcaccccacacctcaagaccatcccactgcctgcctgcttgccccctgccatctcgcactcagccctgggtgcctgtgaagcctggccccactgcctgccgggggttcctgcagcactcccctactccaggctccccatctccctgaagcttccagggtagcagctggtgggacactgatctgtgagctctggaatgtctgcttagaattctgagaggcaggaactgctctgtctttgtaactactcaaggccaactgtcacatgaaggaatgaataaagagtttttactgacttgt

SEQ ID NO: 130265 - DNA, 681 bp, Homo sapiens
cgcggagccgtgggacgagggcggcgatggcgtcccatgtagagtgccgtcctctgggagtgtttgagtgtgaactctgtaccttgacagctccgtacagctatgtgggacagaagccccccaacacccagtcgatggtcctcctggaggaaagctatgtcatgaaggatcccttcacctccgacaaggacagattcctggtcctcggctcgtgctgcagtttgtgcagcaggctggtgtgtgtgggcccggtgggaatgcagtttattctactccaagagattctgcctcccttgtgtccgggagaacatcaatgcttttcctcaggaaattcggcaagacttggagaaaaggaaagctccatcaaagaggacccccagccagcccggttctcggacgtgagtgcaactggggctaggtcatcgggcggcaccctgcacagagctcctaggaccagcctgcgccaaggatgctgctgagctgggagccgccatgcctggccttgtttctggaccactgggagcagcactgcagcccaggggagctggagtccagcttggagcagccacaggcccagggagctgtagcaagagggtagtccaaaggcagatgccagacaagacacagccaggaacccggccaggtccccccacatgcccctcagggcccaggcctgagtgt

SEQ ID NO: 130266 - DNA, 1005 bp, Homo sapiens
atgcttcaagatgttccatctttagacaccgccagaaacaaacaaacaacccagtatgtcatctttgaaatgatccaacgaatcgaatgccgttgctctaagtacagtggagcgcacggccagacgcgacgcccctcagcacggaacccagcctcgcggactaccccgaagctcagagccacatcccgcgcagaggaccgcggcgaccggaaaagcaaggcagaggcggaaaaccaccgcgagcgctggggcgagagagggcaggcggaggctcgcggggaccaccagcatccccggaccctctcagccgtccctgttcacaggcaccgcccccaggagcctcggcaggggcctaggacgccccggcgtgcagaagagaagcgggatcagatggcgtcccatgtagagtgccgtcctctgggagtgtttgagtgtgaactctgtaccttgacagctccgtacagctatgtgggacagaagccccccaacacccagtcgatggtcctcctggaggaaagctatgtcatgaaggatcccttcacctccgacaaggacagattcctggtcctcggctcgtgctgcagtttgtgcagcaggctggtgtgtgtgggcccggtgggacggatggaagtggagcagcatggctttcacagcgtgcccagtgtactcagagtgaccccagagtctgagaagtccctgagcatctgccacaggttgacacacacaaaggggagctgtatcaatagccagggggacgagatgggccagggtgggaggagcctccgcagtgtggcatgggagtatctgaggctcatggaggagctggtggtccaggagaagctgggaaaggaagactgcaaaggaaattcggcaagacttggagaaaaggaaagctccatcaaagaggacccccagccagcccggttctcggacggcccaggcctgagtgagtgctgctcagatgtgactgagagggatgacctccttcagcagggcagctcctaa

SEQ ID NO: 130267 - DNA, 494 bp, Homo sapiens
cagcccttctgacaggccagttggagcggagtggctccatggtagtctgtggcatttaccatggcgcccttggaaaccaggaggtcgatgagggatgcctgcccacagacagcagccacatggagaggggtgtgccccctgtcgtctcttggagaatggagtgacaactgagggatcattcaacctcccagagacgagtttctcacagtcatcgcagaagcagagagggtgacacatcttttggacggtatctttatcatggtcctcttggctcagaagtctctccacttctttctggttacctgatgcaatgtgcttaaacaggcagtcggtgggagacgaagtcatctgagagagtaagctcattctctgcttaaggaacagcctgtctccaaatccctcagactcagggggtttagcagagaggcttccttgccgaatatatacaatggcagcttcgaatgaggtcaggcagtatcccagttcggacgggt

SEQ ID NO: 130268 - DNA, 928 bp, Homo sapiens
  misc_feature (1)...(928): n = a,t,c or g
tcagtcgcttttgatagagtgtgggctccctctgctgcttgcaggagacaccaggactccgggcatttggggttccttggagatcagcgcagaggaggtggccgcgaagatctgcagcttcactcctgagcctggtgcttcctggacgtgctcattccccaagacccactctggctccaggtcccctggaagcacagcagcctcccccagggggctctgccctcgcccagcactcacggactgcccctgcgggcacctcagcggcctgcctgtggccagtgtctgagcagggagctgcccccatgtgccaggtgaccagaccaccaggaagtcaggcaccgtgttcccaacccagtgcacacgcccataaacatctgacaacgggctcctcgagcccagcggaggcatcagctctgcccagggcttaaacaggcagtcggtgggagacgaagtcatctgagagagtaagctcattctctgcttaaggaacagcctgtctccaaatccctcagactctgagacggaggacgggctgacgtcaggtggggagaaggcttcctggaagtggaggctttgacggttgctccattttttcctgatcttaaccagtgacatactccttgcggtcagtttcagccacatcatctaatgaagcaacacagcttggtaccacctgaagcaattccattatttttgaattctgttcagcacagtctacagccgtgcgctgccgcttgttcagcacctgaactgacgctccgtggagcagaagcagctctaccacgaagacgtgcttttcaatcacagcctcgtgcagcgctgtgttgcccttattgttagaagcgttaatggaggccccgtgcccgtgtttggcctgcagctcggccagcntctgtctcntcagcgcctcaagctcatcgtccgccat

SEQ ID NO: 130269 - DNA, 582 bp, Homo sapiens
ttattttgcataacaagtttatttttttaaaaaggcaatatagacaataaacaaagtaaataatcagatcttaacttctgtcctagacttgttccgttaagttctagtctgtgagcacttgtagttcaataatcgtcatcttcatcagagtccattacttttcttctgttgaatttcactgttgttgtcttttctgtttgttggcttacttttttaaggattttctattaaaccttgttctgataccttctcacttagttgtccatatcttgccatctgtataaggtaattctctactgctttagttttttcaggctttacaagtgctaagttacttaacctggcccgggccgactgatccagaaacttgggctaagatactgtttctcatttctgcttgccctgtgctttgcttcctgttgggccgcatcaccaggatccccgtgtttggcctgcagctcggccagcctctgtctcctcagcgcctcaagctcctcgtccgccatggctcggcgtcagcgctggagcagccgcggtcactctcgcagcccttcgtcgcagtcgtttctcttgttttttttg

SEQ ID NO: 130270 - DNA, 788 bp, Homo sapiens
tcttcactgtctccctgcaggaggtaggaagctctgtgaggacagaaattcacctgtgttttcccagagtccgcccgcccggcgccctctagggtggaaggctgcgggcgtcctaccagtgccaggactgccagagcgggaggagcgcggcgcgggccagccgggactgctggacagcggggtccaggctagaggcgagcgagcggtcagtgacggctgtggaggagggaggcgctgggcgtcagcgcgggacccgagcctctggaccactggacccttgctttgtctcagtcgcactgaggtgagggggctgcactcggccgagcagcgaggaccgtgcccagctcagagagagccctcagagtgtccgggctggattgcggccgcggtgcgggagaagtcggaggagggagtgacaggtgaccgggctggcagggcaactgccattatttgtccttcctattgacaggtccacctcctaacaaattacccattgctctcgtccccaggtgatcagtttgaaattcagctaacccagcagctatggtccctcatccccaatgaggatgtgagaaggttcatgtctcatgttatctggaccttgaaaatggaatgttcagaaacacatgtgcaagggacctgtgccaagctcatgtcacgaacaggcctcctgatgaagcttctcagcgagcagcaggaagcaatctgctggttaatttgcagccaccagtggggcttctctgctgtaaaggagataaaggacatggaaaggaatggctttggagtcc

SEQ ID NO: 130271 - DNA, 2261 bp, Homo sapiens
acacctcagccttaaatgacagaagaagaatgtcaagtgggaaagtgacgttggttttcagtttgtggattctgaatccacacaaacacaggattgtattttgaaaacctgaattaattattgtctttacctctataaaacaaaaaattataatcaaaattattagtatgacagtcacagatattgcgaagatgagtttgttcttatagtcatatcctggaacttctttcatgagctcacttgacttgtgctctttctgttcattctgttccatgttctcattaatataatttgtttttttgttggtccgtatcccattctacattcaatgcctttgcttcctgctgctcgcggagaagcttcatcaggaggcctgttcgtgacatgagcttggcacaggtccccttgcacatgtggtttctggaacattccattttcaaggtccaggataaaatgagacatgaaacttctcccatcctcaattgggatgaggggacaaaacctgctggggttagctgaatttcaagctgatcacctggggacgagagcaatgggtaattgaagcttttgggctcaggggacaagtcaatgcccacattgttgtattcccattttgtctcagtttgtttaacagttggttctaagttgaatgcagtcccagcggaaactgcctgaggtagggcttttgcagggctagaggcagaaggcacgcccatggagaagggtttcagcacagaggagactgctgccttatgctcttgggtgaatgaaggcttggtgtagatggtgtttcccactaccttctcaggcccctgcactatgtgaggctgttccagctcccttggggctggaccctcaagcctttttcctttggcagcattgtccacaaatgcctgggcatcctgttctttcctagtgctgtgctttcccacctttttgaagtgcctttcctggatgctccttgggcccatgaggactctgttcactctctgcaggtttttgcctacactttgaatctttgccaggcggttttcatcactctcgtcattggtgtctagctgctcactcccaaagcctgacaagttgatgccactgctgtctgagggcgcctccgactcaatagtcagctcagtgctcatgtgctgcttccgggcttgtaacatcttcatgaatgctccttctggattccctacagatgcttcttcagtggagcctttgtgcttggcccttagcagcacagctggggctgtggtcccgtgcgaggtgtgctgggggggtgtgtaggtggctggtggtggcagcttgtgccagagtgacacaggcttccgtgggcctggcagtgagtcactgggcagaggcatgagcacgtccatgtagctgagcaggaagaagcccaactggccgtccagcatgccctggtaccagttctcgttgatctggttgatgagcgtgaagacgtcgccctcatggaagcccagctccccatggttctcaggctggaagtcatacagcaccttgcagcttggctggtctaggggcggcatgctcctgctaggagtacagatggacttgttggaagattggaaaggggatgaagctgcgatcttggggactgtggtgcaggggaagcccccgttggactgctcaggctctccgaggtcaaagggctcccagaacttgggcttatactcccgcttggggcgtgaggaagcttcccgcatcctgcgcttgagcttctctgccagctcgtccaggatctgcatggcctgccagtggtcgttcagctgcgcctccgccagggcccggagttgactcatctgctcaatgtcggtctccaggaggttgtgcatgctggtttctgctacctccttggagtcctcaaacttctccagcgcctggcgcagctcctcatcggggatcttgccctgccgcttctctatgtccagggagtccttcacctctgccaggtgcttcatggactcgccggcatccagcagtgcatcactgaagttggactcgttgcccagctccttctggtggcggatcaggcactcgctcaggagcccctccgactgcgggtagccggggttcttcacctggccaaccagtgtctttgaggtggttgatggcactggaaaaagacgaacacaacggagaaatccagcaccttgtttcttatggatcttcttgtgattccatacactgattgtaactgaatcagacttttcaatataccttttcttatacacagagaagtacat

SEQ ID NO: 130272 - DNA, 404 bp, Homo sapiens
ccacgcgtccgctctgcaaacaaatcaaaaaattatctgggcgtgatggtgcatatctgtagtctcagccacgcacgaggctgatggaggattgcttgtgtgtgggaggtcaaggctgcagtgagctatgatcatgccactgtactctggcctgggcaacagaataagactttgtcttaaaaataaataaattaggccacgtgcggtggctcacgcctgtaatcccagcactttgggaggccgaggagggcggatcatgaggtcaggagatcgagaccatcctggctaacacggtgaaaccccatctctactaaaaaaaaaaaaaaggggcggccgttttaaaggaacaaagtttatgtccgcgggctggcagaggaaaagtttttttatgggggccccaaaat

SEQ ID NO: 130273 - DNA, 503 bp, Homo sapiens
caaacactgtatgattttatctgtaatttttcagtaagtacttctaaaacagaatactgtctttaaaaaataaccacaatttggccgggcgtggtggttcacgcctgtaatcccagcactttgggaggccgaggcaggcggatcacgaggtcaggagatcgagaccatcctggccaacatggtgaaaccctgtctctactaaaaatataaaaattagccgggcttgatggtgggtgcctgtattcccagctacttgggggactgagggcaggagaatctgagggcaggaggaatcgcttgaacccaggagggcaggagggttggcaggtggagccgagaccatgccattgcactccagcttgggcaactctgtctcaaaaaaaaaagaaaaagactagcctgggcaacatggcgaaaccctgtctctacaaacaagtattagccgggtatggtagcaggcgcctgtagtcccagccactcaggaggctgaggtgggaggattg

SEQ ID NO: 130274 - DNA, 522 bp, Homo sapiens
aaggtagttaaatttatccatcttttctttcaggtgggactccaattattctggttataccactgcttagagacaactagtggaactgaatgtgagtatcacttcaagcaattaagaaaaagagagagttattttggtcggttttacaaagaagtctgaataagaaggactgtttgggtttttgtttcttagaaatttccatagttctgccggccttggtggctcacgcctgtaatcccagcactttgggaggccgaggcgggaggatcatgaggtcaggagatcgagaccatggccaacacagtgaaaccccgtctctactaaaaacacaaaaaaattagccaggcgtggtggcgggcgcctgcagtcccagccactggggaggctgaggcaggagaacggcatgaacccggggggcggagcttgaggcgagcagagatcccaccactgcactccagcctgcgtgacagagtgagacttagtctcaataaataaataaataaataaataaataaataaaat

SEQ ID NO: 130275 - DNA, 1185 bp, Homo sapiens
atggtctcgatccccgacctcatgatccgcctgcctcggcctcccaaagtgctgggattacggcgtgagccatcgtctgcgcttctatttcgatcaccaagatgtggctcggaatgcggggcttacttcttccatgaattggccaaggagaagcgcaagcttggaccaggagttgctaccttgtgcggagaacgtgtggtgcataagaaaaccgagcctctgctcttcgaaaatgtatattctggccagggcgaggccagccagcgcacaactgcagggggcgccgttcccacagcagccctgcaaaggagtgtgcctgagaaacttccgcctcccctgcacccagccctgtttaggcacgaggctgaatcaatggggtcatcccgcttcaagccagtgcctcttcccagctcccatggggaccaccgaagccagctccggatggaaaacgtggacgtgaaggaggaatggcaggacgaagatttcccaggacctctggcagccccgtgcaaatgttctgcccggaatggaatatttcccagggtagccaaggagccagtgccctgggtcaaactcgggcagcacgggctgcggcttcaagaagtgatctgggccggagacacccccgtggccaccgccaagaacatgcccggggacagcgcggatcatttggggacggcacgacggaggacggcagcgccgccaacgggcgcctgggcggacagtgatcatcggggagcaagagcaccgtatagacctgcacatatccggccttacatgaaagtggtcacccacggagggggttcgcagtgcccctctctgatgcacggggatgttaagccgtcaactcgcttcggtggacggactgtgggcaaggcgtgcatgggtactacggcgaaggctcaacgccatcatcgtcttcgcagcctgcttccttccagacagcagcctcccgactaccactacatcatggagaacctcttccttccgccaggacagcagacaacacctggaccagtggggctgaccagccagcggcaggagtggaggcaggcagggtcggcaccgcaggtgtcctaccctggacccctccatgttgggtccctgccttctgtgccccgtgagcagtacgtcatcagcagcttagagctcctggtggctgaggactacatgatctgtacctga

SEQ ID NO: 130276 - DNA, 703 bp, Homo sapiens
gcgaggatgagagggggcgcagcctcagccccgcgctggggagcccaccgctaaccctgcaccccacccacccctgcacaaaagagctggcgggcgctggccacgtcgccctgggtgaccttcctcggatgcagaatccgcccctgcgagcatcctcttcctcctaggctctgaaggcccggggagcgtgagcgatgcccagctgcacccgggcagggctcgcctttgtttgccatgtaaggaggagaggctgtctcagctgcagaggggtcatccctgcttcaagccagtgcctcttcccagctcccatggggaccaccgaagccacgctccggatggaaaacgtggacgtgaaggaggaatggcaggactaagatcttcccaggccactcccagaagagacgggggtggaactgcttggcagcccggtggaagacacatcctctacttccaacacgctaaatttcaacggagcgcatcgcaagaggaagacgctggtggccccagagatcaacatttctctggatcatagtgaggggtccctgctgttcgatgacttcttggatacccttgatgacctggatattaacgtggatgacatcgagacccccgatgagaccgactcgctggagttcctggggaatggcaacgaactggagtgggaagacgacacccccgtggccaccgccaagaacatgcccgg

SEQ ID NO: 130277 - DNA, 8349 bp, Homo sapiens
  misc_feature (1)...(8349): n = a,t,c or g
ggcagacagcagatgctctcagatttggtggtgagttttggccttggcatggttggcatggagtcagcacaggaagccgggaggtatgaaggggcatccacctgggtgaaactgtcttgccaagccaaagccccgaggcctgccctgaagcagctgtagtggaggagaggcctgggattccttagagtcacctttttacgaatgtaccgccactctgttagctcacaaggaaaataaggaaaagccaggcctcccacctcttgactcttgtgagagtgaagacaacatggggcatttagaaaatatatttttagtgtatgataatgtgggctggcccacacagcaatgagcccaaagaccccctcgctttgggaattattcatggccctgctcatcacagcctctgatatgcatgactgtaacctaggctgagccaagaatggagctcatgccagaaatggtcctaagcatgcacatggccccctggaatatcaaaatcctggggagaaagaaatcatctttgccttgggcagtgaagctggaatggcacatatctatctgttgccacatctcctgcctagtggagaagccttggaaggcaacagacactgagcaagcagcagggaggagaatgtcctggaagggcaggactctacccaagtccctaacatccccagactcttctcttccataaactctctaattactctgctgtttaaatcctggttttggtcaagccagtcaggttgcataaagaatatgaatacagtatgcatcaaagttgcttcccagaacaggaagcaaaacaaacaaacaaacaaacaaaatactgatatcagtacccagggtgcccaattaggtcacacccagtggctgcattgcagcccctgagctcctgctgcaccgtgtgtcctgctgcccgagtgggccccaccctgggttctgaagatgcccttcttaatggagagctcccgatggagggctccaggactgatgctctccctaaggaagggaggcctcagatttggagagggacaccaacaggaccagaggaggactgaggggcactggcaccaataagtggaagggaacagcgtggtaacaaaaaagagccatgccacttgcatgctggagggagtctttttgtgtcagcctaaagcttaggctggtgtccatgtggaacatgacatctttccagtatccctgatccaggaaactgcagtgagacccaggtgacccagctctgtgtcatttggagcccattaaaaagtgaggcagccacatggcggggacattgaccccactccagaccacactcccatctccatacataggatagaaactgttcatcaggaaggaaaaccaaacagaaatttgtggtctaggggaggggtctgcattcagcatggccatgctgggctggagtggctgtggggtgtccagatagatgggcatgtagactagtgctttctcaacctttaatgcatgcacaaatcatcgagatcttgttaaaatgtagatcctgggtgggcacggtggctcacgcctataattccagcactttgggaggcaaaggtgggaggatcgcttgagcccaggagtttgagaccagcctggtgaatgtggcaaaaccctgtctctactaaaaatacaaaaaattagccaggcatggtggcatgcacctgtagtcacagctactagggaggctgaggtgggagaactgcttgaacccaggagttcgaggctgcagtgagctatgatgctaccactgcacaccgcactccagcctgacagagcaagactgtctctaaaaaaaaaaaaaaaaaaaaaatgaaaaggcccatataaggcctatgtcaagttaacactccctgaaagtaacactctactctttgtggacctcacaagcagttacaagcataaacgtttttatatacatacacgctcacattttatgctataaggcaggggtccccgagccccaaccagtgcctaccaggtactggtctgtggcctgttaggaactgggccccacagctggaagtgagtggcaggtgagcgagacaagcttcaactatatttacaagcactccctaatgctcgcattactgcctgagttccacctcctgtcagatcagcggcagcattagattctcttaggagtgcgaaccctattgtgaactgcgcatgtgagggatctaggctgcatgatccttatgagaatctaatgcctgatgatctgtcactatctcccatcacccccagatgggaccatctagttgcaggaaaacaagctcagggctcccactgattctatagtatggtgagttgtataattattttattatataatgtaataataacagaaataaagtggacaataaatgtaatatgctggactcatccttacaccatccccaaccctgtctgtggaaaaactgtcttccatgaagctcatccctggtgccaaaaagggtgaggaccactggtgcaagaacgaacagtggatgaaagcatggataacagagaggctgaatctgaatccctgctccatcacttcctagctgtgtgactttgggcaagttactcaacctttctgggcctcagtttccaattttgtaaaatgaggatactaacaatagtacctacctcatacggttgtgttagcatgttgaccttatgtgatgtaaagtgctaacatggctgggcgtggtggctcacgccggtaatcccagaactttgggaggccgaagcaggtgcatcacctgaggtcaggagatcaagaccatcctggctaacacagtgaaaccctgtctctactaaaaatacgaaaaaaaattagccgggcgtggtggcacgtgcctgttagtcccagttactcgggaggctgaggcaggaaaatggaagtgaacctgggaaggtggagcttgcagtgagccaagataacgccactgcactccaagcctgggagacagagcaagactccatctcaaaaaaaaaaaaaaaaaaaggtctaacaacatagctggcccataataagtgccagcggtatgtgcctactttatttacatacacataccacaccataaaaactccatccttgcaaattgactcctactatatagattgttctgcaacttacttttcctgtgtcttagcattctttctgtgtgctagcatgtagatcaccatagtctccataaagactatcaagatcaatgttttaacttgggttatttccaaatattctccattacgaacaactctgcaatgggcatctttgtacatgaagatttttgtagcatccctagatgtggaattgccaagttaaagggtaattttttttattttgaaagattcagctgggtgcggtagctcatgcctataatcccagcgctttgggaggctgaggcaggcagactgctttgagctcaggagttcgagaccagtctgggcaacaaggcgaaaccccatttctacaaaaaaaatacaaaaattgggccaggtgtggtggctcatgcctgtagtcccagctattcaggaggctgaggctgcagtgagctgagatcatgctactgcactccagtctgggcaacagagcaaggctcaagaaagaaaagaaagaaaggaaagaaagagagaaagagtgagaaagagagagcgagagagaaagagagcaagagagagcgagagggcgacaaagagagagagagagagagagagagagagagagacaggcacagtggcacatgcctgtagtccaagctactcaggaggctgagacaggaggaacacttgagcccaggagttcgagtctagcctgggcaacatcatgagaccttgtctttaaaaacttttttttttttttaaacaaagggcaggggcatagcaaagagctattaaatattgacgacagatttggtcagatcagggctgaaaggactgtcttactgtgtcattatttagaagtccacactgaagtaggcaggggtgaaatgacgtgtctgggacttgctttagaatacttcagcaaaggaaagaagaaaacgaaaaggggtagatgaagaaaccgtggataaatcctgataactattcactttgggtgatggatgtatttgaggtcaatgaattattatctctgctttgaaaatgttcataatagggccgggcacggtggttcacgcctgtaatcccagcactctgggaggccgaggcaggtggaccatgaagtcaggagattgagactatcctggctaacatggtgaaaccccgtttctattaaaatacaaaaaactagctgggcatggtggtgcacacctgtagtcccagctacttggaaggctgaggcaggggaatcgcttgaacccaggaggcggaggttgcagtgaggcaagatcgcgccactgcactccagcctttccagcctggcaacacagcaagacccttgtctaaaaaaaaaaaaagaaaaaaaaaaagaaaaaaaaatgttcctaataaaaaaggacaggactgcacagaattgtgagctacacagggatgggagcccagtgctgagtgtgtatttggagagtgcatgagtgagctacatctagcaaagcaccctggtcgcctcagctgagagccctgactggttgagaggcatcagcagaaggagacagggaggtaattctaggcgggaggaaaggcactgagtcctgggacagtgtggtgccctgtcctccctctgcccctcacagatgagctcccaccaagccaccacactcccctctgctaagaccccaccccagcatcccaagggccctggcaggaggcacatacccaggatgtggggcagagggactggtacacacgctggtaccattcgcacacagagatatcgcctcctttagcggtcattgccttctgacagcggtggaagtctgtgaagaaaggggttcaagtcagcccagatcaagagttggaacacatttttttttttttttgaggtagggtctcaatctgtcactcaggctggagtgcagtggtgcgatctcagctcactgcaacctctacctcctcctgggttcaagtgattctcctgcctcagcctctcaagtagctgggattacaggcacctgccaccatgcccagctaatttttgtatttttagtagagacagggtttcgccatgttggccaggctggtcttgatctgcccacctcggcctcccaaagtgctaggattacaggcgtgagccactgcacccagcaaaattacatttataaagatgtttacagccacaccatttgtaagaactccaaaatggaaatcacacaagtgtacaggcatagaataaattgtagaaaactggacagcaatgaaaatgagcaagctatatgccacagcatgtatggatctgagaaggtactgaatgaaaaaatccaaacacaaaagaatacacacagtatgtataaagttcacaaagaggtgaatctaaacacggtggtagccgggcatggtggctcaggcctgtaatcccagcactttgggaagctaaggcaggtggatcacttgagggtaggagttcgagaccagcctggacaacatggtgaagccctgtctctattaaaaatacaaaaaagtggctggacctagtggctcactcctgtaatcccagcactttgggaggccgaggcaggtggatcatgaggtcaggagatcgagaccatcctggtgaaacctagtgaaaccccgtctctactaaaaatccaaataaaaaattagccaggcgtggtggcgggcgcctgtagtcccagctactcgggaggctgaggcaggagaatggcgtgaacccgggaggtggagcttggcagtgagctgagatagtgccactgcagtccagcctgggcgaaagagcgagactctgtctcaaaaaaaaaaaccaaaaaacaaaaacattaaggattttggccgggcactgtggctcacgcctgtaatctcagcactttgggaggccgaggcaggcagatcatgaggtcaggagatcgagaccagcctggccaacatggtgaaatcctgtctctactgaaaaaaatacaaaaaattagccgggcatggtggcacgcgcctgtagtcccagctactcaggaagctgaggcaggagaattgcttaaacccgggaggcggaggttgcagtgagccaaggttgtaccactgcactccagcctgggcaacagagcgagactctgtctcaaataaataaataaaattggccaggcgcggtggctcacgcctgtaatcccagcactttgggaggccgaggcgggcggatcacgaggtcaggagatcgagaccatcccggctaaaaacggtgaaaccccgtcttctactaaaaatacaaaaaaaaaaaattagccgggcgtggtggcacgtgcctatagtcccagccacttgggaggctgaggcaggagaattgcttgaacccgggaagtggaggtccccctggaactnagtgcagtgagccgagattgcgccactgcagtccgcagtccggcctgggcgacaaagcgagactccgtctcaaaaaaaaaaaaaaaaaaaaattagctgggtgtggtggcgagcgcctgtattcccagctactcaggaggctgaggcaggagaatcacttgaacccgggaggcagaggttgcaatgagctgagatcgtgccattgcactccaacttgggcaacaagaaacagactccatcaataacataacaacataacatatataaaataaaataaaataataaacatggtggtaaaaaacaaagatgtgaggccgggcacagtggctcacgcctgtaattccagcactttgggaggctgaggtgggtggatcacctgaggtcaggagttcaagatcagcctgatcaacatggtgaaaccttgtctttactaaaaaaaaaaaaaaatacaaaaaattagctgggcatggtggcgggtgcctgtaatcccagctactagtgaggctgagacaggagaattgcttgaacccagcaggcagaagaggttgcagtgagccgagatcgtgacattgcactccagcctgggcaacgaaaacaaaaaactcagtctcaaaaacaaaaaccaaaaccaaaaacaaagatgtgataacccccagttagtggcgtcacttctctactggggagagcggggtgctgtgttccagacaggacataaagaaggtggggaggccaggcgcggtggctcacgcctgtaatcccagcactttgggaggccgaggcgggtggatcacctgaggtcaggagatcaagaccatcctggctaacatggtgaacccccccgtctctactaaaaaaatacaaataaaaaaaaaaaaaaaattagctgggcatggtggtgcgcacctgtacaatcccagctactcgggaggctgaggcaggagaatggcgtgaacctgggaggcggagcttgcagtgagccgagatcaagtcattgcactccagcctgggagacagagcgagagagcgagactccgtctcaaaaaaaaaaaaaagaaggcagggagatgagagtgtgggcaatgtctgcttttctctccaggttatggttgcacaaggggttcactttagaattattcatttagctgtacatgtttgttatgtgctttctgtacatgttacagtacgcacacacatacagcttaaaaaaaaatcattgtaggggccaggcacggtggctcacacctataatcccaacactttgagaagctgaggcaggaagagcgcatgaagccaagagtttgagaccagcctgggcaacaaactgagacctcttctctacaaaaaaattagccaagtacagtagtgtgggcctgtggtcccagctactcgagaggctgaggtagggggacctcttgagcccaggaggttgaggctgcagtgagctatgattgcaccactgcactccagcctaggtgacaaagtgagaccccatctctggaaaaaaacaaaaccaaaccataataataataaaaaatttaaattaaaaaaaaaatcattgcaggaactaaagtttgtaaccctagcctggacctgaacagcaggtgatgagaggcatgggccttccagagtaaggatgttcagaataaaagggaggaggctggggtggatgggtcccctaggaagaggcaagcggtgagtgactcgaggtatgtggccagggaaaggtcctgcttacccaggtagttctgccagcagtttctagtctggttctggttggggaagcggctgtcaaaaggggcggtcttgtagttcttgattttggtctccatgtcttccgccatggtgctgaatcctggaggc

SEQ ID NO: 130278 - DNA, 1317 bp, Homo sapiens
atggtaactcaggcctataatcctagcactttggaaggcccagatagatgctcggccagcctggagcccggtccagaaaaggccgcacgtggagccacgtgtcgcgcattgagccgccgcgggacgcatcaggcccagctgcgcggaggggctggcggcctcaaccgcaaggagaggccgcaggtggggacggcgggagggagagaagggactgaaggcgccgagcaggaggaaggttttgcgcgcactcccttcttccctaagtggaaccggcagtggcaacaacgaggccgaaggcgaagtccctgctcccaccgccggcacggtgacccttttcccagggtcacccccgaaccaacaaagcacacacacacccgagatgcgccccaggccgcagcgccaaccccccttcagatgtcccggagacaggcgagcagcggtccccagggctcccgtcgccaccgcttctcccgcacccctcagcctcctcgggccggcgacgcgcgcagccccaggcctgctccccgctcgccaagcgcaccgccccgcgcctcagccaccttgaccgagtcgcccacgcgcgggggcggctccgagcgcccatttcccatccccgaggccgaggctggccaggcaggtgctgatggggagcctcgcgcctgcgcgagccaccctcgccgcgaactctgcacagcccacgccctggcccagcctcggcgcctcccctccgcccactgccgcagaaccgcaccccctccccctcggcagcttccacaacggctccgcctcaaccgtcggaagcttctcgcctgccggcttgaaaggccaagccgaagccccaccctccctccgcgccccgccgtgggggaagcccacccaggcactctgctcaacctgcctgcggcaggaggcgtccgcgtagtgtcggtggagccgccccctatgccgccgagcgtcgcaactctgcgcctcagggaccgccgcagcgcctccggcgaacggcggaaggcgggaagcgcccgtccaatccgcgccagcggagtcacccccgccagcgaggagactcgctgccttgactggggccctggtcccgggacaggcgagcaggaagggatggaagggacggaagcgcgggcgggaccaggagaagcccatccccgcgctatgcgtccccagagccactgggacccgcggctccagccagccctgcaggggcgagctggaccgggggaccagggcgccgggccgacgactcctggagggcgtcggtgttcggcgctcagtcttctgcgtgttttccccgtgctcgcgttctga

SEQ ID NO: 130279 - DNA, 514 bp, Homo sapiens
  misc_feature (1)...(514): n = a,t,c or g
gtcccaagttctcagagatctcagtgctgatctgggacgatgccnnnnnnnnnnnnnnnnnnnnnnngaagctggtgctggagttcaccttcaccaagccagtgctttctgtgcgcatgcgccatgacaagatcgtgatcgtgctgaagaaccgcatctatgtgtactccttccccgacaatccccgaaagctgtttgagtttgatacccgggacaaccccaaggggctctgtgacctctgccccagcctggagaagcaactgctagtgttcccgggacacaagtgtgggagtctgcaacttgtggacctggcgagcacaaagcctggcacctcgtctgctccattcacgatcaatgcacatcagagtgacatagcctgtgtgtctctaaaccagccaggcactgtagtggcctcagcctcccagaagggtacccttattcgcctctttgacacacaatccaaggagaaactggtggagctgcgccgaggcactgaccctgccaccctgtgtat

SEQ ID NO: 130280 - DNA, 537 bp, Homo sapiens
ggctagacatggaagtctggtggaattccaactctgtcattggtgagtgggaacagccccttggttgggggtactgcatggggcaaaggcctgcaggttggacctgaaaggattttagggccatgtgaggctcagcttcatcatcagtaagggggacagcactgggcaaaggcctggaggcagaccctaggtcctgagatgcctgagaggactggagcctgtggctgtggcagcctctgaccttttaccaccccccctcccccagccatctgcgtagatgggaccttccacaaatatgtcttcactcctgatggaaactgcaacagagaggctttcgacgtgtaccttgacatctgtgatgatgatgacttttaaggaccctgggggctgtgctagggacctgcagtggcagaactgcagagctgatccttggcagtggggcgtgcttggtagccaccagccagcaagcattaatggggctggtgcccactttccactcagcagagctatgtctaaataaagagctcacttcccccc

SEQ ID NO: 130281 - DNA, 1083 bp, Homo sapiens
acttggaggggagattccaggactcttctcatctttatcccatttgtatgcagaggtgggccatgggcccccagcttcctacctgggcattctttaaggcagtctggattccttccatcccccaggctgcggggcaatgggcagaagagctgggctgggcattggctcccacctccactgacaccctggtccctgtccagaccacgagcaggtgggcagcatgggcttggtggaggatcctgtgtcaccagggctgccccttaccctaaaccttggccccgacaacccacccacctgcccagcagtgctgatctgggacgatgcccgggagggcaaggactgagagggatagtcctccctgggcatcccgccaccccctcacggccatcctgtgttgtgtgatacccacaggatcgtgatcgtgctgaagaaccgccagctctgtccattctgagatgctgcctcctcttcagccgcccaccccaccccccatcttcacaccctagggctctgtgagcttccttgtggactcttggccccttccctccataccaccccaacctcagactcctccctcctaccccaggacctggcgagcacaaagcctggcacctcgtctgctccattcacgatcaatgcacatcagagtgacatagcctgtgtgtctctaaaccagccaggcactgtagtggcctcagcctcccagaagggtacccttattcgccgggtatgcatggtgggctggtgaccccataccacatgacatgtgggcatcactgctgatctgtcttctagcattaacttcagccacgactcctccttcctcttccccaccctaccgtgtccctgtccccctgcccatttaccatacctgggcttagccagtgctgcctgcaggctggctcgcgtgggcaaggtggggcctatgattgggcagtacgtggactctcagtggagcctggcgagcttcactgagatgcctgagaggactggagcctgtggctgtggcagcctctgaccttttaccaccccccctcccccagccatctgcgtagatgggaccttccacaaatatgtcttcac

SEQ ID NO: 130282 - DNA, 517 bp, Homo sapiens
ccaaccttggcacgaggcgaggccatgtaggccgtgcttaggcctctgtggacacactgctttggacggttcctgagctctcagggggacgaggaacaccacgatgccccggggcttcacctggctgcgctatcttgggatcttccttggcgtggccttggggaatgagcctttggagatgtggcccttgacgcagaatgaggagtgcactgtcacgggttttctgcgggacaagctgcaggacaggagccgacttcagtacatgaaacactacttccccatcaactacaagatcagagtgccttacgagggggtgttcagaatcgccaacgtcaccaggctgcagagggcccaggtgagcgagcgggagctgcggtatctgtgggtcttggtgagcctcagtgccactgagtcggtgcaggacgtgctgctcgagggccacccatcctggaagtacctgcaggaggtgcagacgctgctgctgaatgtccagcagggcctcacggatgtggaggtg

SEQ ID NO: 130283 - DNA, 633 bp, Homo sapiens
atgcccttgggatatggtgtggcactgagctttccagatgtggtgacattgatcacagataggtggcacccaccagaaatgtacagcccggatccacgagtgtatttgatcaaattcattcagatgtctttgggtcataatgggaaaatgcacgtccagaacccagccaaggtgacttgcgagcggcatcagtcgtctccccacgtcttcctcccaggaagggacaaggtggcctgggttactttggccgtggggctgggcatgcacatggaactgcaggccaaggggcttcagagtcagaaacactacttccccatcaactacaagatcagtgtgccttacgagggggtgttcagaatcgccaacgtcaccaggctgcagagggcccaggtgagcgagcgggagctgcggtatctgtgggtcttggtgagcctcagtgccactgagtcggtgcaggacgtgctgctcgagggccacccatcctggaagtacctgcaggaggtggagacgctgctgctgaatgtccagcagggcctcacgggcagaatgcacgaggccagcaaagtggaatttcccaattacggcatgaaagagagtttcttctcaggcccttcccccaggccccacaattaa

SEQ ID NO: 130284 - DNA, 777 bp, Homo sapiens
ttaaagcaggaggccgcagaagacgctcggcagttctggcctccgagcacaggcggcgctgtgagtcgtctttgcggaagccgcggaggcctcgctgatgacttccggtgttggcggtggcgccgcgcagtcaccgcggagcagacgcggaggctggtggcccctgggcgagatgccgtacgccaaccagcctaccgtgcggatcacggagctcactgacgagaatgtcaagttcatcatcgagaacaccgacctggcgtaaggctaccgagggaagaggctggcggctctggggcgcgggaggcccaagccggggccccggggcagggggcgggggtgtagtgggtggggtgggggcgatgtccttccagagctgcccccctgcaccagggctttagctttgggagcctgcggcgcgggcccagcctgtcgaggctgcagcgccttcacgccccttggcttttgatctttcagggtggccaatttcgattcggagggtcttcatcgctgaggttcccataataggtaagcgactccccttcctcgttcccgcgcccacgggttcctgccccgctctccacccacacactctttggggctccttccagtccttggttcgggctgagggtggtagtgctgaaaaaagtgcattgctggagacttgaccataccctgtgcccttggctcagtggccgccttcctggcgcccacggaccacttaggtccacccttgtcctgggtatgcattgctgagaagcatgtgtttaacattgtgcc

SEQ ID NO: 130285 - DNA, 504 bp, Homo sapiens
cccaaagtgctgggatttcaggcgtgaaccacctcagctagtcgggagggaaggaagctcaagggcagagtgggacagaccagacagtggttgtgctctccaaccctacatactacatgagcaacgatattccctatactttccaccaagacaacaatttcctgtacctatgtggattccaagagcctgatagcattcttgtccttcagagcctccctggcaaacaattaccatcacacaaagccatactttttgtgcctcggcgagatcccagtcgagaactttgggatggtccgcgatctggcactgatggagcaatagctctaactggagtagacgaagcctatacgctagaagaatttcaacatcttctaccaaaaatgaaaggtaacaaatgggagcagaagtcacattacaaaccagattgggattaaaacctttcttgcctgtttagacaagtccttaattttgttatcgtagcaccaccatgaaaagaccatgagc

SEQ ID NO: 130286 - DNA, 976 bp, Homo sapiens
atgaccggctgccaggtgaccctcggtgtcactgtggagcaagcacacaggctacagtgcttgggtagtcagaacctccctgaggtggagaaagagagaaaatatatgggctgtcataggcagtgcctgaagcagcgtcctaaggcactcgacacggtgccccacccagagcaagagctcagtgaatgtgagccacaattattaggagccctgacatcctcaaatttgaatctggctcccagagtctactgcgtgtatgaaggcctgcacgtatgtgccatgagggacctgacaagaagctgctggcaatccggaggccaactggagaccccggaccctgtgcagaggtgcaaagctcctgccacctggctgcgttcctcttcaccgtcacaggtcaaagggcagaactttaaacacccacttactcctcccctgccccggagcagccccgtgcctgaggcagaggacagctgcttgggaaatgagggccccattaacattccgagtgcctctggctctagacctgataaaaccagagcattgtacgtgtgaatgtggacaattccctctccattcctgttattgctgctgagctgggcgtaaggaaaccgagtgagaagggaatgcaacagaagaaaaagaccaaagacctgggtttcagggctgggaaagaaagcaagacagaatggaggaaatgaggcctgcaggacatggcgtctcaaatgtttgcgtcgcctttaaagtagcctgtcacagctgccttccacgactcttcaatgccctcatcccttctccagatagaaatggagcagctcttcttggaggccaggcttcagcttgatagcaagtctgaggccaggaggaaccagtgtgactccatgctgctcagaaaccaacagctgtgctccacatgtcaagaaatgaaaatggtacaaccaagaacaatgaaaatcccagatgatccaaaagcatcctt

SEQ ID NO: 130287 - DNA, 419 bp, Homo sapiens
ctcttttctgctttcatcctcatatactagaacaaagtcaattcttcgctggccatcattaaaaaagagggagtcaggttttccattaaattcttcaaactccggggttcgaaaatcatgctgactttccagtgatcccaaatcggggacaattgtctgtccaaggttttccaacacgatatccccatcgtcgtcgtcctcctcctcctccatttgtagcaaaacattcctgctcatctttttcatgtctccctcagaaggcggctccgaacttggcgcgaagttgggggctcccgggttccagaacggcgcggctctcccaggggccggatcggggaccgcggggcgtgtgtcgcttgggctcaggggccgctgagcccagccagcgccggggaaagccgagccgagacgaaatcgtt

SEQ ID NO: 130288 - DNA, 792 bp, Homo sapiens
atgaacgccagctgggcgtcctctaaatcaactcaattcggatactatccacctgcaaaatgggtcaccccaggtttgctccccaagccccagggcccctcaggacgagtgaaaaaggccctgcggtcctccctgcctgggggaattcctcctccgatcacagctccgagccgtcggtcggcttttactttaacgaggattcagatgggtcacaccctgtcctccaaatgcgggcctgctccccggaccccgcccagggggctcgccccagtgccgaggctcctgggcaaccctagcactctgcgagtcggggaagtgaccccaaagttgcttctgagtggagacttccgcacgcagaggcgtccccgcagctgccaggcttttcaggggcagcatcccccgccccaaaacattcctgctcatctttttcatgtctccctcagaaggcggctccgaacttggcgcgaagttgggggctcccgggttccagaacggcgcggctctcccaggggccggatcggggaccgcggggcgtgtgtcgcttgggctcaggggccgctgagcccagccagcgccggggaaagccgagccgaggcacccaccgaccggagcccagagccggaggacgcctctcgcctgccgagcggagcccggagactgagcatgcccagtgcggccgccgcggctcgctgcggaatgattgaacttccccggttttacgaggcgcgcagaaggaagtcggcaggcgagactgcagagggagtagtgcgatcctgcgcgcgggggaactag

SEQ ID NO: 130289 - DNA, 969 bp, Homo sapiens
agtttttatttttctccttcttaattgatctaacagacaatattttgttctcctcctctcctgaacacatccccactggagaaactggaggtctgtttgtgggagaagtttctgaccttacctggagctgagtcaatttagagagccaaggacccagaagagagacaacaatcactgcagtttggcttacaagaagccacatccataggaaaaggaggacagtactacatcaagggaacaccccatgggacaaaagaatctgaacaacagccttcagccctagatcttccctctgacagagcctacccaaatgagaaggaaccagaaaaccaactctggtaatatgacaaaacaaggctctttaacaccgtacccctacccccgccccacaaaaaaataataaaaaaaattatacaagacattaagggagaaatattgagagcattccctctgagaactggaacaaaacacagatgcccactctcaccactcctcttcaacatattactggaagtcctagccagagcaatcagacaagagaaagaaataaagagcatccaaattggtaaagaggaagtcaaactctcactgtttgctgatgatataatcatttaccttgaaagccctaaatactcctccagaaagctccaagaactgataaaagaattcagcaaagtttccagatatgagattaatgtacacaaatcagtagctcttctatacaccaacagcaaccaagctgagaatcaaatcaagaaatcaaccccttttacaatagctgcaaaaaataaaataaaatacttaggaatatacctaaccaaggatgcaaaagacggctacaaggaaaactacaaaacactgatgaaagaaattatagatgacaaaaacaaacagaaatacatcccatgatcatggaagggtagaatcaatattgtgaaaacaaccatactgtcaacagcaatctacaaa

SEQ ID NO: 130290 - DNA, 403 bp, Homo sapiens; identical to SEQ ID NO: 128011

SEQ ID NO: 130291 - DNA, 454 bp, Homo sapiens
atggagatgtggaagtagaaggggaagagtttgctctgcactagtccgaaggtatgtcggggaaggcttcggaaaagcaggaagcctgagacgaaggtcacccacatttgcatgccccaggcacctgacaagaccagtagatggaccatcttaatcaggcctcctaggttcccgccttcctccatcttgcagtcctggaaaggaggcaccgggtggctcagaactttacctttgcctcatgcgtggccttcagaccctgtgagcccgctcggggacagggttacggccaatccagcagagattcgttaggaaccgggacctcaatccgcagcacccggattccgagaacagaggcgtcggggccaaatgggctgaatctggtacctcactcccacgcccccgggtggacagcgaccctcctcggccgcgtcccctcgtgggtttcccctcgtgc

SEQ ID NO: 130292 - DNA, 898 bp, Homo sapiens
gcggagagcactgtacttggggtccttctctcgcagctggcggtagggatcgggaccctggtggctgcctggtacctccccacccaggcctcgctccttctccacggtttgcagggccccacatggcaagctttggtgcggggtttccagcccagcgggcgtttgacattggccagcttaaggcttcaggaacaggcaaggtaaacgcgggctgggcctccccagaatagtgggttgagccccaagcatgctgtgaagccaatatcaagagataaatgaaaggcacagccccatggagatgtggaagtagaaggggaagagtttgctctgcactagtcccaaaggtatgtcggggaaggcttcggaaaagcaggaagcctgagacgaaggtcacccacatttgcatgccccaggcacctgacaagaccagtagatggaccatcttaatcaggcctcctaggttcccgccttcctccatcttgcagtcctgggaaggaggcaccgggtggctcagaactttacctttgcctcatgcgtggccttcagaccctgtgagcccgctcggggacagggttacggccaatccagcagagattcggatattaggtgaagatcccgaaagccccgaggaaaccctaaatctcatcctgaggacaccgatcccaccaaagccccgaggaaacgccaaatctcatcccgaggacaccgatcccaccgttaggaaccgggacctcaatccgcagcacccggattccgagaacagaggcgtcggggccaaatgggctgaatctggtacctcactcccacgcccccgggtggacagcgaccctcctcggccgcgtcccctcgtgggtttcccccaaccaataattcgtcccgcctcccagctgagcccgaa

SEQ ID NO: 130293 - DNA, 1179 bp, Homo sapiens
taaaacttgtttaaaacacaatctgggtgccaacccagggggaggagaaatggggggaagggaaatggtttatctaaacacatgacttaaagcccaaaaaatgctccctgacaaaaatgaccatataggtttgggggcctctgttcaaatttttcatatctgtcctttcagttttttcaaatgttatttcaaatgtgttcaagttatgttaaagttgcatgccattcttaactgaaacattatgaaacaaaaatctctctagaaaaactatctgcagcatctctcaaaggcttatgcccagttcaagtacgtttgcagattgagaacctgagcatgtgcaaaacgcaatgcgtgaaagtgggaagaacttcaggcagaggtaataccaagtcacacatcctatcacctccaccaaggtatcaaggctttcctctgtttgcagaccactacggtacataggatgttgagggggaatgagaaagtcatctaggttccggccatccatggcttccatccagagcctccggtcctcttccgacaaagcttgcatggtgataacccctggccctagcaggccctttgcacatataacccgaatgcacctgtatttctctcagcttatagataacttgaaaactcatgacactacaggaaaaggacaccattaagacaaaaagcaggctcacaggaatatccaccaaagctaaggttcaccatcacaacaataaagccccaggttttagggtatagaaaaaaattcaacagccatgttttcagacataggactccatcagaggggaatattagtgtgttccaccttcagaaaaaatcctgcaatgtagtgataattcaccccatcttacagatgtggttaaaccacttacccagagtcacacagctagtaaggaacagatcccaaattcaaatttaggaatgctcttatcttttttacctgcatcatgcagcctgccatacaaacatatttgaaatgagggtgctgagggttccagtagattcttcagatctttcaaaaatctttctgggctccactattctgactttcagaaatcttcagttttcctgggtctcttccctaacagtacacaaatgcaggttaagtgagcacctgctaaaagtttagtttgaatagcaactaacttgattaagctcctctagtct

SEQ ID NO: 130294 - DNA, 461 bp, Homo sapiens
gggagaatcacctgagccagggaagtcaaggctgcagtgagccatgatcacaccactggactccagcctgggtgacagagtgagatcctgtcaaaaaaaaaaaaaaaatctgcaaaaccaaaaattatttcacaagaactttgaacttgtgaaattctttcacaaacaactggtttctttcccctctccagctattctctcacagcatagttcatatataggtgcttcccacagagtaaactctgcctgtgatgttgtcccgttcttccaggtccgtgggctgctggacaccctggtgactgacctgatggtcctggctgatgagctcagccccataaagaatgtcgaggaggctttgcgcctctgcaggtgactctcgggcccaagcaaccttctggaaaacgggttaataaataaatcaataaagaaccttcaagtttctactaaaaaaaaaaaaaaga

SEQ ID NO: 130295 - DNA, 2862 bp, Homo sapiens
atgcaccaggccagggactcgaggacccgaggtctcaatgcaggtgtgctgctggctggctacagctgctggggtggctccttgggagtctgctgcctgctcaggaacttcctcaatgtgggagtccctggttctgcaggccagcccagcctggaagaggagctcatgcctccagggacagcagtcaaccccatggggctggagctccaagtctccccttttctgggagaaaagaagcgggcaaagggacctgaacaacccacacccacaattcaggaagagcctgaacctgttagcaatgtcctacaaggagatgacattcttgccttggccattaagaaggaagacttgaaggagcaacacattcctcgccttactgaaaaggaagataaacgtgtcatcacccagaaatttatcatccgtaaactcaaacccatggatcctaggaggaaggtctgccaccttgtagcacgtcctgcgaatcctgatgaagccacaaagcctctggactactccggtcccggtgacagcttcgatggcagtgaccagatcctgccccaccacatcttggggagtctccaggattttaagagaattgcacttgctcgagggaacacccagctggctgagcggatacctacctcaccctgtctgatgaccctcatctctgctgaaggagagtcaaagcaaaaagccccaaaagaagagaagagacctccctgggccccacctcctcagcacaactttctgaaaaactggcagcgtaacacagccctgcggaagaagcagcaggaagccctcagcgaacacctaaagaagccagtgagtgagctgctcatgcacaccggggagacctacagacggatccaggaggagcgggagctcattgactgcacacttccaacccggcgtgataggaaaagctgggagaacagtgggttctggagtcgactggaatacttgggagatgagatgacaggtctggtcatgaccaagacaaaaactcagcgtggcctcatggagcccatcactcacatcaggaagccccactccatccgggtggagacaggattaccagcccagagggacgcttcataccgctacacctgggatcggagtctgtttctgatctaccgacgcaaggagctgcagagaatcatggaagagctggatttcagccagcagaggcaggttgggattgctgctcacttgacctttgaaaccctagaaggcgagaaaacctcctcagaactgactgtggtcaataatggcaccgtggccatttggtatgactggcgacggcagcaccagccggacactttccaagaccttaagaaaaacaggatgcagcgattttactttgacaaccgggaaggtgtgattctgcctggagaaattaaaacatttaccttcttcttcaagtctttgactgctggggtcttcagggaattttgggagtttcgaacccatcctactctattaggaggtgctatactgcaggtcaatctccacgcggtctccctgacccaggacgtttttgaggatgagaggaaagtactggagagcaagctgactgcccatgaggcagtcaccgtcgttcgcgaagtgctgcaggagctgctgatgggggtcttgaccccggagcgcacaccatcacctgtggatgcctatctcaccgaggaagacttgttccggcacagaaatcctccgctgcattatgagcaccaagtggtgcaaagcctgcaccaactgtggcgccagtacatgaccctgcccgccaaggctgaggaggccaggccaggggacaaggagcacgtcagccccatagccacagagaaggcctctgtgaatgctgagctgttaccacgctttaggagccccatctccgaaactcaagtgccccggcctgagaacgaggccctcagggaatccgggtcccagaaggccagagtggggaccaagagtcctcagcggaagagcatcatggaggagatcctggtggaggaaagcccagatgtggacagcaccaagagcccctgggagccggatggccttcccctgctggagtggaacctctgcttggaggacttcagaaaggcagtgatggtgctccctgatgagaaccacagagaggatgcgttgatgaggctcaacaaagcagccctggagctgtgccagaagccaaggccattgcagtccaacctcctgcaccagatgtgtttgcagctgtggcgagatgtgattgacagcctggtgggccattccatgtggctgaggtctgtgctgggcctgcctgagaaggagaccatctatttgaatgtgcctgaagagcaagatcaaaaatcacctcctatcatggaagtgaaggtacctgtggggaaagctgggaaggaggagcggaaaggagcagcccaggaaaagaagcaactggggatcaaagacaaagaagacaagaaaggagccaagctgctcgggaaagaggcatgctggggcgtggaccgtcccaacagcaagaagcacaaggcaaaggatgacaagaaagtcataaaatctgcaagtcaggacaggttttctttggaagacccctacccctgacatcatcctctcttctcaagaacccatagaccccctggtcatggggaaatacacccagaggctgcacagtgaggtccgtgggcttgctggacaccctggtgactgacctgatggtcctgggcttgatgagctcagccccataaagaatgtcgaggaggctttgcgcctctgcaggtgactctcgggcccaagcaaccttctggaaaacgggttaataaataaatcaataaagaaccttcaagtttttactaaaaaaaaaaaaaaaaa

SEQ ID NO: 130296 - DNA, 461 bp, Homo sapiens; identical to SEQ ID NO: 86076
  misc_feature (1)...(461): n = a,t,c or g

SEQ ID NO: 130297 - DNA, 576 bp, Homo sapiens
atggtggccattgttaagcctccagaacctatacctttaaaatggttaacagataagccaatttggatagaacaatggccactaaataaagagaaactggaggctttagagaaattagttagtgaacagttagaaaacgggcacatagctccaacattttccctttggaattctccagttttcgtaattaagaaaaaatcaggcttccagttcaaccctgcaggcatcctgctgaaactggtgctctttaccatgaagctaaacatgcacctggcccaggtatcagggaagctgaaagaggaagttgcaggagctggagttgctgtgggctcaccaacctggcaagtcagcagatgcatgcaccagccaaccagcatcattcttcagaagttcaggcctcaaccccacaaggctcctcctcccaatgctaacacagcactagacagcagggctgctgctgttttactttgctttagtgctggtgctggagtttggccttatgttcagagcctgaagaaagtaagaaatggtgaggaagatgcttttaccttcactttgccatctctggagcactga

SEQ ID NO: 130298 - DNA, 1692 bp, Homo sapiens; identical to SEQ ID NO: 118932

SEQ ID NO: 130299 - DNA, 1419 bp, Homo sapiens
atgagccacactggggtctccaacacaccctctggtgactgcagtttgggaatacacttctggaacagacatactcagcagcagacagaactccgcactgaaggatccccacgtaggaagggacagaagaacatctttcaacgtacaacagttccctcagcccgtcttgtgtttcctgaacttgatacttttgaagaatataggccaattttgatttgtctgatgttttctaaatatcagattgaggttcagaattattttcagcgaaacaatgaagtgatgaagctagaaagccataatccgaagaagaccggtagtgccgcagtagatttatgctgcagaaaagctgcgagccttctgcctggggaacccccacaaaaggtcccaacaggagcctgtggacccttgccagcggatggatctagtaatggaaaagcttcttattctggctcgaaaagtaaagttttccagacgccctatacttcagctcaaaaagcagagcttgtagctgtaattgaggtattgactgcttttgatatgtcaattaatgtgatttctgattcttcatacatggttcattccgcacagttaattgaaaatgctcagttacgatttcatacagatgaacaactgatgactttatttacccaattgcaaacagcagttagaagtagaatgcaccctttttacatcactcacattagggctcatgtacctcttccaggacctttgactgaagggaatcaaatggccgatcacctagttgctaatgcaatatctaatgctagacactttcacaatttaacccatgttaatgcctctggcctcaaacgcagatacagcactacctggaaagaagctaaaaatattatccaacgatgcccaacttgccaaatggtatattcctcatcttttacaggaggagttaatcctcaaggactggaacctaactcttctttagcaaatggatgtcacacatgttccctcgtttgggagactagcttatgtacatgccagatgttatcagcacctgaacagtatctacagaaaccagatgcaaagacagaagcagaacaaccgatttggtggagagatccaataacaaaacgttgggaaataggtaaaataacttggggtaaaggttatgcttgtgcttctccaggaccaaatcaacagccgatttggatgccatcaagacacctaaaaccttatcatgagccagatgccgaggaagagattctgggaggatcccgaggaccccctagttgcagccatgtcgagactgacgctgaggaggtccccaactgtcacgagcaacacccgtcaaacacagccacccacatggggacagatcaagaagctgtcacagatggcagaagaaaacctgaggaaagcagtacaaccagtcacaatgagtaa

SEQ ID NO: 130300 - DNA, 807 bp, Homo sapiens
ctagaaaaaaaatttgcaaggtttgaaagaaccacttcaattggaaagacaagttcccgccaaggcttaggatatcatttttgatggtggccactgttaagcctccagaacctacacctttaaaacggttaacagaaaagccaatttggatagaaaaatggccgctaagtaaatagaaactggaggctttagagaaattagttactgaacaattagaaaatgggcacatagcgccaacattttccccttggaattctccagttttcataattaagaaaaaatcgggtaaatggagaatgttaactgacttaatagctatcaattcagttatacaacctatgggagcattacagcctcctggattgccttctcctgctataattccaaaaaattggcctttaattgtcacagatttaaaggactgtttctttactatcactttagctaagcaagactgtgaatggtttacatttataattcctgcagtaaacaacttgcagcctgctaagcattttcattgtttcacagatgggtctagtaatggtaaagcttcttattctggctcaaaagttaaagttttccagacaccctatacttcagctctaacagcagagcttgtagctgtaattgaggtattgactgcttttaatatgtctattaatatgatttctgattcttcatacgtggttcattccacacagttagttgaaaatgctcagttacaatttcaaacagatgacactaatgactttatttacccagttgcaaacagcagttaggagtagaatgcaccctttttacatcact

SEQ ID NO: 130301 - DNA, 394 bp, Homo sapiens
ttcagagtctctatgtgaacggatcttggattccagctgcagtcttctcatcactacagatgccttctacaggggggaaaagcttgtgaacctgaaggagctggctgacgaggccctgcagaagtgtcaggagaagggtttcccagtaagatgctgcattgtggtcaagcacctggggcgggcagagctcggcatgggtgactccaccagccagtcccccccaattaagaggtcatgcccagatgtgcagatttcatggaaccaagggattgacttgtggtggcatgagctcatgcaaaaggcaggggatgagtgtgagcccgagtggtgtgatgccgaggacccactcttcatcctgtacaccagtggctccacaggcaaacccaaggcaagt

SEQ ID NO: 130302 - DNA, 1123 bp, Homo sapiens
agttcggcctgttttctcagtcccggcacccgccgcgaccgcaaaggcggccgcggttctaggaacttgacgtgatggggcttcctgaggagcgggtccggagcggcagcgggagccggggccaggaggaagctggagccggaggccgggcgcggagttggtctccgccgcccgaggttagactggtaagccttctgaggctaaatatgtctcagaagattaatgatatctgggcttccatttctgttgcagaattctggggagacattgccaaggaattttactggaagactccatgccctggcccattccttcggtacaactttgatgtgactaaagggaaaatcttcattgagtggatgaaaggagcaactttatgactctgcctgtttcttgtttggggaagaagttatacccctaatcactggttctttctggtatgtctcagggagggcaatgagccaggaggccagctggatgggagggagcaagtagcagcaagaagggttcatggttcatattctgtgcttttacctgcaggcattcagaagggggaccgagtggccatcttgagcaacccctttcttcattcactcaatccctggggctttcttctctccctcagactttcttcccttccctagggccctatggacattgtgcccactaggcagcatggggcttactaaggcctggaatgtctgttgctccccaaagatatggacatgggtgggtcttgccaagttccctttgagccaacaaggctaccactttaggcttttctcttctccaggggtttcccagtaagatgctgcattgtggtcaagcacctggcactgaccctttcctcccactccctgtatacttggaccctccaggggcaaggtacgggtgtatcttgtccccatcttgagctgttcacagttcttccctgcccatccctgcagatctcatggaaccaagggattgacttgtggtggcatgagctcatgcaagaggcaggggatgagtgtgagcctctgcccagcctccatttggtggtcagtaggggtgggcataagaccctaacctgttccccattcttcccacagggtgtggttcacacagttgggggctacatgct

SEQ ID NO: 130303 - DNA, 274 bp, Homo sapiens
gtttccactcgcagtactgacccaggatcactaggccctcggggtccacttcgtactcggccctgtaggggacggcagccgagctgttgactgtggacagcagctcctccaccagcagtgcctgcaccacctcggggctcagcatcagccggcggtgctcggggatttggagaatgaaccagaagaagcaggtgaggggtccctccccaaaggaatagacggagctggagttgtagtaagttcccaggcgggtgctggtgatgagctccttgag

SEQ ID NO: 130304 - DNA, 3213 bp, Homo sapiens
cacctgtcattgcctggacttcagtgcacaggcacacctggccccgacacaccagcgtgtcaccatgagaagaggagaaacccgctctcggcgccccccacagtgctgggccttcgcacacgttgtttcccgttcatcaagaaggggcgaatttttttcattcgacagaaaaacaagagagccagaagaaaattgcttttaataatacattttatttatcccatgatcaccagtgttatttcaacataaaatcaatataaaaattgttatcgcgttggttgacatcctgtttgcacttggccttggaaacctggtgtgcgtctcccccgtgcagcttttctcagttcagatgtgggtctgtgagtgtgtttatatgtgtggaagggacccccacccagtcccccacactctcaggactctagggcctaatggtttcactgaaagattgctcagcagaggctcccttgcaaatgcgaggctgtttccaactttggtctgtttccctggcaggatgcccgtggccgaggccccccaggtggctggcgggcagggggacggaggtgatggcgaggaagcggagccggaggggatgttcaaggcctgtgaggactccaagagaaaagcccgatattgctgtgtgaccttgggcaagtcacttctgttctctgggtctccctccctgtccttccagctggagatgctgtcagaccctggggtaaaccacggggcactgggctggagggccaggaactcacctgccaattatttctctttgcagaggagtttaattccccctgattactcagtcatcattgcacttgacccgggggctcacccccacctccagaagccctttcctccctaggtatttactgagtaaatggataggggtgtaaaccagggctgtgagtctaccctcttcacttcagccaaaatagcctttgcaatgggccctgccctgcggaggccccagctccttgccgcccctccccatctctgactgctccagccaaacaggctttcagccggaagagacaggagactttcccacctgcttcctccactaaccctgctggttccttcctgggcagggtacaaggcggaggtgatggtcagccaggtgtactcaggcagtctgcgtgtactcaatcgccacttctcggtaggaagtgggcctgtctgccctgcagagggtcccaggggctgttgtcttcccttctcacagctcaggggtggagctggggccagacctcagaatccttccctggcctctctcacttctgcctgccttagggagggacccctcacctgcttcttctggttcattctccaaatccccgagcaccgccggctgatgctgagccccgaggtggtgcaggcactgctggtggaggagctgctgtccacagtcaacagctcggctgccgtcccctacctccccagggtcccctccttctggctcacaggaatcaggggctgtgcccctctccccgctccaggttgttaccgctacagctacgtgggccagggccaggtcctccggctgaaggggcctgaccacctggcctccagctgcctgtggcacctgcagggccccaaggacctcatgctcaaactccggctggagtggacgctggcagccgccctccctgccactcccctcccagaccccagcccagccttgccacctttctgttctgccagggtgtacggctgcagccgccaggagcccgtggtggaggttctggcgtcgggggccatcatggcggtcgtctggtgcgccagcctgctgggaggtgcagccaggggacccctgtgtaacagctgctctcctggtccagcctgtgaagtgaacctgacgctggacaacaggctcgactcccagggcgtgaggtgggttcaccaacctggccacaccccatgggccacctgatggcccgctcctccctcccaggtgccctctctggactacggcttggccctctggtttgatgcctatgtgtctgtgcacgggacccaggagaccagccagtgcagccctgagtcgtctctgactccccccaggctgtgtggcttgcgcatcctgcagccctacgccgagaggatccccgtggtggccacggccgggatcaccatcaacttcacccttcgcggctacgcatggcctaatggcgccctgcctgcctccacggtcccctgtggttttgcagcctgccctggagagttcctctgttctgtgaatggacgccaagccccggctggctcctctggcttcctcccacctgtcccctctctgtgtccccacacagtttgcagagccacattccagtgcaaagaggacagcacatgcatctcactgggaaggtttccttggggctcagagacccaccttctgtgccctgcccccatcccctctgtcccaggggtgccatgtgggacattcaccttccagtgtgaggaccggagctgcgtgaagtctctgtctgcttctccccttcccctcctcctctgtccaccccaccacctgcccccatccccagactgtggcctccagggcccctccagccgcattgttggtggagctgtgtcctccgagggtgagtggccatggcaggccagcctccaggttcggggtcgacacatcttggggagaggcagcttcctcccacctcacctcaccccaccccaccccaccccaccccaccccagcatggcctccacggtgctgtggaccgtgttcctgggcaaggtgtggcagaactcgcgctggcctggagaggtgtccttcaaggtgagccgcctgctcctgcacccgtaccacgaagaggacagccatgactacgacgtggcgctgctgcagctcgaccacccggtggtgcgctcggccgccgtgcgccccgtctgcctgcccgcgcgcgggagaatagagaacaggggctccaggctcctgagatctcacttctgcccttgaccacggacaggccccatcagcaacgctctgcagaaagtggatgtgcagttgatcccacaggacctgtgcagcgaggtctatcgctcttcacctggaaaagggggtgcccttaccctgcttcagtcctttctcctttccccctttcagggtgactcaggtggtccgctggtgtgcaaggcactcagtggccgctggttcctggcggggctggtcagctggggcctgggctgtggccggcctaa

SEQ ID NO: 130305 - DNA, 854 bp, Homo sapiens
aatttgcgaattagtttctgactacaaagaaaaacagatgccaaaatactcttctgaaaacagcaacccagggagaaaacttagaagcatgcaaggggcttcctgtaacatttcattggctgggtcacaccacatgctcattcccaaaccaggcactgggaagctagaaaattttatggctatcgaagaaatgaagaagcacggaagtactcacgtcggattcccagaaaacctgactaatggtgccactgctggcaatggtgatgatggattaattcctccaaggaagagcagaacacctgaaagccagcaatttcctgacactgagaatgaagagtatcacagtcttgtcactctcatagactgctctacatctggcctctgccaatgggaattcaggagtagtaaaactcctgctggacagacgatgtcaacttaatgtccttgacaacaaaaagaggacagctctgacaaaggccgtacaatgccaggaagatgaatgtgcgttaatgttgctggaacatggcactgatccaaacattccagatgagtatggaaataccactctgcactacgctatctacaatgaagataaattaatggccaaagcactgctcttatacggtgctgatatcgaatcaaaaaacaaggttgaagaagaaatgaagaagcatgaaagtaataatgtgggattactagaaaacctgagtaatggtgtcactgctggcaatggtgatgatggattaattcctcaaaggaagagcagaacacctgaaaatcagcaatttcctgacaacgaaagtgaagagtatcacagccacactgaattcttgccatcccgtatctacccctag

SEQ ID NO: 130306 - DNA, 1350 bp, Homo sapiens
atgggtggtaactttaggggcctaaacccccttggccatggtgagattccccgggaagccgcaagagcaaccttccgtggccacctgttattgatttccaaagagggtgccacattccgagagccagtcaccagcaaaccactgggatgtacgggggaattaggcaccaacagatggggaatgggaatggaaagaccaccccactgttggacggaccaccaaaaaaaggatggaggacgggaaggagagctccaaggtcagctcaaagccaccggtctacctccaagatgcaaacccacaaagcctgtcctaagaagtaaggccactgctcaggcccccagcaaaggcctgactgggctctgggaagactccatcaccagtgtcaacacagactggaatattgatccaaaatcacttgggggacaaggtcatgggaagtacatttatgacataaaacccggagtgctggaaaagctctacacagaactgaaacagggtgaaaggaggaaggccacaatgtgtatcaagtgtgtagcaaagcacagtacactaagaaaggattattctaaggaaatactcaagaacccccttcccctttccttgtttcctacccttggaaagctagatccagaagaaataaaaggaagaagtatctcagaaccagtgcccaccacacccgtaccattccatggtagagggaaaagagccctgtgcaacttcaggattccatcctcactgcccatgattgacatgatcaagggtgatagcaatagcaggggtaactgggggaacttggatggtgaaattgctatggagtgtgagattgctgtagaagccccatttgaccaggaacaaatctctgaagctctcaaagcctgtttcagatccgctgatgagacagaaacggaaatcagtatgagtcgagactggaaaagccgaggtcacactcgactcccgcttcgcctcgcgggcgccttggcggagctggtgtccgggggcgggtcggtggcttctctccatctggagaaggcattaagggcctggtctaatgtgatccgcaaatgtgctgctgtttccgacctgaggcggcgactcctggctgaagggaggcggccagtgcggggccctgggactctgcgccaccctcgcctgctcgcaccagccttccgagtgcacactcctccgactacccgctgcctcgaagtcgctcctccagtgcctccgccgcgtcccggtcacccccacgcccactttccacgatcgcgcgtcgcctcaacccccggcgttctgggcgctcgctacccagtggtcaaccggccggaccttcggacccgcgaggtttctgcttag

SEQ ID NO: 130307 - DNA, 3489 bp, Homo sapiens
atcttcacagagcggagcagcggccggagcgttttgcgggctctgcgtggacttggagcttacagcgtcttgcgacttggaagcggattcagaggacaggacagaacacttggctactctccaactacgtccagatttcagcgggagtcggtgtcccgcaccccagaaacacctacaaactcacagacctcattcgaagccctggccaatctactagccaacatgacgcagttacctggccatttctccacattcctggtgagcgccccacacccagccgcagaagagcccctcctgcattccatcctcacacacaggcctgtccatctacttgctactgtcacactcttgccagcagaagaggcccctctaatggccgatatcaccgcccaggctatcctcaccccacagctgtgcagcgggaccctcctgctggcccacgtggctgccagagcccatgctgacaccaacctccagcatgtcggcgtccctgcgggcgacactaccggtgacatggccagcatgatcctcctccctggcagtgacactgttgatctcgaagtccttgccatcctcctagccaacgtgatgcagttacctggccatttatccacattcctgctgaggactccacactcagccacagaagagcccttcccgcattccggcctcacacaaagacctgtccttttacttgctactgtcacacatttgctggcaggagaggcccctctgatggccgacatcaccacctgggctatcatcacccctcagctgtgcagtgggaccctcctgcctgctgacgtggctgctggcgcccgtgccagcgtgaaccccaaacctgtccgtgtttctgcgggcgacgccaccggggacatccctagcttgaccccctttcctggcagtgacactgtcgtgggcgtgactcgaggtggacgcgcatttacgacaccatcgcccctaggatcggactgcgctgcggagggttctgggaaaggtagtcccacacctcgagtcgactacttccgtttccggcttccttcttggaattgttcgtttctcggagataattgtataaaagaaggagaaataaccccacatctcttgacactagagctccaggagccattgagcttcaaggacgtggctgtggtcttcactgaggaggagctagagctgctggactctacccagaggcagctgtaccaagatgtgatgcaggagaatttcaggaacctactctcagtgggagacaagaatggaaaggatacggagtatattcaagatgaagaattaaggttcttttcacacaaagagctctcctcatgcaaaatctgggaagaggtggcaggtgaattacctgggagccaagactgtagagtaaatctgcaaggaaaagacttccagttctcagaagatgctgctccccatcaagggtgggaaggagcatctacgccgtgttttccaattgagaatttcctggacagtctacaaggggatgggcttatcggtctagaaaatcaacagtttccagcctggagagctataagaccaatccccattcaaggatcttgggcaaaagcgtttgtgaaccagttaggggatgttcaagaaagatgtaaaaatctcgacacagaagacacagtatataaatgtaactgggatgatgacagcttttgctggatatcttgtcatgttgatcacagattccctgaaatagacaagccgtgtggttgcaataaatgcagaaaagactgcattaaaaactctgtacttcatcgcattaaccctggagagaatggcttgaaaagtaacgaatacagaaatggcttcagggacgatgcagaccttcccccgcatccaagagtacctttgaaagagaaactctgtcaatatgatgagtttagtgagggcttgaggcacagtgcccatcttaacagacatcaaagagttcccacaggagagaaatctgttaagagtcttgagcgtggtcggggcgtcagacagaacacgcacatacgtaaccaccccagagcccctgtgggagacatgccctatagatgtgatgtctgtggaaaggggttcaggtataaatcggttcttcttattcatcaaggggtgcacacaggaaggagaccctataaatgtgaggagtgtgggaaggcatttggtcgaagttcaaacctgcttgtccatcagagggtccacactggagagaaaccatataaatgcagcgagtgtgggaagggcttcagttacagctcagtgcttcaagtccatcagaggctgcacacaggggagaagccctacacctgcagcgagtgtggcaaaggcttctgtgccaagtctgcactgcacaaacaccagcacattcaccctggagaaaagccctacagctgtggcgagtgtggaaagggattcagctgcagctcccacctcagcagtcatcagaagacacacaccggcgagaggccctaccagtgtgacaagtgtggcaaaggtttcagtcacaactcgtaccttcaagctcaccagagagttcacatggggcagcatctgtacaaatgtaacgtgtgtggtaagagtttcagttacagctcagggcttctcatgcatcagagactgcacacaggagagaaaccctacaaatgcgagtgcgggaagagctttggccggagctccgacctccacatccatcagagggtccacacaggagagaaaccctataaatgcagtgagtgtgggaagggcttccggcggaattcagaccttcacagccaccagagggtccacacgggagagaggccctacgtgtgtgacgtgtgtgggaagggtttcatctacagctccgacctccttatccatcagagggtccacactggagagaaaccctataaatgtgctgagtgtggcaaaggcttcagttacagctcagggcttctcattcaccagagagtccacacaggcgagaaaccttacagatgccaagagtgcggaaagggctttaggtgcacatcaagccttcacaaacatcagcgagtccacacgggaaaaaagccctatacgtgtgatcagtgtggcaagggattcagttatggctctaatcttcgcacccaccagaggttgcacacaggagagaaaccctacacttgttgtgaatgtgggaagggtttcagatatggctcaggtctccttagtcataagagagtgcacactggcgagaagccatacagatgccacgtgtgtgggaagggctatagtcagagctcacatcttcaaggtcatcagagggtccacactggtgagaaaccctataaatgtgaggagtgtgggaagggctttggccgcaactcctgtcttcatgttcatcagagagtccacactggagagaagccctatacgtgtggtgtgtgtgggaaaggcttcagttatacctcaggtctgcggaaccaccaaagagtgcatttaggcgagaacccttataagtag

SEQ ID NO: 130308 - DNA, 1104 bp, Homo sapiens
atgggaaccactgtaactgacattccacttgcagacatgctaggagtgccccggcgtctttctagcctccgcctccaggcgggtgaggaggtgacacctgagaattcctccctctcacccctgaccctgccggaaagcgaaactgagatgcgggcattgggccctgggaagcgtggggaaggggaaaggagaaagccaggcctgtactcagatcttcgcagagcggagcagcggccggagcgtttggcggactctgcgtggacttggagctcacagcgtcttgcgacttggaagcggattcagaggacaggacagaacacttgggcaagtgaatctctgtctttcgaagccctggccaatctaccagccaacatgatgcagctacctggccatttctccacatttctggtgagggccccacacccagccgcagaaaagcccctcctgcattccatcctcacacacaggcctgtccatccacttgctactgtcacactcttgccagcagaagaggcccctgtaatggccgatatcaccgcccagtctatcctcaccccacagctatgcagcgggaccctcctgctggcccacgtggctgccagagcccatgctggcactacactccagcatgtcggcatccctgcgggcgacactaccggtgacatggccagcatgaccctcctccctggcagtgacactgttgatttggaagccctggccaatctactagccaacatgacgcagttacctggccatttctccacattcctggtgagcgccccacagccagccgcagaaaagcccctcctgcattccatcctcacacacaggcctgtccatctgcttgctactgtcacactcttgccagcagaagaggcccctctaatggccgatatcaccgcccaggctatcctcaccccacagctgtgcagcgggaccctcctgctggcccacgtggctgccagagcccatgctgacacgaacctccagcatgtcggcatccctgcgggcgacactaccggtgacatggccagcatgaccctcctccctggcagtgacagaggctatgggtacctgagatgtaccaggcaggttgagacatag

SEQ ID NO: 130309 - DNA, 437 bp, Homo sapiens
gtgtataatcctgcaatatgtctctatgccgctgtaatgtatgcatcagggctgcattcaaggaggggacacctgcactgttggtatattctgccattttatcatttacccctgtaagccttgccaaaagttgttcaatctcaatcgccattgtctcaaacattctgtcttggcttgatccatttaaaaggggtgttgtatcagaactgtcgcgtcttccatctcgggtactgctatgactgtaacttgtacatagtttgctgaaggaaactagtttcaggtcaagttcattttccagctgtcgagcctgtttcctgagatcttcccagtaactgctggtccctgccgccatctttgtcgtccaacgtcagccgggataggggagcagaggcgatgcaggccggaaagtcaccacgaaatcgtcgaccgaggaattc

SEQ ID NO: 130310 - DNA, 1179 bp, Homo sapiens
aattaaaaacagaaaaatgtgttagaaaacacagcacagagaaactgtggcttcagctcaacctgaccatgtcacagagtccatcactgtcagtcttgcattcatcctgctggtcaggctaattatcaagacagtcaacttctccctccgatgtttccttattccagaccagggtgtgaaagcggtggctgtcaagagtccctgaagatgtcccatcaatggaacgcatacagcagcaacaggatggtacagatcccaataacaccccctaggatgagcgagtcccgccgcttcctcaggttgatcctctggatcaggctgtttacagcaggaaaacgattggccaaagtgttcattttgctgtgaattgacttcaacattcctctctgtgaagtcatattttcttttgttgccatagcaatgcttattgtctcttctatcagacgatctgagtttcgaaagtggtcatgttctttcaaaaatagctcagttcctctggtggttactccagacccacttttatatgactcaatatcttttcgtactgatcccataagattctccctttcccgtattgccataaagtttgctttggttttatggaattcatgtgtataatcctgcaatatgtctctatgccgctgtaatgtatgcatcagggctgcattcaaggaggggacacctgcactgttggtatattctgccattttatcatttacccctgtaagccttgccaaaagttgttcaatctcaatcgccattgtctcaaacattctgtcttggcttgatccatttaaaaggggtgttgtatcagaactgtcgcgtcttccatctcgggtactgctatgactgtaacttgtacatagtttgctgaaggaaactagtttcaggtcaagttcattttccagctgtcgagcctgtttcctgagatccggaggccttctcgcctcaccttcccagtaactgctggtccctgccgccatctttgtcgtccaacgtcagccgggataggggagcagaggcgatgcaggccggaaagtcaccatggtgcgtgtttccgccttgagagccagggccgacgggatgcgagcctccgcggacactgccacctgccccctttaaattgtgctcactctgaagcctcttgcctctggtttctgcccggatctgcttggacat

SEQ ID NO: 130311 - DNA, 801 bp, Homo sapiens
atgatcttcgcgccaggtgtccataacattattgccatcgctgatgggtacgtcaacaacaattcacagaggcttcagtgtatagcaataaaaacaggtcaaaggaatttggaaagtagtttctatgcggctgtaaagcaaagagacagttgggagaaaaaggacgcacccggaggccttctcgccctcaccttcccagtaactgctggtccctgccgccatctttgtcgtccaacgtcagccgggataggggagcagaggcgatgcaggccggaaagtcaccatgggagggggtgccttgctactgctccgcatgtggtccccactgccaccatggcagggagcctcattgctgctgtgcaatggacgagaagtccaagtggggggtgggtggagtgcttcattagagccagaggagaggaagtgtatgccgattggttcatgggcgccacgggcagcctggaaaaggcacaagtccccactccagtctatgggactggcagcctggcccccagccttcaggacctccctggcctgaaggtggggcctcaccagggaccccctcccttatacccaggagctagtctgcctcttgctgctttccatggcaccccggctgctcgtgctaaggggcacctgcaagccagtgctgagtcgccctcagtccccaaccttggttccctcttccatgcttgtcagtgcccagtccggtgggggcccaggcaacagggcccaagcatgtgcgtacccctccgggcagtgacagtgcgccgcctcagctccaaccccaatcccggatag

SEQ ID NO: 130312 - DNA, 532 bp, Homo sapiens
cccacgcgtccgcggacgcgtgggccagcttcacgttacagcatggaagctgttgccaagtttgatttcactgcttggggtgaggatgaactgagctttcacactggagatgttttgaaggtaggtgacctggggccccaggggagcagtagggagtttcagttactcagtaatctgacagtccctgcctttgtctcttaagaactgcatgtggttccttttaaaaagagaagttcaccttgattccctttgtgcacccttataccagacaccaaccaggccgggtgatggaaatacagtcggcataagccaccatccttgtcctgggaggttcgtagtctggagaggggaacacatccacccaaagggctgttacagatgttcttggctaagttctcagggagcacaggtgagggaacaagtgattccatcttgaaagatgggggttgtaggagtgtgtgcaatgtgaacgtcaggaatgcactgaaggtgacttgggcttttagctaaagctcacagatgtgcaagccca

SEQ ID NO: 130313 - DNA, 1080 bp, Homo sapiens
ggaggacatctcaatagaaaccactaaaactgaaaagcaaagagaaaaaccgaatgacaacaacaataacaagaacagaatatccaagaactatgggacaactataaaaggtgtaacatatgtgtaatggaaattaacaaagaagagagacacagtaacaggagaaatatgtgaagatgagccaggtgctgggcgttcggccacacagagaatcagaccagcaattaccctaggagaaccggcagtggagtctggcctggtgcagttcctgtcagggcgtcaagcaagatggttgcagatacctgagctggagggtaccaaggggaatgaaggtaagtgtcttcgtttcacaggctgccgggctgtgacactgccctaatcctcctttcaaagaataatccatgagcttacctttgaaatacaaggtggctacccagtctagataataaatgatttattgatgctacattctaatacaagatacaataacggacgtagcaccaagcctgtcacgctgtaggctgggccccttcccagagtaagttccgtcactctggaggtaaagtcataatatctaaatatggctcgattcatgtcaggtcttactggtactatggataccacaagtggagatgtaagtaggaaggtgcaggtccacaaataaatagggagcccagatgggagaaatgtcattagagagagaactgtgacaaatgagacacagacagaaggagagagagagaaagaggaagagagagagagctttcacactggagatgttttgaaggtaggtgacctggggccccaggggagcagtagggagtttcagttactcagtaatctgacagtcccgaatttcatagacatccagtttcccaagtaagtatctgcagcctgctgagatgggcctagccacacacactcctcttacatttccagcagtctcttcatcatccgggccagccagagctccccaggggacttctccatctctgtcaggtactgaccattcctgacactgccttggcccttctcggcctgttaacctcacagaatgctgaagcgccaagcatggcagca

SEQ ID NO: 130314 - DNA, 404 bp, Homo sapiens
ggaatgatgctgtgagacaatctgagaagaattaaaatttaaattcatgtattcctacttttttctctgttctctaactgtaaaatattttcattacagatggaggaacaaatagatgttagataaatagatatataatagatcatccaaaattcttattcttatggttttatgtagtcagtatttacctctatttttctacatgtttatccttccaatttagttcattacttcctgcacctttgatgtcatatacataaacaggaaataacacatggtggctgggatgtagagagagccacaggacttgtgaatgaaatccacaggcaaggatgtgggcgattccttttgcaatattggagggaatgccaaaccctatgtttggctgtggaaaagagtatggg

SEQ ID NO: 130315 - DNA, 1044 bp, Homo sapiens
atgagaaggctgcaccagatggaaattcggggtgtaaggggacgtccgcgcacagcccaccccacccacgggcccctcgagcctccatcaaagttcccaacacgcacccaccccacaaatcctgcccaaggtgagggctggtcccaggtcctccggctgctgcatcagcgagtgcaggagggaggagaagcctccaagggagagacgcgggctcaagcatgcaactcggccgggagtgaactggggccccgagggagatgtccagtctggtgctggagcccaaccctggtccccgacccccttatctccactgtccgtatctcctgctgggtgaggtccttggacacagcgcacttggtgcgcagcccgtgcaggctgccgaaggagatgccgatgagcttctggagctgcccccgagcgcagcgcgctctatgcgggctgcagcagcccaggagcggagccctgggtgctggcgtctaggcaaggaacccctgattcgggagagctggaccaggagcgccccttggcgctgccttagtcaggacgccagtagagctggcagccaagtctgcggatccagccctcagacccgcggcggtgggggcaaaaaactgcagcggtgggcgcaaaaagccggggcggtgggggcaaaaggccagggcgacgggggcaacaagccatggcggcggggtcaaaaagccgcggtggcggaggcaaaaagctgtggtggcggagcaaaaagctacggtgatgggcacaaaaagccgtaaaaagccgcagcattgggggcaaaaagccgcgacgcggtggcaaaaagccgcggcgcataaaagatgcggcggcgggggcagaaagcggctgcgtgggggggcggcaaaaagcaggggcggcaaaaagccgcgcgtcgaaaaatctgcggtggcgggggaaaaaagccgtggcgcgggtcaccaaaagcctgaaaaagctgcggcgacgggtgccaaaagccgcaaaaaaaccacggctgagggggcaaaaagcacgtgccgcaaaaagccatga

SEQ ID NO: 130316 - DNA, 924 bp, Homo sapiens
ttcctcggtcgacgatttcgtgggagggcctgaaccggacagtggcaagggacattagtgtaagagaaccaacaggtaggtaaccaatttgggggagagtggaaaaggccaggtgaactgccaggttctgcaaggcagaccacagtaacggctacaggatttttaaattaatgggaggggaaaagggggctcaggagatttctgggggtctgaactggtgatagcagaaatgctaaaggaatacatctcctgaaatgtgagggaaaacccacagagaaaatgggctttcatgagtaattggctcctctacccctttccaggctccgagagcgtttcacgggtttaccagagaaaatggcctccggagactgcaacgtgagagaactggaatttcagacagaaattgaatgcatgtggcttacaagacaaggaagcaccaaaggccaactcagggtttgctggattctggaaaatccaggggattttgaaaaagaaaatctgtggtggtttatcactaaaacagaactatacaggctgatcttttatacccagatgatgctggcaaccccctcccagccaggaatacacgtcaagcctccgccagcgccgatccccccggagcccgagccggagagcggcgaaggggagccgccggcccctccccaggacgctgacagcaggctccggggcccccgccccctggagaaggagccggagcccggccgggatgagaaggtgacgccgccgggggcgccactcgctttgtgggggaagatgctcgcctactgcgtgcaggatgccaccgtggtggacgtggagaagcggaggaacccctccaagcactacggcacccagggctacaggggcttctgtgagaaggtgctcctcatggggaacttgccctggttgcttttgcccatctaa

SEQ ID NO: 130317 - DNA, 496 bp, Homo sapiens
ctctgtgccatggcaatcactgctgagtgtcttctcctacaattacacaggcccgagctgtgtctggtggaaaggtctccactcaggtcagagtctgaaggagcaagatcttctcattaatgcagaacctgtgcagaaccaccatcagattctctccacagcgggagacctggcgctccatggccaggcgaaagtcctccttcacgcctttggtgatgcctcgagttacagtgtggtgcctgtcagcagtctgtatgctgggctgaagcacaggtaagaattcctgctgcagtaaccccatgggagggctagaaggcttgatcagcattccttgattgggtagtaattccagatgaattttcccaccttcctgagttctcaagtaggcaaattcctccagcatatcaatatttgtaacgtaattgaaaaaattctcatattggaaatttccttgttggcaaattttattgacagctttcaggaaaagattctcgcc

SEQ ID NO: 130318 - DNA, 509 bp, Homo sapiens
tttttttttttttttttccaggtttaaagtcctttgtattaaatttttgataggtatagacatttacaaatacttcatacaaagacacaaaaggtgagcactcagcatggaagagcaaaagagaacatgcttacttgatcagcattccttgattgggtagtaattccagatgaattttcccaccttcctgagttctcaagtaggcaaattcctccagcatatcaatatctgcaggccagattcaggttaaccacatgtaaaaaaaggtgctagttttctctgatgaggaaatggggtctcggcagttgagtaacttgcccattgccatcccactaaaaaaggtgccagttctctctgataaggaaatggggtcttggcagttgagtaacttgcccattgctaccccactaactgcagactccatatttgaacccagatctgtctgatgccaaaacctgattcttatacccactaaactccctcgcacagataactcttggcatgagatg

SEQ ID NO: 130319 - DNA, 1962 bp, Homo sapiens
atgaggaggttgcactcccacggacggcatccaccaaagcgctttccaagtacttcgttgctcaataaacgtttgttggagaaaccggtgcataaaggtgaaataataaaacgtggacggatttcggaaagagaaggaaccccggagctcacgctttgcacgatcacccccaccagccccaggagttttcgcgtaaatcgaagcccggggagtgacctggaagcggttcaactgctctggcttctcagaagaggaggggaccgggcgacatgcgcagtagcctcccccgcggtggcggcggcggcggcggcggcggtggctgccgtggcggctgagagtccagagccggacgttccggccgcttcgggctggcggctggagagcgctcgggtcatgtctgcccagggggactgcgagttcctggtgcagcgagcccgggagttggtgccgcaagacctgtgggcagccaaggcgtggctgatcacggcccgcagcctctacccggcagactttaacatccaggtgaggtcccggctgtgcatgcggccgctctgcgtggaggagggccaacgagcgatgctggatgagctgggagccttctgggcagggtatgagatgtacaccatcgagcggaatgcagagcggaccgccaccgccgggaggctgctgtacgacatgtttgtgaatttcccagaccagccggtggtgtggagagaaatcagcattattacatcagcattaaggaacgattcacaggacaaacaaacccaatttttaagaagtttatttgaaactcttcctggtcgggtccagtgtgaaatgttactaaaggtcacggaacaatgcttcaacacgttagaacgatcagaaatgttgcttctacttttgaggcgcttccctgaaacggtggtgcagcatggggttggccttggggaggcactattagaggctgaaactattgaagaacaagaatctccagtgaactgctttagaaaattatttggtaaggaaaattgtattctctattacttctatggtaaattaatatgctgggtttgtgatgtccttcctctaataattaacaaccatgatgttcgattacctgccaatttattgtataagtacttgaacaaagcagctgaattttatatcaattatgtcactaggtctactcaaatagaaaatcagcatcaaggcgcccaggatacatctgatttaatgtcacctagcaaacgtagctctcagaagtacataatagaagggctgacggaaaaatcatcccagatcgtggacccttgggagaggttgtttaagattttgaatgttgttggaatgagatgtgaatggcagatggataaaggaagacgaagctatggagatattttgcatagaatgaaggatctctgcagatacatgaacaactttgatagtgaagcacatgcaaaatataaaaaccaagtggtgtattccaccatgctggtcttctttaagaatgcattccagtatgtcaacagcatacagccatctctcttccaaggttggtttacaaattttagagtgtccaaaaagccagttcatactgtggggatgctgggagttaaaaaaaattctgccgtagcctaccgcctcatgactttgagtctgtctgtattacaccaagacaacatagaagttatgagccttgtgaaggaggtgcctgcttcgccttcctccatgattgtaaatttcctgaggcctcatcagccatgtggaacttggtctgggcacctgttgctgcagagagttgccaaccccatatcctgtgagtctccgtccttgagcaccaagtatctaatcactctttctctctcagggctgcggtgctgtgaagatttcggcatcctgcactcatggccatgtttagtctatggtcacattgacactagagagtttcagggaccagtgcagtatgcccaggtctga

SEQ ID NO: 130320 - DNA, 2554 bp, Homo sapiens
tttttttttttttttttcaaattttagggatgatttttattttacaaaaccagatgggtacttttggttttaccaaaaattacaaaaaaatgactcttaaaaaattggaaatagcttctcagacttcttgggaactacttttaagcaaccaaggagttagaactcagatcggttttcttctttgtaacagcaacaatgaccacggctctgtgccatggcagatcactggctgagtgtcttctcctacaattacacaggcccgagctgtgtctgggtgggaaaggtctccactcagggtcagagtctgaagggggcaaggatcttcttcattaatgcaggaacctgtgcaggaaccaccatcagattctctccacagcgggagacctggcgcttccatgggccaggccgaaaagtccctcccttcaagcctttgggtgatggcctcgagttacagtgtggtgcttgatcagcattcccttgattgggtagtaattccagatgaattttcccaccttcctgagttctcaagtaggcaaattcctccagcatatcaatatttgtaacgtaattgaaaaaattctcatattggaaatttccttgttggcaaattgttattgacagctttcaggaaaagattctcgccccgtggccactcttgctgaagcaacacaatcacatggccccaatgccatgtcgtctctgttgtctgtgaaagctctaagctttaaaaccggctaacattaaatggaggcagtatggcatggatagcctgctgggtacaaggcaggagcttcagatccgaaccttttctaaatttgggctttaactttcggaggggttcctcctgggatttgcctccatcttgaatggggagtaccatgtagcacatcaaatcaaggactttttcacatgtcattctgtactcccctaagcgcaaagtggcacgtcgccagcgtggatgagcgccctctgatgctccagggtcccctgccctgtgatctgtggctgagagatggatccctggagagctgctaagtgatgcaaggcctgtatcggcctttttatattgaccctgatagatgatcatatcagtgaggaagattcttaaccaaagccaagtatccgtcttcccaggccaagcaaatccttgtaaattctttgtcaaggaattctagggaatagagcaactcccagctctcccctggccaatttaaagctttctaacacttcagtggagttagcaagttcgcgctttattgactacaatgtgacgatttcttcctatcgccgaacagtcttcatcgtctgaactctgcatggttttttctcttccttcagctagtttcctctttttatggatgtgtttattacgatcaatttctacatcaccatacacattcgatacatcttcaagaagaaacccagtggaacttggctcggggcattaggaccttggaagagagatggctgtatgctgttgacatactggaatgcattcttaaagaagaccagcatggtggaatacaccacttggtttttatattttgcatgtgcttcactatcaaagttgttcatgtatctgcagagatccttcattctatgcaaaatatctccatagcttcgtcttcctttatccatctgccattcacatctcattccaacaacattcaaaatcttaaacaacctctcccaagggtccacgatctgggatgatttttccgtcagcccttctattatgtacttctgagagctacgtttgctaggtgacattaaatgcagatgtatcctgggcgccgtgatgctgatgtctctatttgagtagacctagtgacatgattgatataaaattcagctgcgttgttcaagtacttatacaataaattggcaggtaatcgaacatcatgagttgttaattattagaggaaggacatcacgtacaaataattttctaaagcagttcactggagattcttgttcttcaatagtttcagcctctaatagtgcctccccaaggccaaccccatgttgcaccaccgtttcagggaagcgcctcaaaagtagaagcaacatttctgatcgttctaacgtgttgaagcattgttccgtgacctttagtaacatttcacactggacccgaccaggaagagtttccaataaccttcttaaaaattgggtttgtttgtcctgtgaatcgttccttaatgctgatgtaataatgctgatttctctccacaccaccggctggtctgggaaattcacaaacatgtcgtacagcagcctcccggcggtggcggtccgctctgcattccgctcgatggtgtacatctcatactggatgttaaagtctgccgggtagaggctgcgggccgtgatcagccacgccttggctgcccacaggtcttgcggcaccaactcccgggctcgctgcaccaggaactcgcagtccccctgggcagacatgacccgagcgctctccagccgccagcccgaagcggccggaacgtccggctctggactttcagccgccacggcagccaccgccgccgccgccgcc

SEQ ID NO: 130321 - DNA, 1653 bp, Homo sapiens
ctctgactccagcctgagccatggggtggggtgtcaggacagggacaagcagcctctccctcccaggggatgcacgactttcttcgtcttgctggagggtcagacagaaggaattcaagcattttgatgcgcatttctccctcacccttctacaaccctccctcaccactgccccgactttcaataccagttctgcctccttcctccaaactggttggcgtggcacggggttggcccttggcttcgcagtgcccggaggttcggagcgagcactggaccagagcccaagttcccaagttcccattccacggggagatgcggactttaggtggacccggaatggaaggagggtttttaaagaagcgaagcctctgtaacctggtctcctccctctcctcggtttaataccctgcctcccctactagtctccaggcttttctctggacaggggagggactgaacgtactcaactccagccccggggctgacctctctccctgagctttggagcgggtttggacctagccgttgcaagtaggcatgacttttatcacccatcgctatacccagagcagctgctcgaatgtgccaaggagcccaactcgggtgcaaagcgccgacgtctttcccaggttgaggacatcgcgagccagaggtgcaggcagcgaggcgcccaacagtagaatgcatcttccttcccgcgggcagaagccgtcaagtctggagtccgcagcggcacagaatacgcgctccctccctcccccttctctgtcccccgcctctcgctcaccccggcccactccagcggcgactttgagggattccctctctggcggcctctgcagcagcacagccggcctcattcggggcactgccccaccctagcgcccgagacgcgtgggctgagccctgaactgatggaattgttttgtttgttccgcagatacaatggctcaaatcatggcagaacaagaagtggaaaatctctcaggcctttccactaaccctgaaaaagatatatttgtggtgcgggaaaatgggacgacgcgccgccctttacagcccccgccccggggccgggcgagctgagggggcgcggggcgtctgtgttcccagctgatcacagaacaggccgatatcgcattgacccggggagctgaggtgaagggccgctgtggctggcggcccctaggtttaagaacccagacgctgcggggacgattgaagcgcacctccccggctcaacaggaaagccacaacatgtccaagggacctgaggcgacttgccagctctctggcacattaggttaggaacaatgagggttctaactattgctctgggctcttgctgtagctgggaagcacacagccaactcgcaccacctctctgccttggtcacccccgctgggaagtcctatgagtgtcaagctcaacaaaccatttcactggcctctagtgatccgcagaagacggtgttttgtagaacttatgattcaggatgttttgaccagagctctctgcttttcttctttcccattgcagagcataaatgcccagtggatgagcgggagcaactggaagaaaccttgcccctgattttggggctcatcttgggcctcgtcatcatggtaacactcgcgatttaccacgtc

SEQ ID NO: 130322 - DNA, 321 bp, Homo sapiens
cccagcctggcccccttggccaggcatcactgggttttgtccccaacaggattctcccagcaacacctttgtggtccctgccgcccacactgtatgatgctcccacccctgcagttactacaaggggatccggcagatggtggggctcccacagccccttttccaccctgactgtcccgtcaccccccaggcgcacacggactccttgaacacccttggggtgctgggcggtcccccggtgtgctctgatgcgaccctccctcagatcatcaatgccttggaggaggatcctgccgcccagaagatgcagctggccttccg

SEQ ID NO: 130323 - DNA, 445 bp, Homo sapiens
atgtatcttgtggcgtcccggaataggcggtaggagatgaagccatgggggtccacactatcaatgagtggaaacgcagtcatgccagtctctgacgtaaagatgacaatttcatataaaggggcaagctgctggaacaaggtctcgatgcctgggcgcttcttaaacctccagccagtggccagcgaccactcaggatgcaagaggacgccggtgagctccaaaacgagcgtgtagggtggctggtagtacggttcctgcagagggtctgctgctgtggcccttgcgccttagtgctcccgcggctcccgatctctgcggcctgatctggggcccggcggggcggcgtcgccaacctcgtgcacagtccccgcgagccgagccggagcccgcttcgcaagcgcgagaacaccgctgccgaggccgcacgaaatcgtcgacccgg

SEQ ID NO: 130324 - DNA, 1932 bp, Homo sapiens
tcagaggttctcttgaagtagtgtcaccacataactattctctattgataacttatcgcaaccaagttcttctatcagagggttgataacttcagaggcgtcagagctatcgtaaaggttaaaatatcgaggtccaccctgtgaggattcgctgatattcggcatcaaacgctgcttcccttgctctgcaggcttcccgaatcgcctgcggcgttcttcaagctcttgtattcttgcaggagcagtcaccggctgtaacatcgcctcttcaataaagctgttttcttctatctctggcttcccttgaattctttccgtgtgcttgccctcagcaaggagccacagctgcaggtggatttccacaccgggatgatgaggactcagacatcgctttccatttccgagtgcactttggtcatttgtggccatgaacagccatgagtggggggtctccagcccagtgctgaatatgcaatttgaattcactagttttaggcaatacgttgtttctcctaagtggttctccagatgttcagtgaacagataatcatagctcttgtagagggaataggactgtgattctgccatctggtgggaattctggtactcattgtccagctctgagatgtgcaggtcaaattgttgccatcctccaatctggtctcctaactcctctctccaggtttcgatatgaaagagaaggtgccaggccaggcgtcccggaagggcacctgcaagaggccgtcggcagtgggagatcaggcgcgggcgctccgggctgctcggtgtagaccggtcgcgcgcactcagcgccgcgcccagggcgcacggggactcggcggcctctctgagagcccaggcttcaggcagactctgaagaagaggcggcaggggaccgggcgctgcagggggaccgcggggccccagggcctggacccggcccgaagagtggatctgcagctcgaagacgccagcgggccgtgtcctgatgcccccatctggagactctcgggaccagcaggtgtggcgtctgggatgtactttattggacaagtggtggcccagtcttggtctggaagcactggggccctggacccaggcactgagtttgagaggcccagagttcagggctgctctagccggtttgccgctgtttgaaagccgccagcgggtcatcctccagggcatagtgtccagcacggttcgcacgtcctccacaccattcagtgcaatggctgtggcacaacagggggtggtcagccaggcttccggcatcagagttgccgtcccagggccgcagggcaacgccgttatagggctgaggcggaaggcttccttcttgcagtccacaactactactcgagctgggtccgattcagacatgaaatatcctttacatggtgtcatccatgtatcttgtggcgtcccggaataggcggtaggagatgaagcctgggggtccacactatcaatgagtggaaacgcagttgggtttcccgggacacaccgaccactcaggatgcaagaggacgcggtgagctccaaaacgagcgtgtagggtggctggtagtacggttcctgagagggtctgggagaaggcaagggctggtgggctcgatgatcatcattgtcgaactcatcaggaatcttggcaccattttcgtccaccgggttgtttccaagatatagacgacgctcacagtcccaccagctccaagcagcccagcaaccagagcgcaacttttttggcatagctgggaccctctgagcccggctgcgctgtggcccttgcgccttagtgctcccgcggctcccgatctctgcggctgatctggggcccggcggggcggcgtcgcaacctcgtgcacagtccccgcgagccgagccggagcccgcttcgcaaggcgagaacaccgctgccgaggccgccat

SEQ ID NO: 130325 - DNA, 1965 bp, Homo sapiens
  misc_feature (1)...(1965): n = a,t,c or g
gcaccggcagcggtgttctcgcgcttgcgaagcgggctccggctcggctcgcggggactgtgcacgaggttggcgacgccgccccgccgggccccagatcaatgccgcagagatcgggagccgcgggagcactaaggcgcaagggccacagcagcagccgggctcagagggtcccagctatgccaaaaaaagttgcgctctggcttgctgggctgcttggagctggtgggactgtgagcgtcgtctatatctttggaaacaacccggtggacgaaaatggtgccaagattcctgatgagtttcgacaatgattccaattctggttacagcagtttgcgccggacattacaaatattttcaaagatttttaggacagatgattcattcgaggcccaccagcccttgccttcttcccagaccctctgcaggaaccgtactaccagccaccctacacgctcggttttggaagctcaccgcggtcctcttgcatcatgagtggtcgctggccactggctgggaggtttaagaaggcgcccaggcatcgagaccttgttccagcaggcntgcccctttatatgaaattgtcatctttacgtcagagactggcatgactgcgtttccactcattgatagtgtggacccccatgggcttcatctcctaccgcctattccgggacgccacaagatacatggattggacaccatgtaaaggatatttcatgtctgaatcggggacccagctcgagtagtagttgtggactggaaagaaggaagccttcccgcttgcagcccctataacggcgtttgccctgcgggccctggggacgggcaactcttgatgaccggggtcttgttggatctgtctgccttcctcaagacccattgcaactgaatggtgtggaggacgtgcgaagccgtgctggagcactatgccctgggaggatgacccgctggcggctttcaaacaagcggccaaagccggcctagagcaggaggaagcaagcaagcgcctgggccgaagctctccaaagtccaaacaagcagaacctcttcccttggctcccctcacccagccgcttgtggcctcgctcccaaacagccctgaaactctgggcctcctcaaactcagttgcctgggtccagggccccagtgcttccagaccaagacttgggccacccacttgtccaataaagtacatcccagacgccacacctgctgtgtcccgagagtctccgagatgggggcatncatcagggtgaggtccgggactcttgggtcatcgtcccacagtggctgatcggctgccaagcacagtgggggtgctttgttggatcagagcagatttttcaccctggtctcggaatctaaaaaccctcgctgtgtcttcctgtgtgttgcgtgatctgtgaaaaatacatctccctctgaccacagactcctcatctgtggagaagggaagagaggatggcacttggctttaaagacaggtagctgccaggctactgtggagagaatgtgttatgggcctagtgggcctctggtggaccagagattacccctctcaacaggccagctgctggttggctccagccagtgtggccctggggtaaagggggcctggagttgcttgacacgccagttgttcaaaagaagcaagaacttgggaatatttttttttttttttgagacagggtctcactgttgcccaggctgaggcaggagaatcgattaaacccaggaggcagaggttgcagtgagctgagatcacaccattgcactccagcctgggcgacagagtaaggctctgtctccaaaaaaaaaaaaaaaaaaaaaaaccaaaaaaaaaaccagtttgactttatctccctcgccctgcctccatccccacattgccccccactatcccagtctctcctactccagccttcatctagtgctaactgattaaatattctaagatgaca

SEQ ID NO: 130326 - DNA, 481 bp, Homo sapiens
atgatattcaccatgtgcgcaaaagcatggaagtcaacttcctcagttacgtggtcctgactgtagctgccttgcccatgctgaagcagagcaatggaagcattgttgtcgtctcctctctggctgaaacagccatgaaggcagtttctgggatagtccatatgcaagcagctccaaaggaggaatgtgccctggagatcatcaaagggggagctctgcgccaagaagaagtgtattatgacagctcactctggaccactctttctgatcagaaatccatgcaggaagatcctggaatttctctactcaacgagctataatatggacagattcataaacaagtaggaactccctgagggcttgggcatgctgagggattttgggactgttctgtctcatgtttatctgagctcttatctatgaagacatcttcccagagtgtccccagagacatgcaagtcatgggtcgcacctgacaaat

SEQ ID NO: 130327 - DNA, 455 bp, Homo sapiens
  misc_feature (1)...(455): n = a,t,c or g
cttctttgaatctttttcatgatgatattcaccatgtgcgcaaaagcatggaagtcaacttcctcagttacgtggtcctgactgtagctgccttgcccatgctgaagcagagcaatggaagcattgttgtcgtctcctctctggctgggaaagtggcttatccaatggttgctgcctattctgcaagcaagtttgctttggatgggctcttctcctccatcagaaaggaatattcagtgtccagggtcaatgtatcaatcactctctgtgttcttggcctcatagacacagaaacagccatgaaggcagtttctgggatagtccatatgcaagcagctccaaaggaggaatgtgccctggagatcatcaaagggggagctctgcgcccaagaagaagtgtattatgacagctcactctggaccactcttctgagtcngaaatncatgcaggaaga

SEQ ID NO: 130328 - DNA, 708 bp, Homo sapiens
gctgcctggtgagaaaatctcaatgataacctgagatctgactggtttcattaagttctcattgcttctggggctcttcatggcctactactactattctgcaaacgaggaattcagaccaggtaagtacccatgcgtctcattttggaggaataggtttaaaaaacacaggggtgcttgagtggcttatcatctggcgaagatgggagcccatgtggtggtgacagcgaggtcaaaagaaactctacagaaggtgagggttctatgctcgcagatatgtgtaccgtcacatgctcagatgtgttcttatatatgagacatgaccttcgcagagcaatttgttgcccaagcaggaaagctcatgggtgaggctgtttctcttacctcctcctctgaactttgcccttggggtcaccaagagcttttggatattcaccatgtgcgcaaaagcatggaagtcaacttcctcagttacgtggtcctgactgtagctgccttgcccatgctgaagcagagcaatggaagcattgttgtcgtctcctctctggctggtaagtgggacagggacatatgtggaaggtagaagaaaaaaaaaaatgccagggatgatgccgtgcaaacaccaggatcaaaatccgccatctaaatgttgttcctggcaaaataaaaacaaataacctagaggactctgtaaactgttaagcactt

SEQ ID NO: 130329 - DNA, 393 bp, Homo sapiens
cagaaggatacccaaagcatagactctccattttctttttctgctgaagataccctctcctgtccagtgacagaagtcatagccatcagtcactgtggaattaaagatagccctgtacaatcccctaatttccaacagacaggctctaagcttctgtccaatgtggctgcaagtcagcctgctaatatatcagtgttcaaaagggacctgaatgtgataacttctgtacccagcgaattgtgtttacatgagatgtcctcagatgcttcacttccaggggatccagaggcctatcctgctgctgtgtcaagcggtggagccattcatctgcagacaggagtggaaacagaagagatgagatcagcaattgctcctgatcccattcctctgacg

SEQ ID NO: 130330 - DNA, 4146 bp, Homo sapiens
cacaatatgcagaagagcctaatttatacagaggagctacagtttagcgtggcttcaaacagagagataaggctagatttacagcctgtatcccaaccagttggagctgaacaacaagcagctcttctaaaaccagatttagttactagcttgaatcaagatgtggcaactacgaaggaaaacgtcagtagccctgataacccaagtggaaatggcaaacaggatcggatcaaacagagaagagcttcctgtccccgaccagagaaggggactaaatttcagcttaccgtcactcaggtatcaacctctggagataacatggtagagtgtcagctggagacacacaacaacaagatggtcaccttcaagtttgatgttgatggtgatgcgccagaggatattgcagacgggcaggttgaagataactttgtgctggaaagtgagaaagaaaaatttgtagaagaattgagagctattgtaggtcaagcccaggagatccttcatgtccactttgccacagaaagagccactggagttgattctattactgtggactccaacagtattcagacagggtcatctgaacaagtacagataaattctacatctactcaaactgcagatgaatctgctcctcagtcatccccagttggtcggtggcgattctgtatcaatcagacgataagaaaccgtgagactcagtctcctccttctcttcagcattccatgtctgcggttcctggccgacatccacttccaggtccaaaaaacacaagtaataaggaaatatcacgggacacattgctcactatagaaaataatccatgccaccgtgcacttttcacctccaaatcagaacacaaggatgtggttgatggtaagatttctgaatgtgctagtgtagaaaccaagcagccagctatactttatcaagtggaagataacaggcagataatggcaccagttactaatagttccagttactctactacttcagttcgtgcagttccagctgaatgtgagggactcaccaaacaagcaagcatattcatacctgtgtatccatgtcaccaaactgccagtcaggctgatgcacttatgtcccatcctggcgaatcaactcagacttctggtaactctcttacaactctggcatttgatcaaaagcctcaaaccttatcagtacagcagccagctatggatgcagagtttatttctcaagaaggagaaactacagtgaacactgaagcaagttctcctaagacagtcattcccactcagacccctggccttgaaccaactacccttcaacccactactgtcctggaatcagatggagaaagacctccaaaactggagtttgcagacaaccgaattaaaactctggatgaaaaattaagaaacttgctctatcaggagcacagcatctctagcatctatcccgagagtcagaaggatacccaaagcatagactctccattttcttcctctgctgaagataccctctcctgtccagtgacagaagtcatagccatcagtcactgtggaattaaagatagccctgtacaatcccctaatttccaacagacaggctctaagcttctgtccaatgtggctgcaagtcagcctgctaatatatcagtgttcaaaagggacctgaatgtgataacttctgtacccagcgaattgtgtcattaggagatgtcctcagatgcttcacttccaggggatccagaggcctatcctgctgctgtgtcaagcggtggagccattcatctgcagacaggaggtggatattttggcctaagctttacttgtcctagtctcaaaaatcctattagcaagaaatcctggactcgcaaattaaaaagctgggcatacaggctacggcagtcaaccagctttttcaagagatcaaaagtccttgcagtggaaacagaagagatgagatcagcaattgctcctgatcccattcctctgacacgggagtccacagctgatactagggctttgaatagatgtaaagcgatgagtggatcatttcagcggggtcggtctcaggtgattacaattcctcagcagcagtcagcaaaaatgacatccttttgggaatagaacacatatcagtgttcagtgagacaaaccattctagtgaagaagcctttattaaaacagcaaagtctcagttggtagaaatagaacctgccacacaaaatccaaaaacttcgttttcttatgagaggttacaagctcttcaggaaacctgtaaagaaaataaaggagttcccaaacagggtgacaccttcttatctttcagcgcagcttgtgagactgatgtatcttcagtgaccccagaaaaggaatttgaagaaacttcagccacaggaagtagcatgcagtctggatctgaactgttgcttaaagagagagagatattgactgctgggaaacagcctagctctgatagtgaattttcagccagtcttgctggcagtggaaagtcagtggcaaagactggtccagagagtaatcagtgcttaccacaccacgaagaacaagcttatgctcaaacacagagttcactcttctattcgccatcttccccaatgagcagtgatgatgaatcagaaatagaggatgaggacttgaaggtggagcttcaaagattacgattcagacacattcaggaggtggtaaatcttcaaacccagcagaataaggagctgcaggagctctatgaacgccttcggtcaattaaagatagcaaaacccaatctactgagattcctttgccacctgcatcaccacgtcgaccaagatctttcaaaagcaaacttcgaagccgcccccagtccttgacacatgtggacaatggcatagttgttatagatccactgtgtgtggagagtaatgcagcatcatgccaacagtctccagccagtaaaaaagggatgttcacagatgacttacacaagctggtggatgactggacaaaggaagcagtaggaaattctcttattaagccaagtttaaaccaacttaaacaaagtcaacacaaactagagacagaaaactggaataaagtactccagctagaaagcgtgtaccaccgagaagacgaggcaacatggctcccccagcttcgcgcccagatcgtcgcctatcctgcttgcgcagccgctatcgcgtctgcccaccgacgaagcatgggtgtccagggcttccaagagttcctggagaagcgctgtcccggggccgtggtgcccgtggacctcctaaaactcgcgcgcacggtctcgcgccagcagcagcagcagcacttgcaccgccagctgccgccgactgcagccctagcgcccggggctccacgcgccgccaggggctccgtgcctctgcaaccgccgcttccgcccgctgccttgggtgcctactccgggggcgcggggccgattcggcaccatcaccccgctcaccacttccaccatcatggccaagcgcagcccgggctgcaccctccgctgccgccgccgccgccccctcagctgcccggggcccgggtgctggtggacgccggctcggcgctgccgcggctctatggcggctaccagacggattgggtgtgtggcggccaatggaacgccatgctgggctacttgtcagcgctgtgccaggcttgtgcctatcctggcggcgacggcctggagctcgtggtcatgttcccggggggcctgggcaaggaccggctggccgagtggggccgtcggtgccaggccgagcggcagacagcgcaactgatcgtgggacacgtgggcaacaagggcacccctccaccgcgggcctggttcctgccaccggcctgcctgagccactgcgtgaggctagcactcatccgcttccggttctaggtctttcagagccttgaagaccaccatttggaagtggtggcgtttttcagggaaaatggcttccatggccttcttgcccatgactccgagtatgctctctacaatattccctcttactacagttcccatgctctgaaactgagctggaatgggaagaacctcactaccaaccagttcctgatgcaagaagtagccaagcagctgggcctgaagaggatgaatttccccatatttgctgcac

SEQ ID NO: 130331 - DNA, 663 bp, Homo sapiens; identical to SEQ ID NO: 115467

SEQ ID NO: 130332 - DNA, 473 bp, Homo sapiens
gtgtcagaccacgcagggacgcctgccttggtccttcacccttagcggcaagtcccgcttttctggggaaggggcaagtaccccaaccccttatatctctgtgccccgatcccttatttccgcaccccaacctcatatctctgcgccccaatcccttatgtccgcaccccgacctcgtatctctgtgccctgacccctttcccgcttttctggaggcacataagaacttccaaacgcctgaaccgcagcagcccggcattccaccagaacctcctcccccaggagcttgctacaagtgccagaaatctgaccaccaggccaaggaatgcctgcagcccaggattcctcctaagccatgtcccatctgtgcgggaccccactggaaatcagactgttcaactcacctggcagccactcccagagcccctggaactctggccgaaggctctctgactgactccttctcggcttag

SEQ ID NO: 130333 - DNA, 516 bp, Homo sapiens; identical to SEQ ID NO: 114704

SEQ ID NO: 130334 - DNA, 1764 bp, Homo sapiens
ctaagcggagaaggagtcagtcagagagccttgggccagagttccaggggctctgggagtggctgccaggtgagttgaacagtccgatttccagtggggtcccgcacagatgggacatggcttaggaggaatcctgggccgcaggcattccttggcctggtggtcagatttctggcacttgtaacaagttcttgcccctgtcccaggaaagtgggacttgccgctaagggtgaaggagaaggggttgaggggtacttgcccctgccccaggaaagcgggacttgccactaagggtgaaggaccaaggcaggcgtccctgtgtggtctgacacccttgaaacatgagtgtataatcagagaggcatccctgcaatgattaaacaccaagggaaggctgccttcccagtccgtgaccggcgccggagttttgggttcatggataaaacatgtctcttttgtctcattgatactgctatgattactactattgttgctattatcattgtcttcatgttctgaggtaattctgagaaatctttctttttcatccaccatgaaatactgtagaagactcaagggctctttgcctttttcttgaactggagatttaggaaccacagccctctgcccaccagtccccctcctgcactccccactcccatggccacccatggaccaatcggcacacacttcctcccctctgaggcccataaaagccctgagatcagccagagcagagcagacatcaggacaaccagctgggaaccgtctgagccaggtctgtgacttcctcttcagagctctgtggttcctggtgtctccaagcttccaggcatacccatgttccctggtgccagctgtagaagctgcctgtggtgcacctggtccagccgcagccttgcagagggccagcacctggagctgccctccccgctggaagcttggagatgccaggaaccacagagcctgaaagagggtgtcacagccctggcttggggatctcctaggtctgtgctccccaaagggctgcagctcttctatcattttgtcttctctccttgtcgcaggcgctggatctcgctgctcgtcgctgcgcgctactaggtcctgctgtcgtccgagtcgcctccgggactctccggaattgtagcggctgtagccggctccttgcctgcggcgcggagggcaggtcccagtggtaggaggatgtgttccctttgcagaatcagaccccctcctgggactgtggggaccctctgtcgccggcctccattggaggatgcgttgtccctggagctgggtgcgctgttgcgtgacctggggcctgggtggtgggcgggcctgtccatggcaaagggcacggctgcgcgctacttcccgagaacccgccagcaggctcttgggaagcagcgatttctccttagtcacagtcagagagggtgatgcgacacactgggcttcactgtgctcgtgaagcggagccagggtgaaaggatcatatggcctaaccctaaccctaatgggagtaacttcacctgcgtcccacaggccccgcaagagtgacgctgccaggcaggcgccgccctgttcggttcctgctgctgtcgctcctcgctccccaccacctccagagctccggtgggtcaccatggaaagggaagccgctgcctggagctgagtcaggttagagagctgagcaaagtgcaggggtagaggaagcagcagaaaggccctgggagctctctgggtccccaggcagcccat

SEQ ID NO: 130335 - DNA, 571 bp, Homo sapiens
atgttgctcacacaaagcctgtttggtggtctcttcacacggacgcacatgaaatttggtgccgtgactcagatcaggggacctcccttgggagataaatcccctgtcctcctgctctttgctctagagagacaaaggagacacgttttatccatggacccaaaactccggtgctggtcacggactgggaaggcagccttcccttggtgtttaatcattgcagagatgcctgattattcacccacgtttcaaaggtgtcagaccacgcagggacgcctgccttggtccttcacccttagcagcaagtcccgcttttctggggaaggggcaagagcttgctacaagtgccagaaatctgaccaccaggccaaggaatgcccgcaacccgggattcctcctaagccatgtcccatctgtgcgggaccacactggaaatcggactgttcaactcacctggcagccactcccagagcccctggaactctggcccaaggctctctgactgactccttcttggcttagcagctgaagactgatgctgcctgattgcctcggaagccccgtagaccat

SEQ ID NO: 130336 - DNA, 657 bp, Homo sapiens
ttatctcgcgtgccgctgccgcggggcggttcgtctgcggtcgcgcgctgttttcgtgcgccctggtgattcgatactcagtcggggtcgcggcgttgttgcggctgacttgatgacgcccgtgttgtcgttgtgttggagctgtctcggtgttcgtgccgccactctagttgacggtgtagatgtcgacgccgcgcccgccgttcgtgcctgcgtttgtcgggcgccgaccctcactgttgttcgtgcctgccgctcgtctgactgacgtgcgcggtcggaaggtgcgggcttgtggtctgttgtcgccccgtctgcggtctccgtcttcttcgtcagcgacccgcgttgcgcgccattccatcggtcgccctcgtgttgctcgcctgtcgaccgtgtttgtcgctgtctgcgtagagtcgccctcgcgccagcggcgttggtgcttgtttgctctggcagccactcccagagcccctggaactctggcctaaagctgtctgaccgactccttctcggcttagcggctgaagactgacgctgcccgatcgcctcggaagccccgtagaccaccacagatgccgagctgactattcctggactatagccgctgatctcattgatgcccttcttcccaatccaaagcctcctttgcat

SEQ ID NO: 130337 - DNA, 1752 bp, Homo sapiens
atgatctttgtccttcagataagagttaggggccatgatgactccttcctcaagaaccatctagtgtttctggtgatttatggcacaaatggaaccttcaaccagaccctggttactgataacaatggcctagctccctttaccttggagacatccggttggaatgggacagacgtttctctggagggaaagtttcaaatggaagacttagtatataatccggaacaagtgccacgttactaccaaaatgcctacctgcacctgcgacccttctacagcacaacccgcagcttccttggcatccaccggctaaacggccccttgaaatgtggccagccccaggaagtgctggtggattattacatcgacccggccgatgcaagccctgaccaagagatcagcttctcctactatttaatagggaaaggaagtttggtgatggaggggcagaaacacctgaactctaagaagaaaggactgaaagcctccttctctctctcactgaccttcacttcgagactggcccctgatccttccctggtgatctatgccatttttcccagtggaggtgttgtagctgacaaaattcagttctcagtcgagatgtgctttgacaatcaggggacagacttaacttccactgtgagagttacccgaagctcggcatccgtgatggtctacggagcttccgaggcaatcgggcagcgtcagtcttcagctgctaagccgagaaggagtcagtcagacagccttgggccagagttccaggggctctgggagcggctgccaggtctgcggatcaatggagagctaatcactgcctacccacaagtggtggtagtcagagtaccaaccccttgggtgcaaagtgatagtgacatcactgttttgcgccatctagagaagatgggatgtcggttaatgaaccgacctcaagccatcctgaactgcgttaataagttctggacatttcaagagttggctggccatggtgttcctctgccggatactttctcttatggtggccacgaaaattttgctaaaatgattgatgaggctgaagttctggagttcccaatggtagtaaagaatacgcggggtcacagaggtatgtatgagttgttggtaagtactatgggatgttccaattctggtatggtcactacccctatcaagtggctgagtatgatcagtgtccagtgtctggccaatggaactttcctcagcccttcattgaccaaatgccccaagggcattcgagccagcgttccattatctggaggccctcgttctctgaaggcacggaccttttcagctttttccggtcctgtgcgttcagacgaacaggctgaagcactgccggaagcgtatgaaccgattgaggttaacgaattcggtgaaatcgatctgcttgcaatggttgaagatgaaatcatcctcgccttgccggtagttccggtgcatgattctgaacactgtgaagtgtccgaagcggacatggtctttggtgaactgcctgaagaagcgcaaaagccaaacccatttgccgtattagccagcttaaagcgagtaaggtccatggccgtacaacagaataaaccaacccgttccaaacgtggcatgcgtcgttcccatgacgcgctgaccgcagtcaccagcctgtctgtagacaaaacttctggtgaaaaacacctgcgtcaccacatcactgccgacggttactaccgcggccgcaaggtcatcgctaagtaa

SEQ ID NO: 130338 - DNA, 470 bp, Homo sapiens
tcgaacgacgcttcacatagccggctaggtggacgcttcacctggacgcgcatgaaatttggtgccgtgactttgatcgggggacctcccttgggagatcaatcccctgtcctcctgctctttgctccgtgagaaagatccacctatgacctcaggtcctcagaccaaccagcccaagaaacatctcatcaatttcaaatccggaccccactggaaatcggactgttcaactcacctggcagccactcccagagcccctggaactctggcccaaggctctctgactgactccttctcggcttatcggctgaagactgacactgcccgatcgcctcggaagccccgtagaccatcacggacgccgagcttcaggtaagtctcacagtggaaggtaagcccgtccccttcttaatcaatatggaggctacccacaacaggacttaattaacctcaccttcaaggtgtgcaat

SEQ ID NO: 130339 - DNA, 753 bp, Homo sapiens
atgcacgaacatcccataaatgcccttggcagtgatgagtacaatcacagcagagttaatggtagttctggaggggagaagtctgagatcatggtgccagcatgggcaggttttggtgaggaacctcctccaactgtctactgctggctctcctatcctcacaagttctaccatggaagccaaattggtgagcatgaggtgcggaacagagttatgtgcttatcccataacctgtctggttttctaggtattcagacattgcactcgctcagcactgcccttaacccagagcgccaggttgtaagaatcgggtctgtggacctcataccagataggcgcgaacgcctctggcagcggcgtccagggggtccggcggcactcgcggtggggctgcctgggttgcgggtgacgatctgcggggtcccgcacccggccccgcggagcccggacccgcacgtaggcggcgcggcaaaggcacaccctcctcgcggccgcgaacccagcgccgtcctcgcagcgcggcaatgcacggccaccgctgcccccagcccgcccgccgcagccgcgagcacccaaacacctaccctgcggggcgacgacccccggagctcaggcgaggccgctcgggcgtgccacctccgcggccatgacggcgacccggggaagcgccccgcgcgccaaggccccgcgctgctgagctgtgagcacggctgccccgtccgtccgtccgtccagcacccgcccggagagtga

SEQ ID NO: 130340 - DNA, 768 bp, Homo sapiens
tttgatgagttgagagaagaaggcttcagacaatcggtaataacaaacttctccgagctaaagaaggatgtttgaacccatcgcaaagaagctaaaaaccttgaaaaaaagattagacgaatggctaactagaataaacagtgtagaggagaccttaaatgacccgatggagctgaaaaccatggcacaagaactacgcgatgcatgcacaacctagtttagagaaaaaagggtaaaaagaaatgaacaaagcctccaagaaatatgggactatgtgaaaagaccaaatctacgtctgattggtgtacctgaaagtgacggggagaacggaaccaagttagaaaacactcttctggatatgatccaggagaacttccccaagctagcaaggcaggccaacattcaaattcaggaaatacagcaaataccacaaagatactcctcaagaagagcaactccaagacacataattgtcagatttactaaagttgaaatgaaggaaaaaatgttaagggcagccagagagaaaggttgggttacccacaaagggaagcccatcagactaacagcggatctctcggcagaaactctacaagccagaagagagtgggggccaatattcaacattcttaaagaaaagaattttcaacccagaatttcatatccagccaaactaagcttcataagtgaaggagaaataaaataccttacagacaagcaaatgctgagagattttgtcaccaccaggcctgccctaaaagagctcct

SEQ ID NO: 130341 - DNA, 897 bp, Homo sapiens
acaggtgaacgagacaaagttaacaaggatccaggaattaaactcagctctgcaccaagcagacctaacagacatctaagaactctccaccccaaatcaacagaatatacattcttctcagcaccacatcacacttattccaaaattgaccacatagttggaagtaaagcactcctcagcaaatgtaaaagaacagaaattataacaaaccgtctctcagtccacagtgcaatcaaactagaacaccactcaactacatggaaactgaacaacctgctcctgaatgactactgggtacataatgaaatgaaagcagaaataaagatgttctttgaaaccaatgagaacaaagacacaacataccagaatccctgggacacatttaaagcacctccgctggtgataccccagcagacagggtctggagtggacctccagcaaattccagcagacctgcagctgagggtcctgactgttagaaggaaaactaacaaagagcaaggacatccacaccaaaaccccatctgtacgtcaccatcatcaaagaccaaagaagctaaaaaccttgaaaaaagattagatgaatggctaactagaataaacagcatagagaacaccttaaaggacctgatggagctgaaaaccagggcacgagaactacgtgacgcatgcagaagcttcagtagccaattcgatcaagtggaagaaagagtatcagtgattgaagatcaaatgaatgaaatgaagaaagaagagaagtttagagaaaaaagagtaaaaagaaatgaacaaagcctccaagaaatatgggactctgtgaaaagaccaaatctgcatctgattggtgtacctgaaagtgacggggagaatggcatcaagttggaaaacactctttag

SEQ ID NO: 130342 - DNA, 1209 bp, Homo sapiens
atgactggggcagctggggaagaggctgctggggctggcgttggagctgaagttgatgctagggctgaagcaagaatgggaattgaggctgaggcaagaatggtgacagaagctggggttgaaactgaggcaaggatgggggttggagctggggctgaggctggagctgaagaagaggttatagctgcagctgaagtagaggctggaactgaagctgagactgaggctgaggctgaaactggagctaagggtgaggctggaactggagctgaggttgaggccagaactggagctaaagttgaggctggaaccggagctgaggttgaggctggaactggagttaaggttgccggaagtggagctgaggttgaggctggaactgaagctgaggttgaaggtggaagtggagccgaagctagagcctctgctggtgatacccaggcagtggacctccagcaaattccaacagacctgcagctgagggacctggctgttagaaggaaaactaacaaacagaaaggaatagcatcaacatcaacaaaaaggacatccacaccaaaaccccatctgttggtaataacaaacttctctgagctaaaggaggacgttcaaacccatcacaaggaaactaaaaaccttgaaaaaagattagacgaatggctaactagaataaacagtgtagaaaagaccttaaatgacctgatggagctgaaaaccatggcacgagagctacgtgacacatgcccaagcttcagtagccgattcgatcaagtggaagaaagtgtatcagtgactgaagatcaaataaatgaaatgaagcgagaagagaagtttagagaaaaaagagtaaaaagaaacgaacaaagcctccaagaaatatgggactatgtgaaaagaccaaatctacatttgattagtgtacctgaaagtgacggggagaatggaaccaagttggaaaacattcttccggatattatccaggagaacttccccaacctagcaaggcaggctaacattcaaattcaggaaacacggagaacaccacaaagatactcctcgagaagagtaaccccaagacacataattgtcagattcaccaaggttgaaatgaaggaaaaaatattaagcgcagccagagagaaaggtcaggttaccctcaaagggaagcccatcagactaacagctgatctctcggcagaaactctataa

SEQ ID NO: 130343 - DNA, 882 bp, Homo sapiens
atggcgccagtatctgcttctgaggacttctggcaatgtccagagacatctttgatttcgcaactagaaagtgcccctggaattcagttgatggaggccagggatgctgataaaagtcttataatgcacgaaatagcccccacctccaacagggaattaccagtccataaaatcagtattgccaaaccttgctctatgctaatgatctcatggttttttgttaataccggacaaagcttccagaggaaggatcaggcagcaatatttgctgttctgcagcctctgctggtgatacacaggcaaacagggtctggagtggacctccagcaaactccaacagacctacagctgagggacctgactgtcagaaggaaaaataacaaacagaaaggaatagcatcaacatcaagaaaaaggacatctacaccaaaaccccatctgcaggatcacagctcctcaccagcaatggaacaaagctggatgcagaaagactttgacaagttggcagaagtaggcttcagaaggtcggtaataacaaacttctccgagctaaaggaggatgttcaaacccatcacaaggaagctaaaaaccttgaaaaaagattagatgaatggctaactagaataaacagtgtagagaataccttaaatgacttgatggagctgaaaaccatggcacaagaactacatgatgcatgcacaagcttcagtagacaatttgatcaagtggaagaaagggtatcagtgattgaagataaaattagtgaaataaagcaagaagagaagtttagagaaaaaagagttaaaaagaaacgaacaaagtctccaaacaatatgggactatgtgaaaagaccaaatctacatttgattggtgtatctga

SEQ ID NO: 130344 - DNA, 1008 bp, Homo sapiens; identical to SEQ ID NO: 119742

SEQ ID NO: 130345 - DNA, 1257 bp, Homo sapiens
atggttatgttggaaggaactggggaagaagagtggggcgctgctgaaaatatacccaaaagtgtggagcgactttggaaccgggtaacaggcagaggttggaacagattggagggctcagaagaagacaggaaaatgtgggaaagattggaacttcctagagacttgttgaatggctttgaccaaaatgctgataacaatatggacaataaaattaaagtccaggctgaggtggcctcagctggagatgaggaacttgttgggaactggagcaaaggagaaaaacttcaagagtttgtggatcacaaagtgtggtggctgacacatgactggaaaaatgtaaaggagagaggttgtaatacttgctgtgatgaccgatggatggcagtgaagccagctgcacgtctatggaaagggaccatatttcctctaggctgctatagaaaccacagaagatatgcacatcctctgttggtgatacccaggcaaacaggatcaggagtggacctccagcaagccccaacagacctgcagctgagggacctgactgttagaaggaaaactaacaaacagaaaggaatagcaccaacatcaacaaaaaggacatccacaccaaaaccccatctgtcaccatcatcaaagacaaaggtagataaaaccacaaagatggggagaaaccagagcagaaaagctgaaaattctaaaaaccagagcaccccttctcctccaaaggatcgcatctcctcgccagcaaaggaacaaagaaggatggagaatgactttgacgagttcacagaagtaggcttcagaaagtcggaagctaaaaaccttgaaaaaagattagacaaatggctaactagaataaacagtgtagagaagaccttaaatgacctgatggagctgaaaaccatggcacgagaaatatgtgatgcatgcataagcttcagtagccgattcgatcaagtggaaataagggtatcagtgattgaagatccaattaatgaaatgaagcgagaagagaagtttagagaaaaaagagtaaaaagaaatgaacaaagcctccaagaaatatgtgactatgtgaaaagaccaaatctacgtctgattggtgtacctgaaagtgatggggagaatggaaccaagttggaaaacactcttcaggatattatccaggagaacgtccccaacctaacaaggcaggccaacattcaaattcaggaaatacagagaagagaacaccacaaagatactccttga

SEQ ID NO: 130346 - DNA, 467 bp, Homo sapiens
ccaaaaccccatttgtaggttaccaacatcaaagaccaaaggtagataaaaccacaaagatggggagaaaccagagcagaaaagctgaaaattctaaaaatcagagcacctcatctcctccaaaggatccaggctccttgccagcaacggaacaaagctggacagagaatgactttgacgagttgacagaagtaggcttcagaaggtcggcaataacaaacttctccgagctaaaggagcatgttctaacccgtcgcaaagaagctaaaaaccttgaaaaaaggttagatgaatggcttactagaataaacagtgtagagaagaccttaaatgacctgatggagctgaaaaccatggcacaagaacttcgtgatgcacgcacaagcttcaatagctgattcaatcaagtggaaaaaaggatatcagtaattgaagatcaaattgatgaaataaagtgagaagacaag

SEQ ID NO: 130347 - DNA, 669 bp, Homo sapiens
ctctaaacttctcacttcatttcattcatttgatcttcaatcactgataccctttcttccacttgattgaatcagctgctgaagcttgtgcatgcatcacgtagttctcgtgccatggttttcagctccatcacgtcatttaaggtcttctctatgctgtttattctagttagccattcgtctaatcttttttccaggttgttagcttctttgcgatgggttcaaacatcctcctttagctcagagaagtttgttattgccaatcatctgaagcctacttctgtcaactcgtcaaagtcattcagaggaaggagttttggaggaaggagagacctagggagggttttttgttttgtttttgtaagagaaggatgttggccaggcgcggtggctcacgcctataatcccagcactttgggaggccagtgcaggccgatcatgaggttaggagatttgagaccatcctgggccaacatggtgaaatgccgtctgtactaaaatacaaaaaattagccaggcgtgatggtacacacctgtagtcccagctacttgggaggctgaggcaggagaattacttgcacctgggaggcagaggttgcagtgagctgagattgcgccactgcactccagcctggcgacacagcgagactccgtctcaaaaaaaaaaaa

SEQ ID NO: 130348 - DNA, 1458 bp, Homo sapiens
aacagaaagggatagcatcaatatcaacaaaaaggacatctataccaaaacccaatctgtaggtcgccagcatcaaagaccaaaggtagataaaactacaaagatggggagaaaccagaacagaaaagctgagaattctaaaaaccagagtgcctcttctcctccaaaggattgcagctcctcgccagcaatggaacaaagctggatggagaacaactttgatgagttgacagaaataggcttcagaaggtcggtaataacaaacttctccgagctaaaggaggatgttcaaacccattgcaaggaagctaaaaaccttgaaaaaaagattagatgaatggctaactagaataaacagcatagagaagaacttaaatgacctgatggagctgaaaaccatggcacaggaactacgtgatgcatgcacaagcttcagtagccaatttgatcaagtggaagaaagagtatctgtgattgaagatcaaatgaatgaaatgaagcaagaagagaagtttagagaaaaaaagagtaaaaagaaatgaacaaagcctgcaagaaatatgggactgtgtgaaaaggccaaatctacatctgattggtatacctgaaagtgatggggagaatggaaccaagctggacaacactcttcaggatattatctaggagaacttcccccacctagcaaggtaggccaacattcaaattcaggaaatacaggaaatacagagaacaccacaaagatactcaccgagaagagcaactccaagacacataattgtcagattcaccaaggttgatatgaaggaaaaaatgttaagggcagtcagagagaaaggctttaaaccaacaaagatcagaagagacaaagaaggccattacataatggtaaagggatcaattcaacaagaagagctaactatcctaaatatatatgcacccaataccggaggacccagattcataaagcaagtcctgagtgacctacaaagagacttagactcccacacaataataatgggagactttaacaccccactgtcaacattagacagatctatgaggcagaaaattaacaaggatatccaggaattgaactcagctctgcaccaagtggacctaatagacatctacagaactctccagcccaaatcaacagaatatacattcttctcagcaccacatcgcacttattccaaaattgaccacgtagttggaagtaaaacactcctcagcaaatgtaaaagaccagaaactacaacaaactgtctatcaaaccgcagtgcaatcaaactagaactcaggattaagaaactcactcaaaaccgctcagctgcatggaaactgaacaacctgctcctgaatgactactgggtacataacgaaatgaaggcagaaataaagatgttctttgaaaccagaacaaagatacaacatgccagaatctctgggattctgtag

SEQ ID NO: 130349 - DNA, 656 bp, Homo sapiens
cttttttttttttttggccttcagatttcttgataggccttgcaaactttagtttccttacagcatctctcacaacttctgttccttttggctgttccacttctgtactgccaagaaactttgcattatagggaatgaaatgttttgataaagcttcaggtgtatgcatccatgttttgtctttcttcctgctaaaagcacggttccatgatgaggatcagccaaataaatgttcagttccacgacttaaatcctgggtatgctcaaatatagttgaaagaaaatggacacttgactttatatagcttctatcatacagttgccatcagaattcttcctatcagtttctctcctatgtatatcagatggaatcataaataacttggcacgctagttccagctgcagcgtccagcttcctgttcaagtcccattcaacatcgtaaacacattccaagaaaaccagcctgcccagagttccctcccgcacacagggaagtcagcgcggcagccgcaggagcctcagaatagagagaactgcctgctccggattctgatccgtgtggcgagtgaggccacgagaaggtggacccggccaagcgaatttagcagtcggagcgagaacccaagggctcatcacccccgccgcgccttgcgc

SEQ ID NO: 130350 - DNA, 1203 bp, Homo sapiens
ttttttactccttcttgctccctttcccacgcagaactttactaaaggtcagtaagaatgggctgttgtgttttctctcaaatcctatacagaagtccttaattccgaggtaaacatctgaatggaacaaatgagtatgatctgggggttaaggcaattttcaagtgtgtgtatgtgtgtgtctgttttaaggcataacaaagtccagagattaaggccgagttaaaaaacaaatgaggacaaaccaatgaggacaaaccagtccgctgaggtgcggccagagcagcagcaactgtgtctgctttcttgataaaggctgtgaagacggcacgttttactcttattcgtgtatttcttttgacactttacccctctatgaagcctcagaggtgttttaaaattgtgttaggaaacacacagagataagaaaaggcaaatgggtctgaactagtgtctcagggaagagtctggaaaggaaacgcggcgcgagtggggtgggagagggggcctgtggttttgcttctgtccgggctaaagactgagtaaggtagggcccctccttctgcggatgggtttctctctcattccaccctccacccacctccggttccgcgtgcacgcgcgagatagtccagtgggcccacagataaccgaccattcagagatttaaagaaggaaagtcagcgagcttgaacacaggcgtcccgtgtggaaatgtccaaggagaccgccagaagtgcgcaagccggagtcggctagagtttccttctcaccgagagggggagcccggcgttcccggccgggagcgacccggagtccccagccccgcgtcccagctgccgccagcgccagttttggattcggcggattaggaagaggagggaggggggagagagcgcgaagagggaggggaccgaagctggagggtcccgagtccagcgccgtgttggcgtagagaaactttccctctcggcctcggagacggcgccccggccgtgccggagtggagatcgccaggctcggaggaaccggcagctctccacgcccctgcccgaagcctgacccgactgcctctctcagtgagttatttatgattccatctgatatacctaggaggagaaactgatagaagaattctgatggcaactgtatgatagaagctatataaagccaagtgtccattttctttcaactatatttgag

SEQ ID NO: 130351 - DNA, 2716 bp, Homo sapiens
atgaacgtgaaactgaaaagcaaagtaataccatcaacacttggcaaaatagaacctctccgctgtcagcgccagaaatacttacctgctgagaaaaggaaaagcacaacactgactttaccccgcgacgcttttaaaaaatccaaaatacccagcgcgatggggatgggattgcatcaaagctctcagagcacagctgcaaagggtaaagcaaagctagagctctactctggacctatcactctagacagtttctctgtgaggggcagttttatacacatttcaggtggcagaataaattcaatccttgtttctccatcttatcgagtagtagaagttagttacattctctttgaactcatcatgaattccatgaagactgaagaaaacaagtcatttaggcgctatggaagatgaccagaggactaggacctgaagtttcaaaggatactgtcatgaaggcaggacacatgctggacacacctgttggatccattgtctatctggcataagaaagtgtagcagcacctttaagcttaaaagtgaagtcaacaagcatgaaacagcccttgaaatgcagaatccaaatttgaacaataaagaatgttgtttcacctttacgttgaatggaaactccagaaaattagaccgtagtgtgtttacagcatatggtaaacccagcgagagtatctactcagccctgagtgctaatgactatttcagtgaaaggataaagaatcagtttaataagaacattattgtttatgaagaaaagacaatagatgggaccatataaatttaggaatgccccctcaagtgccctgccctagtgattcctcattttaaaattaccatttggtccaaagaaagagtagcaaagaagatggacacatattacgcccaatgtgaaaatcccaaacatggaatgcattctttttcatgttgttgctataggaaggacaagaaagaagattgttaagatcaacgaacttcatgaaaaaggaagtaaactttgtatttatgccttgaagggtgagactattgaaggagccttatgcaaggatggccgttttcggtctgacataggtgaatttgaatggaaactaaaggaaggtcataagaaaatttatggaaaacagtccatggtggatgaagtatctggaaaagtcttagaaatggacatttcaaaaaaaaaaagcattacaacagaaagatatccataaaaaaattaaacagaatgaaagtgccactgatgaaattaatcaccagagtctgatacagtctaagaaaaaagtccacaaaccaaagaaagatggagagaccaaagatgtagaacacagcagagagcaaattctcccacctcaggatctaagccattatattaaagataaaactcgccagacaattcccaggattagaaattattacttttgtagtttgccccgaaaatataggcaaataaactcacaagttagacggaggccgcatctgggtaggcggtatgctattaatctggatgtccaaaaggaggcaattaatctcttaaagaattatcaaacgttgaatgaagccataatgcatcagtatccgaattttaaagaggaggcacagtgggtaagaaaatattttcgggaagaacaaaagagaatgaatctttcaccagctaagcaattcaacatatataaaaaggacttcggaaaaatgactgcaaattctgtttcagttgcaacctgcgaacagcttacatattatagcaagtcagttgggttcatgcaatgggacaataatggaaacacaggtaatgctacttgctttgtcttcaatggtggttatattttcacctgtcgacatgttgtacatcttatggtgggtaaaaacacacatccaagtttgtggccagatataattagcaaatgtgcgaaggtaaccttcacttatacagagttctgccctactcctgacaattggttttccattgagccatggcttaaagtgtccaatgaaaatctagattatgccattttaaaactaaaagaaaatggaaatgcgtttcctccaggactatggcgacagatttctcctcaaccatctactggtttgatttatttaattggtcatcctgaaggccagatcaagaaaatagatggttgtactgtgattcctctaaacgaacgattgaaaaaatatccaaacgattgtcaagatgggttggtagatctctatgataccaccagtaatgtatactgtatgtttacccaaagaagtttcctatcagaggtttggaacacacacacgcttagttatgatacttgtttctctgatgggtcctcaggctccccagtgtttaatgcatctggcaaattggttgctttgcatacctttgggcttttttatcaacgaggatttaatgtgcatgcccttattgaatttggttattctatggattctattctttgtgatattaaaaagacaaatgagagcttgtataaatcattaaatgatgagaaacttgagacctacgatgaagagaaaggtaaacaagagtcatcacttcaagatcatcagattgaacccatggaatgttagaaaagagatgctgtcttcaagaaaatatgccaataattcctggcaaagatttcatgacaaagacacttaaagcaattgcaacaaaagtgaaaattggcaaatgagacctaattaaatctttctgcacagc

SEQ ID NO: 130352 - DNA, 921 bp, Homo sapiens
ctgattttctctttggattcttccaaaatcagagtcagactactccctgtgccatgaacggagatgacacctttgcaaggagacccacggttggtgctcaaataccagagaagatacaaaaggccttcgatgatattgccaaatacttctctaaggaagagtgggaaaagatgaaagtctcggagaaaatcgtctatgtgtatatgaagagaaagtatgaggccatgactaaactaggtttcaaggccatcctcccatctttcatgcgtaataaacgggtcacagacttccaggggaatgattttgataatgaccctaaccgtgggaatcaggttcaacgtcctcagatgactttcggcaggctccagggaatcttcccgaagatcatgcccaagaagccagcagaggaaggaaatgtttcgaaggaagtgccagaagcatctggcccacaaaacgatgggaaacagctgtgccccccgggaaaaccaactacctctgagaagattaacatgatatctggacccaaaaggggggaacatgcctggacccacagactgcgtgagagaaagcagctgggtgggtttatgaagagatcagcgaccctgaggaagatgacgagtaactccccttggggatatgacacatgcccatgatgagaagcagaacgtggtgacctttcacgaacatgggcatggctgtggacccctcgtcatcaggtgcatagcaagtgaaagcaagtgttcacaacagtgaaaagttgagcgtcatttttcttagtgtgcccaagagttcgatgttggcgtttccgctgtattttcttgcagtgtgcccattctggttagacattagcgttttcgttgaatgagcaagacatgcttaatgcatatttccggcttgtgtaacccatgcacctaccctcag

SEQ ID NO: 130353 - DNA, 778 bp, Homo sapiens
cagaagtccattatctcgaagtcgtagacacaccttccaagcatcccaatctttggtttctttaatgacaatagcatttaataatccttttcctcttacggcagttacaacatcagaaggtagcttcatgagttcatttctcaagataatgcccaatttgtctgcattttcagcaaggttttcttcttctaaaacctcaagggctgcgatggccactcggcagcctagtggattgccaccgtatgtggacccatgctcccctggcttaatggtcagcatgatgtcatcatcacacagcactgcagacacagggtataagcccccagaaagggcctttccaaggaggactatatcaggtctgacattttcataatcaacagccagccatctaccagttctggccaatcctgtctgtatttcatcagcaataaagagaacctggtgcctggtgcagagctctcgcactcccattaggtaacctggatccggaacaacaacgcctgcttcaccctgaattggttctaccatgaacgcagccacatttggatcctgaagagcacgctccagtgcgggcagatcattatagggaatgatgtcgaatcccggcataaatggtccaaaaccatcgtaactggttgggtctgtggaactggagatagcagacaacgtcctaccccagaagttcccagctgcaaaaacaatctttgctttgtatttctgaatgcccttcacggtatagccccacttacgagctagtttacaggcagtctctccagcc

SEQ ID NO: 130354 - DNA, 830 bp, Homo sapiens
ataagcacatgaaaagatgttcaacactcatttgcttcactagatgcagaataacaccacgatgaggtatcactacacacttattacaatagctaaaataaaagacatagtgaccaccgtatgtggacccacgttcccctggcttaatggtcagcattatgttatcattccacagcaccgcagacacagagtatcagcccccagaaagggcctttccaaggaggactatatcaggcctaacattttcatgatcaacagccagccatctaccagttctggccaccaccccgcccagagcaccaaaggtcctgaggctggaaagactcaggctgtttctctcgcaggtgagactgctcccagtgccatgaacgggctgaatggcagacatgcctagctgagtccctgccataattccttttttttttttttccaggccttcgatgatattgccaaatacttctctaagaaagagtgggaaaagatgaaatgagccaccgtgccaggcccaagcttgcctcttaagaaataaacattttgctcctttctaggtttcaaggtcaccctcccacctttcatgcgtagtgtctctctagagtttggaaatctttaccaacaaagaaaaattctgatgtagctctaaagcactgtagaaatgtcactgatactgtttatctgcgaccttcacattgtaaagatcatgcccaagaagccagcagaggaagaaaatggtttgaaggaagtgccagaggcatctggcccacaaaatgatgggaaacagctgtgccccccgggaaatccaagtaccttggagaagattaacaagacatctg

SEQ ID NO: 130355 - DNA, 921 bp, Homo sapiens; identical to SEQ ID NO: 130352

SEQ ID NO: 130356 - DNA, 778 bp, Homo sapiens; identical to SEQ ID NO: 130353

SEQ ID NO: 130357 - DNA, 822 bp, Homo sapiens
aagcacatgaaaagatgttcaacactcatttgcttcactagatgcagaataacaccacgatgaggtatcactacacacttattacaatagctaaaataaaagacatagtgacaaccgtatgtggacccacgttcccctggcttaatggtcagcattatgttatcattccacagcaccgcagacacagagtatcagcccccagaaagggcctttccaaggaggactatatcaggcctaacattttcatgatcaacagccagccatctaccagttctggccactcccccgcccagagcaccaaaggtcctgaggctggaaagactcaggctgtttctctcgcaggtgagactgctcccagtgccatgaacggagtgaatggcagacatgcctagctgagtccctgccataattccttttttttttttttccaggccttcgatgatattgccaaatacttctctaagaaagagtgggaaaagatgaaatcagccaccgtgccaggcccaagcttgcctcttaagaaataaacattttgctcctttctaggtttcaaggtcaccctcccacctttcatgcgtagtaactctctagagtttggaaatctttaccaacaaagaaaaattctgatgtatttctaaagcactgtagaaatgtcactgatactgtttatctgcgaccttcacattgtaaagatcatgcccaagaagccagcagaggaagaaaatggtttgaaggaagtgccagaggcatctggcccacaaaatgatgggaaacagctgtgccccccgggaaatccaagtaccttggagaagattaacaaga

SEQ ID NO: 130358 - DNA, 450 bp, Homo sapiens
atgattgtgaagcctccccagccatatgtaactagagttcattctcagatctatccagggtgtccttcgaatggctccccaaatccaaccaaagcctcttcttacgaagtcatcgacatctgtctctcaggccaggcttcttcaaaacaaaaggcgcttctccctcgccagtgctcaggctcagcaaaggctcaggcagaacaagcccaaatctcagtgtcttacaaacagcaaagaatggataaccagttctcttcattcaccattcccagctatactcctctggagtgtatccggaaccagtgggactgctttgaccctcagaatctggaggaaaagcacctcatagccctctgcacaaaggtgagtgtgactggcatggccctggagacggccgcccacgctggttttgcacctctggtgaccatcaaagctggcatcacaacttga

SEQ ID NO: 130359 - DNA, 566 bp, Homo sapiens
ccacaatttttacgagggttactcaaagtttgccaacaggggggagatatgaaggcatagataagggcacttaactcctattctccggattttctctacttcatgggtacctaccgcattggtacctatgtcacttgccaaggtcaaggtcactgggtctcagggacaaaaggtggaaagtgaagggggacacggactttctctctccgtcacaccctgagtatttgctgaaagaagagaatgatggacacctctgctccctgtctttcagaatgggcaaccagttctcttcaccacttccagcttatactcctctggagtgtatcctgaaccattgggacgggttttacccttagaatctggaggaaaaacacctcatagccctacgcacaaagggttggccaaattatgatttacaggaaggactgagttggcctcaggaaggaaccattcatttcaataccacttggcagttggaacttttctgcagacatgaggacagatggtctgaggccacatatatgcaggctttctatatcttgcaaggcaatcgagaccttggctaa

SEQ ID NO: 130360 - DNA, 1623 bp, Homo sapiens
atggagtgtccggcaaacccggggggtgttcccaccctcgactctagaggatccctcacgttattagaaatcaaccatcggccattagcaacaatgggcgtcgagaaccagacgctggcggtctcttattactacgctgtgcgtcgacgcccgcatcagcatgactatattgcgctctcacgtctctttcatacggtcatgttgtttgatgtaccagttatgacgcggttgatggagagcgaagcgcggcgctttattgcgctggtggatgagttttacgagcgccatgtcaaattagtggtgagtgcagaagtgccgctgtatgaaatttatcagggcgatcggctgaagtttgagttccagcgttgcctgtcacgtctgcaagagatgcaaagcgaagagtatctgaagcgcgagcatttggcggctaaaccagaaaccgtaaaacgcgactggtatgttgttgacgcgaccggtaaaactctgggccgtctggctactgaactggctcgtcgcctgcgcggtaagcacaaagcggaatacactccgcacgtagataccggtgattacatcatcgttctgaacgctgacaaagttgctgtaaccggcaacaagcgtactgacaaagtgtactatcaccacaccggccacatcggtggtatcaaacaagcgacctttgaagagatgattgctcgccgtcctgagcgtgtgattgataatcgcagaggatccctccggcaggcgggttacgcaattcatgatggcgggaataactcaatggcaaaaaacacatcttgcggtgtccaactgcgtattcgtggcaaagtgcagggcgtcggttttcgtccgtttgtctggcagctggcacagcaattaaatcttcacggcgatgtctgtaatgacggcgatggcgtagaagtccggctgcgggaagacccggaaacgtttcttgttcaattgtatcagcactgcccgccgctggcgcgtattgatagcgtcgagcgtgagccgtttatctggtcacaactgcccaccgagttcactatacgccagagcacaggcggcaccatgaatacgcaaattgttcccgatgccgctacttgccctgcttgccttgccgaaatgaataccccaggcgaacggcgttatcgttatccgtttatcaactgtacccactgcggcccgcgtttcaccattattcgcgccatgccttacgaccgcccgtttaccgtgatggcggcgtttccgctatgtccggcctgtgacaaagagtaccgtgacccgctcgatcgtcgcttccacgcccagccggtggcctgcccggagtgtggcccgcatcttgaatgggtaagtcatggtgaacatgcggaacaagaggcggcattacaggcagctatcgcacagttaaaaatgggcaaaattgtcgccatcaaagggattggcggatttcatcttgcctgcgatgcacgtaacagtaacgcggtggcgacacttcgggcgcgcaaacatcgcccggcgaaaccgctggcggtcatgttgccagtggctgacggtttaccagacgctgcgcgccagttgcttaccacgcccgccggcgccggattgtggcttgggtggaagtaa

SEQ ID NO: 130361 - DNA, 480 bp, Homo sapiens
tgtaatgtgtgttgtgatgcccagcacatttgttggatggtacaaagggaattatgatacttaatcaaaaagccatacaagccagataacattaaggcttaacggtaacaataggtgattcagttaggaaattaatgttagagatcggttttccttgtggaaatcagtggtattcaaatgcctgaattggctacccggttttagagctgctctccatgtatgagcaggacataggattcactctctggaatgcttctgtaggcaggactttgaaatgaccctgtcctcagcctggaggatgcggtattctgattgtctggtgctgtgtcaactgggcctgcctctgggatagtgttgtggctgccccacgagaaccctatatgccaggtgagcttgaagcacctcaaagacagagcactgaagctccatgacacagggctattcagctatcattgcccctgtttgccagcacctctgtct

SEQ ID NO: 130362 - DNA, 1581 bp, Homo sapiens
atggggcgctggcccatgccacgtcaagctagccgaccccactctatcgactcgataaatggtcatcaccatcatccggagtggaattttaatgtggtgaaaactggcgacacgctggatatcggcaacggcaaacagctcatttttgtcgaaacaccaatgctgcactggccggacagcatgatgacttacctgacaggcgacgcggtgctgttcagtaacgatgctttcggtcaacactactgcgacgagcatctgttcaacgatgaagtggatcagacggagcttttcgagcagtgccagcgttactacgccaatatcctgacgccgttcagccgcctggtaacaccgaaaattaccgagatcctgggctttaacttaccagtcgatatgatagccacttcccacggcgtggtatggcgcgataacccgacgcaaattgtcgagctgtacctgaaatgggcggctgattatcaggaagacagaatcaccattttctacgacaccatggtgaataacacccccatgatggctgacgctatcgcccaggggattgccggaaaccggcccacgccttgcgggggaaaatttcaacgtcggcccgaaacgataaacacgaagatcctgacctattgtctttccgctcagaaaggggagcttgattggccgccctctagaggatccccggcggcttgcccgactcatgcgctgatttgtgtcgatcgtaataaacttgaacaactgagcgcagaaaaacgccgccgaattcccggaaatattcgtagaatacggagcgggcggtatcgccgacctgtgactgccggatgcgacgctgtcgtgtccggcagggcgggttacgcaattcatgatggcgggaataactcaatggcaaaaaacacatcttgcggtgtccaactgcgtattcgtggcaaagtgcagggcgttagttttcatccgtttgtctggcagctggcacagcaattaaatcttcacggcgatgtctgtaatgacggcgatggctgggccactgctgattcctctgtgtcgtcttgttctcaaactgatttgtcgtttgattctcaagtgtctcttcccattagtgttcacactcagacatttttgcccagctctaaggtaacttcatctatagctgctcagactgatgcatttatggacacctgtttccagtcaggtggggtctccagagaaactcaaaccagtgggatagaaagtccaacggatgaccatgtacagatggaccaagctggaatgtgcggagacatttttgagagtgttcattcatcatataatgttgctacaggcctgcgacagcctggtcttactggtccccatctcctgcggccgactggcggtaagaacgggcttgtcagaactctccgtcagggacctgagaaggaacaacggaacgcgttcggaacggcttggactcccaagactcacctgattagtggccacaccgggagaattgaagcggcagtagccggcggagacgcccgaccagaaggccggctgctagggagcagacagttgaaccgcttgccagacgccgaaacccagtga

SEQ ID NO: 130363 - DNA, 1099 bp, Homo sapiens
gacatcactacaatctggctcggacccgggatcgtataaacttgaacaactgagcgcagaaaaacgccgccgtacggcgctgatgttctaaaaatcttagagaactgttctggcatcaaaggaattcccggaaatattcgtagaatacggagcggggcggtatcgccgacctgtgactgccggatgcgacgctgtcgtgtccggcagggcgggttacgcaattcatgatggcgggaataactcaatggcaaaaaacacatcttgcggtgtccaactgcgtattcgtggcaaagtgcagggcgtcggttttcgtccgtttgtctggcagctggcacagcaattaaatcttcacggcgatgtctgtaatgacggcgatggcgtataagtccggctgcgggaagacccggaaacgtttcttgttcaattgtatcagcactgcccgccgctggcgcgtattgatagcgtcgagcagcacaggcggcaccatgaatacgcaaattgttcccgatgccgctacttgccctgcttgccttgccgaaatgaataccccaggcgaacggcgttatcgttatccgtttatcaactgtacccactgcggcccgcgtttcaccagacactagaggaggagagctggtcgattccgttctccgttatgctggtcgttccgctggggattatcgatgcgttgctggctgccaccttccgtggcctgaccaatgacgtttacttccaggtaggcctgctcacccccattgggttgtcggcgaagaacgcgatccttatcgtcgaattcgccaaagacttgatggataaagaaggtaaaggtctgattgaagcgacgcttgatgcggtgcggatgcgtttacgtccgatcctgatgacctcgctggcgtttatcctcggcgttatgccgctggttatcagtactggtgctggttccggcgcgcagaacgcagtaggtaccggtgtaatgggcgggatggtgaccgcaacggtactggcaatcttcttcgttccggtattctttgtggtgaatcgccgccgctttagccgcaagaatgaagatatcgagcacagccatactgtcgatcatcattga

SEQ ID NO: 130364 - DNA, 804 bp, Homo sapiens; identical to SEQ ID NO: 130193

SEQ ID NO: 130365 - DNA, 373 bp, Homo sapiens
ataatgagcagcattcttggctttaatcagttttcccattagtatttcaagggacctttggtctttacacatccgcagagtaagatggaattgtgctaagcacatattatcatttttattggcatcatttctagattctagaaggcccactgccagcaaacactggtgacctctgtttgcctttacaagtacaacctgatcgagagcaggttcgctgggccctttttaaaaaataagacttatctattaaattcaaggatatcattgcatattgaacaatgtgacttatataaaatagccaagtctcaagggtcagaggaattgtttctaatagatctgcctttatatgtcatgtgtagaggagcagccaaga

SEQ ID NO: 130366 - DNA, 3636 bp, Homo sapiens
atgcccatcaatgatagactggctaaagaaaatgtggcacattacaccatggaatactatgtggccataaaaaagaatgagatcatgtcttttgcagggacatggatgaagctggaaaccatcattctcagcaaactaacacaggaacagaaaaccaaacaccacatgttctcactctcccatgctcccccaagcctagccatagaaactagaatcctcttcccaagatacagaaaatgtggaagtgactttgaaatgggtaacaggcagaggtttgtacttcctagagacttggagagctcagaagacaggaagatgtgggaaagtttggaacttcctagagacttgttgaatggctttgaccaaaatgctgatagtgatatggacagtgaaggccaggttgaggaggtctcagatggaatgagaaatttactgggaattagagcaaaggtaacccttgctatgccacagcaaagaatttggctgtattgtgcccatgtcctagggctttgtgaaagtgatgatttaggggacatggatgaagctgaaaaccatcattctcagcaaactaacacaggaacagaaaaccaaacacctcatgctcttactcataagtgggagttgaacaatgagaacacatggacatagggaggggaacatccctttacttctccatgctaccctaacgactacccaaacagccaggcttgcatgtggacgctccgagcccccaccggttatatcattcagataacatttaacgactttgacattgaagaagctcccaattgcatttatgactcattatcccttgataatggagagagccagactaaattttgtggagcaactgccaaaggcctatcatttaactcaagtgcgaatgagatgcatgtgtccttttcaagtgactttagcatccagaagaaaggtttcaatgccagctacatcagaggtatgtaaaccaaaggcaacgccaaccttctgcttttatttaacatgttctcttaccaggtatctgttgcaaaaagcatctctattccagagctcagtgctttcacactctgctttgaagcaaccaaagttggccatgaagacagtgattggacagctttctcctactcaaatgcatccttcacacaattgctcagttttggaaaggccaagagtggctactttctatccatttctgattcaaaatgtttgttgaataatgcattacctgtcaaagaaaaagaagacatttttgcagaaagctttgaacagctctgccttgtttggaataattctttgggctctattggtgtaaatttcaaaagaaactatgaaacagttccatgtgattctaccattagtaaagttattcctgggaatgggaaattgttgttgggctccaatcaaaatgaaattgtctctctaaaaggggacatttataactttcgactttggaattttaccatgaatgccaaaatcctctccaacctcagctgtaatgtgaaagggaatgtagtcgactggcaaaatgacttctggaatatcccaaacctagctctgaaagctgaaagcaacctaagctgtggtgagtttgtagcgtattcctttttttttttttttttagcattattctatgtggggaccctctgtcaaggtagggagcccacaccgtgctctggaatctctttgctttctacttgcaattctgaggtaaaagtacagagcaaggtggcagaatgggtaagtgagcttgtaacttttcttttttaaaaaaattctttaacttctgggccaaatgacaagcaaccaatgaacaacaacaacagttctatccgaaatgtttccctaggttggtgctttgggcccttctagtttacaatgctaccaacaatactaatttagctcctaaaaaataatgagtccttggatgaaggcttgaggctacatacagtgaatgtgagacaactgggtaagtgactaatttttttataatatgcattttatacaactgtatattcagaaccttctgaatacgttcttccttgtccagacaagcctggcttttctgcttctcggatatggtaatattttcactgactcttgccagcaaagctacatgttatcagccttccctccaactgtttaagtaagtgagcagttttcctttatttctcaaggacaaaatgacatgacttcaagaacttaacctcagccaatattaccaacattgtggaacaggtcaaaagaattgtgaataaagaagaaaacattgatataacacttggctcaactctaatgaatatattttctaatatcttaagcagttcagacagtgacttgcttgagtcatcttctgagtaagtattttttttttcctggagagtaaattttattggataatgatgttaatcacatgtgaatattacaactcggaacttggctctcagcgtatcatccctgttaccagggacaaatgcaatttcaaattttagcattggtcttccaagcaataatgaatcgtatttccaggtaatgagccagtggtttctttcattttaattaattagttagacatataaaccaaacttacttgaggaatttaagtccagaaggattctgtattaggttaggaaggagcacagtttacttttcttcaacaaaactggacttttccaggtaagcacattcattaaattattgtttttcaactgcaaatgaagtttctttcaagtacaacctgatcgagagcaggttcgctgggccctttttaaaaaataaaacttatctattaaattcaagataattggaaacattactatccagaatctgaaggatcctgttcaaataaaaatcaaacatacaagaactcaggtaagaaaacgctcccaatagcatttggacagaagtggactatttaatatacaggttataccggtttgcagaaagcttgggaaagaaggtaatgatgaaaaacaatgtgtaacgacttccagaagtaatgctgcatttttcctgttgcatttcttccttctggcaacctttacctggatggggctagaagcaattcacatgtacattgctctagttaaagtatttaacacttacattcgccgatacattctaaaattctgcatcattggctggggtaagcctcttaaaatttttttggttttgtttttccctcatgaaaattgccaagtctatggaaaagaaagttatgggaaagaaaaaggtgatgaattgtaagtaataaaaactttttgtgatgagtagatatcctttgtttcctgaagtggagtcatgttttttctgaacattgccatgttcattgtggtaatggtgcagatctgtgggaggaatggcaagagaagcaaccggaccctgagagaagaagtgttaaggaacctgcgcagtgtggttagcttgacctttctgttgggcatgacatggggttttgcattctttgcctggggacccttaaatatccccttcatgtacctcttctccatcttcaattcattacaaggtaagataaattgtacatgaatagtctctgctttctaattttgtcatattttctgtttccattaatgagaattgggatgttttatttttcccagcatgggtcccctgtcaggaggg

SEQ ID NO: 130367 - DNA, 720 bp, Homo sapiens
ctaccagggaattgacccttcgggtttccttcgatggacccttcccagagaaacgttcatttcactgtgggaccagtgatttctctccaaaccttctcgtagggaatccaccctcatggggccccgggtcgtgatccaaatgagcgcttctccttgagccttggagtaactggagcgggtggggaccacctttaaatctgttacgacccggtcagtgattcttaaacctggctgatccaatggccgcttgatacaatggtgtcgttcgggaaacgcagccctaacgttggtcctaagctgacaaattggtctgtggacgccaaacttccgtgctaggactttctgcgtgtggaccgggggcctagtcctgtgcttctgagggttctgcttccaagaggctgctggtgcccgggacaccagcagtttcgccatgggtgtttcgccatgggagtttcgccatgggtgactttggcctgagatgcgctccatggagcagattctggagttgctggtgttggaggagttcctgactatcacgggccagtgattttttgttgttgttgttgttgttgtcttctctggaaccttcatcctccagatttccccccagtgcagtgaagagtgtgctattgcttttggtttccacggggaggcagtgtcgctgtcatagtgtccgctcgcgaagatctgcagcttcactcctgaagccagcaagaccat

SEQ ID NO: 130368 - DNA, 1452 bp, Homo sapiens
tgggaagagaaggaaaacaaagaatacctaaaatctctatttgaaatcttgattctgatgggaaagcaaaacatacctctggatggacatgaggctgatgaaatcccagaaggtctctttactccagataactttcaggcactgctggagtgtcggataaattctggtgaagaggttctgagaaagcggtttgagacaacagcagttaacacgttgttttgttcaaaaacacagcagaggcagatgctggagatctgtgagagctgtattcgagaagaaactctcagggaagtgagagactcacacttcttttccattatcactgacgatgtagtggacatagcaggggaagagcacctacctgtgttggtgaggtttgttgatgaatctcataacctaagagaggaatttataggcttcctgccttatgaagccgatgcagaaattttggctgtgaaatttcacactatgataactgagaagtggggattaaatatggagtattgtcgtggccaggcttacattgtctctagtggattttcttccaaaatgaaagttgttgcttctagacttttagagaaatatccccaagctatctacacactctgctcttcctgtgccttaaatatgtggttggcaaaatcagtacctgttatgggagtatctgttgcattaggaacaattgaggaagtttgttcttttttccatcgatcaccacaactgcttttagaacttgacaacgtaatttctgttctttttcagaacagtaaagaaaggggtaaagaactgaaggaaatctgccattctcagtggacaggcaggcatgatgcttttgaaattttagtggaactcctgcaagcacttgttttatgtttagatggtataaatagtgacacaaatattagatggaataactatatagctggccgagcatttgtactcctgcagtgcagtgtcagattttgatttcattgttactattgttgttcttaaaaatgtcctatcttttacaagagcctttgggaaaaacctccaggggcaaacctctgatgtcttctttgcggccggtagcttgactgcagtactgcattcactcaacgaagtgatggaaaatattgaagtttatcatgaattttggtttgaggaagccacaaatttggcacaccaaacttgatattcaaatgaaactccctgggaaattccgcagagctcaccacggtaacttggaatctcagctaacctctgagagttactataaagaaaccctaagtgccccaacagtggagcacattattcaggaacttaaagatatattctcagaacagcacctcacagctcttaaaagcttatctctggtaccctcagtcatgggacaactcatattcaatacgtcggaggaacaccatgctgacatgtatagaagtgacttacccaatcctgacacgctgtcag

SEQ ID NO: 130369 - DNA, 1056 bp, Homo sapiens
atgcgtcctcccccagggctcctaatatgggctctgggcagcggactccccatgaatgcagagtcagaagggagccacaatggccagtctctgcagatgtcccatgagctgacaccatgggactatcggcaccatcgtggcctgagagggtcggggctatatcaggtgtcttaccccctgttaacattttaccacatttataggtttttttctgatacacttgagaccggcgctctagcgccggcgggatcgacggtcagcatagcgaaagaacgcgctacctgcggccgaaggtatagcgccgctgcgggccctgtgagagctgagaagacgacggcggccgaggaggcccaattccgaggctcggccccgtcagggtccgcgctggcggtgtgcgcgtacctgctccgaagcgtctccgctgactgccagtcggtagcgcgactggatgcggggcccacgtgccacgcagacgcccctcggcgcctcccgctcttgctctgcggcccaacgagcgcgttcctgccgcgggacagccttgcagagaaacgcggtcttacacacgcactggcctcccgggtgccagcgccagcaggggcggccagccaccgcgggagcgggctagagtgtggcccggaggcagcccgaggcttcgcgacgtttttgcgacagccgcggccgtgttccgcgagtgccctccctcctcctctctttgaggagccctgcagagctggccgtgctacctcccgaggcagtgtggggccacagtgcagaacttctgtggtgtccccacctgtatgcggaagagcacatggtccaacttggtcgtcttcaggttcccacaggatccatccagatgcgcaaactaatagcttgactgctgtactgcatgcactcaatgaaatgatggaaaatattgaagttcatcatgagttttggtttgaggaagccacaaatttggcaaccaaacctgatattcaaatgaaactccctgggaaattccacagagctcagcaaggcaacttggaatctcaactaacctcagagttactgtaa

SEQ ID NO: 130370 - DNA, 399 bp, Homo sapiens
gaacactcagagccaccaatcggggtgcagattgtagattacctcctccgtcaagagaaagtcactgacaggatggaccactccaaagtggagacagaaacagtgctgagctttgtggacgacatcatctctggagcaaagtctccttgtgcaatgccatctcaggtgccggacaagcagctcaagaaatagcagacaagatctacaatctcttcaatggctacactagtgggaaggagcagcagaccgcctacaacaccctcctggatctgggttcccccaccttacaccgggtcctctaccactataaccagcactatgagagttttggggaattcacctggcgatgtgaggatgagttaggtcccaggtaatcaataaactaaatcaaccctttta

SEQ ID NO: 130371 - DNA, 1541 bp, Homo sapiens
tgaggagtcctgttctatctggtacccaaacaagcaggtccagcggcgactctggctggagtatgaagacatcagtaaaggcaactccccatcagatgagtctgaggagcgggaaagagaccccaaggtgctgacattcccagaatacatcaccagcttgtcagactccggcaccaagcgcatggcggctggagtccgcatggaatgccagagcaagggacgatgcccctcgtcctgccccctgtgtcatatgacatccagccctgacacccctgctgagccggttctgctggaggtgaccaaagcagcccccatctatgaactagtgaccaacaaccagacccagaggctcttgcaggaggctaccatgagctctctctggtgctcagggactggagatgtcatcgaggactggtgtcgatgtgactccactgcttttggagctgatggactccccacctgtgcgcctctcccacagcctgtgctgagactctccacggttcacgagcccagcagcactcttgtggtcctggagtgggaacactcagagccaccaatcggggtgcagattgtagattacctcctccgtcaagagaaagtcactgacaggatggaccactccaaagtggagacagaaacagtgctgagctttgtggacgacatcatctctggagcaaagtctccttgtgcaatgccatctcaggtgccggacaagcagctcaccaccatctctctgatcatacgatgcctggaacctgacaccatttacatgttcacgctgtggggagtggacaacacaggacggcgctccaggccaagcgacgtgatcgtgaagaccccatgccccgtggtggatgatgtcaaggctcaagaaatagcagacaagatctacaatctcttcaatggctacactagtgggaaggagcagcagaccgcctacaacaccctcctggatctgggttcccccaccttacaccgggtcctctaccactataaccagcactatgagagttttggggaattcacctggcgatgtgaggatgagttaggtcccaggaaagctggtctcatcctttcccagcttggggacctcagcagttggtgcaatggactccttcaggaacccaagataagcttgcggcgcagctcactcaagtacctggggtgccgctacagcgagatcaaaccctacggacttgactgggcggagctcagccgggacctcaggaagacgtgtgaggagcagaccctgagtatcccctacaacgactatggggacagcaaagagatctagcaccataaggccagggagctgctgccagaatgaagtaggaaagaggagggatccatctgggttggtctgtggatttttaatattttttaatggaacatgaaaacctccacagcaacatcgaaaccagggagaaagtgatccttgctccctgtcagaacttcttcagtatgatgtttctccatctgcattgattggggaaatctgccaagccagtggtttcatgcagtgccatatttctttagaggat

SEQ ID NO: 130372 - DNA, 1912 bp, Homo sapiens
tacatccttcccattcctctctactccctaatcttgctaggtatctagaactgaagggctttgagggggattcgctgcatcttgattttaattgggatcgccagaaaacagtagcaaggggagcaacccctcagatgtttacagctatgacaggacccagcgatggccagctggagggcaggaaggccctcggaccctcagctccggagtgtttgtgacctcaccccacccgcactcgctccgcccaatccgtacagtatattgaaaaagattgggggcctggtgaggggctggaggaggggggagtcttgggtcagcttgtggcctttgactccttcactgtttctttccattttgtgtctgcaggcaactccccatcagatgagtctgaggagcgggaaagagaccccaaggtgctgacattcccagaatacatcaccagcttgtcagactccggcaccaagcacatggcggctggagtccgcatggagtgccacagcaagggacgatgcccctcgtcctgccccctgtgtcatgtgacatccagccctgacacccctgctgagccggttctgctggaggtgaccaaagcagcgcttctcaacactcaatcttttccctgttctcttatgcagctcttgcaggaggctaccatgagctctctctggtgctcagggactggagatgtcatcgaggactggtgtcgatgtgactccactgcttttggaggttgtgtccctgtttcatgttccttcctgtctgcacacaggctgagactctccacggttcacgagcccagcagcactcttgtggtcctggagtgggaacactcagagccaccaatcggggtgcagattgtagattacctcctccgtcaagagaaagtcactgacaggatggaccactccaaagtggagacaggtgagcaccttctacttcatgggcttgtcttgatccaaggtgataaaactaaaacaaagaaaaatgccctgcctcatggctttgctccaggtccccagtatcccagggcaatgcaggaggagcagggagaagaagaagctgttcttcttctccaggaagcagctgttcttctgccactgagggttagagacatacgcagctgctgcttcaggcatagagagctgttgtttctcatgctttttccattccttctcctctgggcagaaacagtgctgagctttgtggacgacatcatctctggagcaaagtctccttgtgcaatgccatctcaggtgccggacaagcagctcaccaccatctactttcagcctttaatagccaggttttcattttcttctaggaaggggctccttagaatcatgtcttcacattgtcatggagactgcgatgtttccactctggattcctacactgtttctgctaaccatgccctcccactccctgccaggttcacgctgtggggagtggacaacacaggacggcgctccaggccaagcgacgtgatcgtgtatatgtaaataacttattttccttttcctccttcctcagaaatagcagacaagatctacaatctcttcaatggctacactagtgggaaggagcagcagaccgcctacaacaccctcctggatctgggttcccccaccttacaccgggtcctctaccactataaccagcactatgagagttttgcttctttctaacttaagtatcctctgtgcttgatccataggaaagctggtctcatcctttcccagcttggggacctcagcagttggtgcaatggactccttcaggaacccaagataagcttgcggcgcagctcactcaagtacctggggtgccgctacagcgagatcaaaccctacggacttgactgggcggagctcagccgggacctcaggaagacgtgtgaggagcagaccctgag

SEQ ID NO: 130373 - DNA, 2034 bp, Homo sapiens
atggaatactatgcagccataaaaaagaatgagatcatgccttgcaggaacatggatggagatggagactattatcctcagcaaactaatgcaggaatagaaaatcaaatacctcatgttgtcacttatgtcttcaaacctgtgcactctggatttagctgctatgaccggagtcttagcatgccgtacattgaaccaacccaggaggcaattccattcctcatgttgcttagcttggcttttgctggacctgcaattacgattatggtaggagaaggaattctctactgttgcctctccaaaagaagaaatggggtcggactagagcccaacattaatgctggaggctgcaacttcaattccttcctcagacgagctgtcagattcgttgagaacaatgttccagagcctgcatcagcgacaggtctagaaagtccattatccaaaggaaaaagtgttcatgtatttggattatgctctacagctctcattacagatatcatacagctgtccacaggatatcaagcaccttactttctgactgtgtgcaaaccaaactatacctctctgaatgtatcttgcaaagaaaattcctacattgtggaagatatttgctcaggatctgacctcacagttatcaacagtggcagaaagtccttcccttctcaacatgcaacccttgctgcctttgcagctgtgtatgtttcgggcttgtatgctgtggggaatttcctgcccagtgatgagagtatgtttcagcacagagacgccctcaggtctctgacagacctcaatcaagatcccaaccgacttttatctgctaaaaatggtagcagcagtgatggaattgctcatacagaaggcatcctcaaccgaaaccacagagatgctagctctctgacaaatctcaaaagagcaaatgctgatgtggaaatcattactccacggagccccatggggaaggagaacatggttaccttcagcaataccttgccgcgagccaataccccatctgtagaagaccctgtcagaagaaatgcgagcattcatgcctctatggattccgctcgatcaaagcagctcctcacccagtggaagaataagaatgaaagtcgaaagttgtccttgcaagttatagagcctgagcctgggcagtcaccacccagatccatagaaatgaggtcaagctcagagccatcgagggtaggggtgaatggagaccaccatggtcctggcaatcagtacctcaaaatccagcctggcgctgtccccggatgtaacaacagcatgcctggagggccaagagtgtccattcagtcccgtcctgggtcctcacagttggtgcacatccctgaggagactcaggaaaacataagcacctcccccaaaagcagctctgctcgggccaagtggttaaaagctgctgaaaagactgtggcctgtaacagaagcaacagccagccccgaatcatgcaagtcatagccatgtccaagcagcagggtgtcctccaaagcagccccaagaacactgaaggcagcacggtctcctgcactggctccatccgctataaaaccttgacagaccatgagcccagtgggatagtgagggttgaggctcacccagagaacaacaggcccatcatacagatcccgtccactgaaggtgaaggcagtggctcctggaagtggaaagcccctgaaaagggcagccttcgccaaacttacgagctcaacgatctcaacagggactcagaaagctgtgagtctctgaaagacagctttggttctggagatcgcaagagaagcaacattgatagcaatgagcatcaccaccacggaattaccaccatccgcgtcaccccagtagagggcagcgaaattggctcagagacgctgtccatttcttcttcccgcgactccaccctgcggagaaagggcaatatcattctaatccctgaaagaagcaacagccccgaaaacactagaaatatcttctacaaaggaacctcccccacacgggcttataaggattga

SEQ ID NO: 130374 - DNA, 739 bp, Homo sapiens
atgaagcgcgctggctccagcggtggccgcggggaatgtgacatcagcggcgccgggcgcttggggctggaggaggcagctcgcctcagctgcgctgtgcacacctcgcccgggggaggacgcagacccgggcaggcggcagggatgtcggcgaaggagaggccaaagggcaaagtgatcaaggacagcgtcaccctcctgccctgcttttatttcgtcgagttgcctatattggcatcatcggtggttagcctctatttcctcgaactcacagatgtcttcaaacctgtgcactctggatttagctgctatgaccggagtcttagcatgccgtacattgaaccaacccaggaggcaattccattcctcatgttgcttagcttggcttttgctggacctgcaattacgattatggtaggagaaggaattctctactgttgcctctccaaaagaagaaatggggtcggactagagcccaacattaatgctggaggctgcaacttcaattccttcctcagacgagctgtcagattcgttggtgttcatgtatttggattatgctctacagctctcattacagatatcatacagctgtacacaggacatcaagcaccttactttctgactgtgcgcacaccaaactatacctctctgaatgtatcttgtacataaaattcctaccttgcggaagatattcgctcacgatctgacctcacactcactcacagtggcggaatgc

SEQ ID NO: 130375 - DNA, 1890 bp, Homo sapiens
  misc_feature (1)...(1890): n = a,t,c or g
atgggggcccggaaattcccaagtttagaaaaaaaaaggtttcctaaggggataaaaaccaaaacccaagaaattggcccctgggggaaggaaagggtaattcgttggggagaaaagaaacgggtcgctccaattctagatcacattcttcaaggtcaaagtctagatgacagtctagttctcgatcaagatcaagatctcattctagaaagaagcgacacagttctaggtctcgttccagaacatattcaaggtcttggagtagagatcgtatgtattctagagatgatcgtcactaatacatcgagtttcaactgtgagataaaatatgaagtcattgtagactgcagtagacacggacgggaatacaagggaagggagccaagacacggatctggaagcctagaacgaccgacggaacaggaaacatcccagcccaaaatccgaaaggaaattgtagaaacaaaaggcactgcacgtggcaactgcggtaccactggtctcctgcggccaaaaaccatgatggtggagagatcctatggtccacaagacagggtggcagtggggacttggccacaccctggcactgagaggtgggcctctagctgggacgtcagcagttctgtgaggcatcagagtgaaggtgtggtgcaagggtgggagcacaggtgcacacataagtctcagcaagaagtgggagcatgtgtgaattttagaactccgaaagtgattctgatctataacctctacctaccagtctcccaccaattcagtaagaccttcatgtccatagtaattgttcagaaaaatctctatctgcacaatgactttcgggcacttaacgtgacacatatctaccgactgactatccctaacacgacaacgtgcttcacagcaacccaagacgaagacaaacagatctttcacactgcagcacaacatcgatcacacacatccagctaccaatacttgtctttaactcgcagccaccgatacgaaatcgtgttctatacaagaggtttgggagcaccatttccagctggtgacgggcacggcaaatttcaacgcctgggcaagccttactcacattccgtacatttcgtgattcctcaagacaaaacacaacacatttccatcaacacaccccataagaattcagagacaacaaagcaacatacgtgctcatttgcctatggactatactattatcaacaaaaagaagataacccatatgcctggccacaagtgccagcagctgcagagatggtttcccgcttagcccagtcacgtcactctcagcagtcaattctcattcatttcagccatcaatcataccacacagatcacatttcaacagtcatncaggatgcacacagcgagtcgcgtaggagccacagcggtatcgatccatctcacaccacccatgacacaggtcagagcttcacagcagagcagaccaaaacgcaacatgctgacatgatcttcatcacacatgcacttcatgcagagcgaacaaggtcaacggatacaccatatcaacacatgttcaccacaccgatggccaatagcgaggtcatatccatcatataccagtttcatccaacaggtcatcaagagcttcatccccatgattatcaagagcgtggacatgctcaacagatccatatccaccaaacatcaaccacaggtcatcacacccccatgacaggatacccaccaacaaacacagcaaacgcggcactataccaccatatcgatgataaacaatccagtcagcaagagccgaatccagacaccaggcagaacactaccaagtcatgtcccacaacgcagtcccagacagatacatccagtgacagtcagcatcaggcaagcacaagaatcccgtga

SEQ ID NO: 130376 - DNA, 3022 bp, Homo sapiens
gccccagatcggaagtgacggagacgtgctagcgcgtcgaaggtagctctatggttttcctcgcgttcttgagtcgggaaatggccgctgtgtggttgcaacggagataaattcccggaaccgcgattcggcgtgtcaggaattcgaatttagagtttaatttctcagagcattctctccaggaagaatttttacagtatctcaaagacttcacttgacttcttgatcctgcataaaaccaaggagaaaagaaatgggtcgctccaattctagatcacattcttcaaggtcaaagtctagatcacagtcttagttctcgatcaagatcaagatctcattctagaaagaagcgatacagttcttaggtctcggttccagaacatattcaaggtctcgtagtagagatcgtatgtattctagagattatcgtcgcgattacagaaataatagaggaatgagacgaccttatgggtacagaggaaggggtagaggggtatttatcaaggaggaggaggtagatatcatcgaggtggttatagacctgtctggaatagaaggcactctaggagtcctagacgaaggtcgttcacgttccaggagtccaaaaagaagatccgtttcttctcaaagatccagaagcagatctcgccggtcatatagatcttctaggtctccaagatcatcctcttctcgttcttcatccccatatagcaaatctcctgtttctaaaagacgagggtctcaggaaaaacaaaccaaaaaagctgaaggggaaccccaagaagagagtccgttgaaaagtaaatcacaggaggaaccgaaagatacatttgaacatgacccatctgagtctatcgatgaatttaataagtcatcagccacatccggtgatatttggcctggcctttcagcttatgataatagtcctagatcaccccatagtccttcacctattgctacaccacctagtcagagttcatcttgctctgatgctcccatgctcagtacagttcactctgcaaaaaatactccttctcagcattcacattccattcagcatagtcctgaaaggtctgggtctggttctgttggaaatggatctagtcgatacagtccttctcagaatagtccaattcatcacatcccttcacgaagaagtcctgcaaagacaatcgcaccacagaatgctccaagagatgagtctaggggccgttcctcgttttatcctgatggtggagatcaggaaactgcaaagactgggaagttcttaaaaaggttcacagatgaagagtctagagtattcctgcttgataggggtaataccagggataaagaggcttcaaaagagaaaggatcagagaaagggagggcagagggagaatgggaagatcaggaagctctagattacttcagtgataaagagtctggaaaacaaaagtttaatgattcagaaggggatgacacagaggagacagaggattatagacagttcaggaagtcagtcctcgcagatcagggtaaaagttttgctactgcatctcaccggaatactgaggaggaaggactcaagtacaagtccaaagtttcactgaaaggcaatagagaaagtgatggatttagagaagaaaaaaattataaacttaaagagactggatatgtagtggaaaggcctagcactacaaaagataagcacaaagaagaagacaaaaattctgaaagaataacagtaaagaaagaaactcagtcacctgagcaggtaaagtctgaaaagctcaaagacctctttgattacagtccccctctacacaagaatctggatgcacgagaaaagtctaccttcagagaggaaagcccacttaggatcaaaatgatagcgagtgattctcaccgtcctgaagtcaaactcaaaatggcacctgttcctcttgatgattctaacagacctgcttccttgactaaagacaggctgcttgctagtacacttgtccattctgtcaagaaggagcaagaattccgatccatctttgaccacattaagttgccacaggccagcaaaagcacttcagagtcatttattcaacacattgtgtccttggttcatcatgttaaagagcaatacttcaagtcagctgcaatgaccctaaacgagcggttcacttcgtatcagaaagccactgaagaacatagtactcggcaaaagagccctgaaatacacaggagaattgacatctcaccaagtaccctgaggaagcatacccgtttagcaggggaagagagagtttttaaagaagaaaatcaaaagggagataaaaaattaaggtgtgactctgctgaccttcggcatgacattgatcgccgtagaaaagaaagaagtaaagaacggggagattccaagggctccagggaatccagtggatcaagaaagcaggaaaaaactccaaaagattacaaggaatacaaatcttacaaagatgacagtaaacataaaagagagcaagatcattctcgatcttcatcctcttcagcatcaccttcttctcccagttctcgagaagaaaaggagagtaagaaggaaagagaagaagaatttaaaactcaccatgaaatgaaagaatactcaggctttgcaggagttagccgaccacgaggaaccttttttcgaattagaggcagaggaagagccagaggagtttttgctgggacaaatactggtccaaacaactcaaatactacttttcaaaagagaccgaaggaagaggaatgggatccagaatataccccaaagagcaagaagtacttcttgcatgacgacagagatgatggtgtggattattgggccaaaagaggaagaggtcgtggtacttttcaacgtggcagagggcgctttaacttcaaaaaatcaggtagcagtcctaaatggactcatgacaaataccaaggggatgggattgttgaagatgaagaagagaccatggaaaataatgaagaaaagaaggacagacgcaaggaagaaaaggaataa

SEQ ID NO: 130377 - DNA, 3918 bp, Homo sapiens; identical to SEQ ID NO: 124117

SEQ ID NO: 130378 - DNA, 456 bp, Homo sapiens
atgcccggccgtcatcacatatttctaagtatctgccatgtgtcaggcactgtaataagcaccagaaatgatgatgatgatgatgatagtaatggtgatggatttgtgaatgcaccaatcgacactctgtatctagctactctggtggggacgtggagaacctttgtgtccacactctatctagctaatctggtggggacttggagaacctttgtgtctagctcagggattgtaaacgcaccaatcagcaccctgtcaaaacagaccactcggctctctgtaaaatggaccaatcagcaggatgtctgcagcttcactcctgagccagcaagaccacgaacccaccagaaggaagaaacaacgaacacatccgaacatcagaaggagcaaactccgcacacgcggcctttaagaactgtaacactcactgcgatggtccgcggcttcattcttaaa

SEQ ID NO: 130379 - DNA, 1211 bp, Homo sapiens
atgaggaggtgggagaaatacctggttacaggctgtcccaagattcctcggatggtaacagaccttgaggacagccatccagggcaggagcttaacactgagaaagctgtgccagtgtccaggaagaagtcaatttcctggccctcaatggttaaacttacccgaggctcacttcacggaggtgtggagggagaggcactagcgggaaccaggctgcgcacggtgcttgcgggccagctggagttccgggtgggcgtgggcttggcaggcctgcactcggagcagccagccgtccctgccccgggcaatgagggtcttagcacccgggccaatggctgcggagggtgtgctgggtgccccagcagggccagcccactggcgctgagctcgatttcttgcgaggccttagctgccttcccgtggggcagggctcgggacccgcagcctgccatgcctgagccttccccgccaccacgccctcctcccccccgccctcctcctccgtgggctcctgtgcagccggagcctccccgacaagtgccgccccctgctccacggcacccaatcccgtcgaccacccaagggctgaggaccggagcctccccgacaagtgccgccccctgctccacggcacccaatcccgtcgaccacccaagggctgaggagtgcgggcgcatggcgcgggactggcaggcagctccacctgcagccccagtgcaagatccactgggtgaagccagctgggctcctgagtctagtgggaacttggagaacctttatgtctagctaagggattgtaaatacaccgatgggcactctgtatctagctcaaggtttgtaaacacaccaatcagcaccctgtgtctagctcagtgtttgtgaatgcaccaatccacactctgtatctggctactctggtggggacttggagaacctttgtgtccacactctgtatctagctaatctagtggggatgtggagaacctttgtgtctagctcagggatcgtaaacgcaccaatcagcaccctgtcaaaacagaccacttgactctctgtaaaatggaccaatcagcaggatgtgggtggggcgagacaagagaataaaagcaggctgcctgagccagcagtgacaacccccctcgggtcccctcccacgccgtggaagctttgttctttcgctctttgcaataaatcttgctactgcccaaaaa

SEQ ID NO: 130380 - DNA, 1690 bp, Homo sapiens
atgggactgggcggcgtggagcagggggcggtgctcgtcggggaggctcgggccgcgcaggagcccacggagcgggaggaggctcaggcatggcgggctgcaggtcccaagccctgccccgcggggtggcagctaaggcccagcgagaagtcgagcacagcagctgctggccttggtgctaagctcctcagtgcccggggccggctggccgctccgaaactgaatgcactacaggaggagctgaagaattttggtgtcattgtgttggcctttccctgcaaccagtttggaaaacaagaaccaggaacaaactcagaaatacttcttggtctcaagtatgtgtgtccaggtagtggctttgtccccagtttccagctctttgagaaaggggatgtgaatggagaaaaagaacagaaggtctttactttcctgaaggtgcatgagtataaacctggcatggatgggttagctagaaatgctctgaaagcatattttgtttttctcaaaaatgctctagaactttccttggcacatataaaagcacggctggaactggttgctcagagctgctgtgaccgtgagcacagatctcttcgtgtcagggcctgctcctggacgcggagccgaaatcggttcaaagcctgcgggcggggctccttgcaggtccccgaaagaatgagaaccgggacccccccccccccaccaacgggacgtggaaggacgggttacagaggagaacgcgttatctcctctgggaggcgattttcagaacttactgcgggaaaaaaaaaaaaaaagaaaagaaaaaagaaagaacccccccccaaaaaaaaaacaagcccaagaggagcagaagaaaacaaagggtgggagaaaactgggacaaattactttttcttgacccccaaaaggggggtcttcggagaaaaagttaaagatgaagaaattatcctggattatccaagtggagctcaaataccatcacaagtgcctttaatagggagaggcacagggagattatacagttacagaagagaagaagacaatgtgaccacacggacacagatagaagcaatgccaccaccagccaaggaatgcgagcagccaccagaggctgggaaaagttgttgtaccttgcatttgttggctgagaagtgcgagcgcatggcgcgggactggcaggcaactccacctgcagccccagtgcgggatccactgggtgaaagccagctgggctcctgagtctggtggggccttggagaacctttatgtctagctcagggattgtaaatacaccaatcggcactctgtatctagctcaaggtttgtaaacacaccaatcagcagcctgtgtctagctcagggtttgtgaatgcaccaattgacactctgtatctagctactctggtggggccttggagaacactttgtgtccacactctgtatctagttaatctagtggggatgtggagaacctttgtgtctagctcagggattgtaaacgcaccaatcagcgccctgtcaaaacagaccacttggctctaccaatcagcaggatgtgggtggggccagataagagaataaaagcaggctgccccaggcagcagtggccaacccgctcgggttcctttttgcattgtggaagctttgtttgttcgctctttgcaataaatcttgctgctgctcacaa

SEQ ID NO: 130381 - DNA, 840 bp, Homo sapiens
ggcgcctgctgtggccaccgaggtgttgcctggagcggggctgacagcaggtgtgctcctgtggagtgaccccaaggagccttcgaatccaggttcaagccatagagttggggcctctgacctggacaatccggcccacccaaccctacttagctacaccatgcaaaaactggaagaagagctggatgtggtgctgtttgaccgctcgggccatcgtaccaaattcaccaatgtcgggaggatgttgttggagcgagggcgcgttttgctgcaagccgcagataaactgactactgatgcggaagctctcgcgcgcggttgggaaacgcatctcaccattgtgaccgaagcgctggtaccgacacctgcctttttcccgttaatcgacaaactggcggcaaaagccaatacccaactggcaatcatcacataagtgctggcgggggcgtgggaacggctggagcaggggcgggcggatattgttatcgcgccggatatgcattttcgttcctcgtcggagatcaactcgcgcaagctctatacgttaatgaacgtctacgttgccgcgcctgatcacccgattcatcaggagccggaaccgttatctgaagtgacgcgtgtgaaatatcgtggaattgcggtggcggataccgctcgtgagcgcccggtgttgaccgtacagctgctggacaaacagccgcgcttaacggtgagcacgattgaagataaacgtcaggcattactggcggggcttggcgtggcgacgatgccgtatcctatggtcgaaaaagatattgcggaagggcggttgcgtgtcgtcagcccggaatcgaccagcga

SEQ ID NO: 130382 - DNA, 923 bp, Homo sapiens
gtcgcttcttgtccgatggcactatcataagtgtggactctgctgggaaggtgcagttctgggactcagccactgggacgcttgtgaagagccatctcatcgctaatgctgacgtgcagtccattgctgtagctgactttttcccaggtcatgagtctcgggctacagaagctttgtgctgggcagaaggacagcgactctttagtgctgggctcaatggcgagattatggagtatgatttacaggcgttaaacatcaagtatgctatggatgcctttggaggacctatttggagcatggctgccagccccagtggctctcaacttttggttggttgtgaagatggatctgtgaaactatttcaaattaccccagacaaaatccagtttgaaagaaattttgatcggcagaaaagtcgcatcctgagtctcagctggcatccctctggtacccacattgcagctggttccatagactacattagtgtgtttgatgtcaaatcaggcagcgctgttcataagatgattgtggacaggcagtatatgggcgtgtctaagcggaagtgcatcgtgtggggtgtcgccttcttgtccgatggcactatcataagtgtggactctgctgggaaggtgcagttctgggactcagccactgggacgcttgtgaagagccatctcatcgctaatgctgacgtgcagtccattgctgtagctgaccaaagaagacagtttcgtggtgggcacagccgagggaacagtcttccattttcagctggtccctgtgacatctaacagcagttgagaagcagtgggtgcggacaaaaccgttccagcatcacactcatgacgtgcgcactgtgggcccacagcccaacagcgctgatatctgggaggcactgacacccacttagtctttcgtcctcg

SEQ ID NO: 130383 - DNA, 1059 bp, Homo sapiens
aggtggtggtcccatgggccctggatctggacctaacctgagagccggtgttctgttaacctctgggaatggtcctcccaatcctaggccagttggcctgggcccaggaccaaaccccaatctgagatcaggctttttagggacaaaccctgcccccaggtcaggtgtgtttccaggcccaggccttgggcccaacccaagaccaagtggcctgggcccaggccctaatctagatgccagagcaggtggcctcttgggcacaggatctggtcttaacttaagaatggctggacctcaaggcctcgatcttgcccccattctaagagcagcaggtcttttaggagcaaattcagcttctttctcacaggcttctggaaacatgggcacaagcccatcctccatggcaagagtacctggccccatgggcccaaactcgggtcctagctctcggggaattggccttccagggccaaatccatctcccatgtcaagggctcctggccccataggccctaattcagctcatttctcaaggccagttggccccatgggggtaaatgccaatccctttcccaggggagcaggttcatctgccattttctcgagtcttctggcacgattggcatcaaacccagctaccttccaaaggtccgctggcctccagggctcaaatccaaccattttcccaagagcctctgggccacttggccccaacccagctaacttcccaagggccactggcctgcagggtccaagtccaactaccttcccaaggtctactggcccattaggccctggtcaagttactttccccaggccagctgccgggcatctgggcccttctccagctggccctgtgggtatcaacccagctcctttcacaaggccaactgggaccctgggtctcaacccagcttcctttccaaggatgaatggccctgcaggcaagagtttcgtcccatttcctagagtggggagcctccctggcacaaacccagctgctttccccagaccagggggtccaatggctgcaatgtacccaaatggaatgttgccccc

SEQ ID NO: 130384 - DNA, 1540 bp, Homo sapiens
atgattgtggacaggcagtatatgggcgtgtctaagcggaagtgcatcgtgtggggtgtcgccttcttgtccgatggcactatcataagtgtggactctgctgggaaggtgcagttctgggactcagccactgggacgcttgtgaagagccatctcatcgctaatgctgacgtgcagtccattgctgtagctgacgaccctgactcaaatcctgggacaacttgttttcacttgctttttaaagacagaaagctcatggtgcaaattgttatttccagtgcgagggctggaggcctggcagaatgggtgctgatggagctacagggggagatcgaggctcgcctacagcactggattagctggaaacctcctgggagacctacattacaccactgaggaatctcgttcttgttctgccaaagggaatccctgtgctgatcgtggggcatcatatcctgtatggggaaaagtcaattcccacctgggagaaaccttttgcagtccttgtcaaacacactcctgggggatcaggactgtgatgaagcttggccgcgagactgggcacccggtacctggggtgacagcacttcattcaaaggacaagatcctttttcaaaacccgccccaagcccatttattcaccagcgtccccaagaaagtatgaaagagctcggattttcctgggtgtgaactcggatcccttccttatggcggctggttttcttggtggaaatctggccccatttccaaggaactcatctccttttccagcttcatcaggctcattggcttcaaatccagcacctttcccggctggtgctcgtgacccaagcatggcttcttttccaagagggatgaatcccactggcacaggtgcagtttctttcccaaggcctggtggcttcttggggccaggcccgggacgaggccccaccctaaaccctaggacaggggctcttccaggcctggggcctctgtctaatcccaggttagggggtctcccaggaccaggtcctatatccaacctaagggcaggtagtctcctgggagcaggtcctgaccccagaagtggtggtcccatgggccctggatctggacctaacctgagagcaggtgttctgttgacttctgggaatggtcctcccaatccttggccagttggcctgggcccaggaccaaaccccaatctgagatcaggctttttagggacaaaccctgcccccacgttaggtgtgtttccaagaccaagtggcctgggcctgggccgtaatctagatgccagagcaggtggcctcttgggcacaggacctggtcttaagaatagctggacctcaaggcctcgatcttttccccattctaagagcggcaggtcttttaggagcaaattcagcttgtcacaggcttctggaaacatgggcacaagcccgtcttccatggcaagagtacctggccccatgggtccaaacttgggtcctggccctcgggaaattggccttccagggccaaatccatctcccatgtcaagggctcctggccccat

SEQ ID NO: 130385 - DNA, 723 bp, Homo sapiens
atgttgctagagaagatatgtccgcaacagcagaatggcaaagcagaagggcacagagtagtaacagggatattggcctatagttttattattattgttattcattttgtgtttgccaggtttcggtaccaggataatgctggcttcatagactgcattcaaaagtacaactaccccacctccaagcagatctccaggcattcagagcacatgcttgcccgaaccagcagcctgacccaccccactcttcctgtgcagagatcctgtttgggctccaaattcacaagtgacaaaaaattacttgggactgagacagagctggatgataggcctaacaatatatataacttgttcagtgttgctggacaaaggggtcttgatccagaccctgagatagggttctttgatcttgcacaggaaggaatgcaaggcaagtcacagagttcgggtattccaacagacctgcagctgagggtcctgtctgttagaaggaaaactaacagaaaggacatccacaccagaaacccatctgtacatcaccatcatcaaagaccaaaagtagataaaaccacaaagatggggaaaaaacagaacagaaaaactggaaactctaaaacgcagagcgcctctcctcctccaaaggaacacagttcctcaccagcaacggaacaaagctggatggagaatgactttgacgagctgagagaagaaggcttcagatga

SEQ ID NO: 130386 - DNA, 480 bp, Homo sapiens
atgggactgtcgtgccctcggcattgtggagcactgggtggatggaaggtaccactggccagggagggccagaagctgcgtctgcaccagcgacactacatcgacaagctggtggaggacacggagcactggcccaaagaaaatctggagatcatcttcacacagtctgtggagacacttggagtctggggtgacctgatctcagtaaagaaatctgtggatcggaatcaactcctttctcagagactggctgcatatgcatcacctgaaaacaagaagctgtttgaagaggagaaattgctgagaccaggaggaaagttacagaagatccagaccaaggcaggtgaggcaacagtgacatttctgaaaagctgtcacctggaggtagggatgaagaacagtgtcaaacgggagctgaaccctgaaacagttgcctgccacttcttcaagaatcttggtggtgtggtcacccccatataa

SEQ ID NO: 130387 - DNA, 543 bp, Homo sapiens
atggcgtcccagatataccagtttccaacggatgatgacactattgctaaggtcaacgctgcaatgaatggacagttgccgtttgctgttgtgggaagtatggatgagataaaagtcggaaacaagatggttaaagctcgccagtacctttggggtgttgtacagacccataccaggcactatgagctttacaggcgctgcaaactggaggaaatgggctttacagatgtgggcccagaaaacaagccggtcagtcttcaagagacctatgaagccaaaagacatgagttccatggtgaacgtcagaggaaggaagaagaaatgaaacagatgtttgtgcagccagtgaaggagaaagaagccatattgaaagaagctgagagaaagctacaggccaaatttgaggaccttaagagacttcaccaagaagagagaatgaagcttgaagaacaaagaagactttgggattctttagagcgcaaggcaggttgcaacctaaccattttcgttttacaagaaaataaggtccttccggaaaattag

SEQ ID NO: 130388 - DNA, 264 bp, Homo sapiens
atgaactgcaaagagggaactgacagcagctgcggctgcaggggcaacgacgagaagaagatgttgaagtgtgtggtggtgggggacggtgccgtggggaaaacctgcctgctgatgagctacgccaacgacgccttcccagaggaatacgtgcccactgtgtttgaccactatgcagggatgactcaacgcgtcccaacaacctttagagctttcacagcttaccatggaagaattgcatttcttcccccatcctatctttag

SEQ ID NO: 130389 - DNA, 2178 bp, Homo sapiens
ttaattgaaataaaaatgttcttgggtttctccccagccagtgatgaaacattcggtccggtcagcgaccacataatttggggatggcagacaagctgggattactttgtcagtgatgacggcaggactgcttagctttagcaaggcaatatcttttcgtgtgggctccaagaacagcctagacacttctatttcctgaacatgcggttcgagattcacttcttggtgtgcacccaggatgaccttgtaggatgaaggccttggggaccttgttctaagactgacttgccagggccaggaatgtgggtgggccacacacccccctacaacccttccaggacatttcttcggctccacttgaggcttcccacaatcaaatgaaggggccgcacactgagggacatcacagtagtcgtaaagttttcttggatttgtcgtgtagcaccagggaccacctacatcaccatcagggttacggcagtaatttttttccagacccgcccgtggatttgtctctggagtgaaaatgctgtgtctatggggctcctgggcagcccagtcctggcatggcgtcccagtaacagtggtcgccctcttgcctcggtatcctttcccattcccaaacatacagtcttcttcggaaggagtctctacatctggaagcaggacaacaggcggaggtgctacaacactcgcttctgttcctgagcattttttcaggttgcagtactcccacctgacgctggggtctgtggtaaaacaccaggggcctttatcggcatctggattcctgcagtagttcattgtcaggccagcatttgggtagttttctggggtcttctggtgccggtgtggtgtcatagatgaccaagactgacacttctttcctgtggtggtggtggaggatgtgcctcggtagctctgtccatcaccatggtagcagtcctggaccacaggggttagctcaggtggtgctgtgggagccaattgttccgtggatactggggaggagtcacaggacggtatcttacagtactcccaccgcacttggctgttggttgtatggcaccatggggccctttttccgtcaggattgcggcagtagttttcatccaaatttttgcaggggaagttttctggtgtcctgttatgtgtgtgaggggtctgtgcactccagtgctgacaggtgtgcccggacacggtaacagccacattcccgcgatagttttcacctgttcccttcagacactggtaggtgggaccagaagatggtggaggtgttgtgcagcgggggatgtcacaaagttcccagcgcttgttggggtcggtggtgaaacaccaaggccgcagctccctatcggggttacgacagtaattcttcttcaggttcttgtttggaaatttggaaggaatgtatccatgagcgtgtgggctctgagagtcccaggcctggcattccagtccagacatggtcttggaaattttgccgtcatagttttctccactgcaatgcatacattcctcttcacactcaagaatgtcgcagtagtcatatctcttttctggatcagtagtatagcaccagggcccctgcggatcgttgtctggattcctgcagtagttctcctccagtccctctgaggggtgtgtagcaggtgagaatctaggtctgtggggagaagtggaactccatttttgacaggtgatgccattttttgttttggacatcgtccctctgtagttctttccattcccagtcttgcactctgagagatacactttcttttcaaataaaactacatctctcatcctaatgattatggaggacttcctgttttcagccattatcacacattgttgctctttactgtgatattggaatgccctgcaggtgaattcttcgtcctcctcacattttgctgcacattcttctatacttcctgctcccagctgcttcttagtgacactgaacagtgaagccccctgggtattcacatagtcatccagaggctctccttgaccttcataatccatcagcatcgtgaaagcacagagggacgttgagcagagctctgtgctggcgccaccgcactctgtagcctgtaagagagcagcaaagaggaatgtgttgctcaggtatagacgggggtgggtgcatagagacttccgctgcggcat

SEQ ID NO: 130390 - DNA, 820 bp, Homo sapiens; identical to SEQ ID NO: 115995

SEQ ID NO: 130391 - DNA, 1401 bp, Homo sapiens
atgcaggggcgccagggtgggagccgcagcgggcccgtggccgcccggaggacactgattcttctggagcgaaggcgagggtccaaggcgggaccggaccaaggcagcctgcgctccgcggaggcgcgggcgcgaccccgctctgtccagacgctggctcccggactgatcctcagtcctgccgtcatcactgacaaagtaatcccagcttgtctgccatccccaaattatgtggtcgccgaccagactgaatgttacatcactgactggggagaaacccaagagatgacatctctatgtcggccactggatggcagcacctactcgcagaccacatcaactttcctggcaacttgcggtacctttggggctggctttctcaaggaagcccagctccctgtgattgagaatgaagtgtgcaatcgctatgagtttctgaatggaagagtcaaatccactgagctctgtgctgggcatttggctggaggcattgacagttgcaagaagcagatactgagccacaaatctgctaagattgccctgaatgagagttttaactcctgtagagaaagagttgaaattgtgaaaaaacagagacaagctgttatcatgcgagtagctgatctgcaacaagaggtgcatgcacagccttgccaggtgtttactgttaaagtgagggcattgactggaaaaaaatgggaccctggaacttggagtggggatgtgtgggagaaccctgatgaagctgaggacactgagtttgtgaactctgatgaaacttttttgccagaagaaacagtttccccatccccagtagtgaggacagatggatcttggaaaatgatggtggattattttaagcttaaccaagtggtgactccaattgcagctgctctaccagttgtggttttgttgcttgagcaaattaacacatctcctggtgcctggtatgcagccattggcttggcaagtggctttttctccattcctgtccataagacccaccagaagcaatttgccttcagctggcaaggccagcaatatacctttactgtcctacctcaggggtatatcagctctctggctttgtgtcataatcttattcgaagagaccttgatggctttttgcttctgcaaaatatcacactgctggtccattatgttgatgacattatgctgattggatccagtgagcaagaagtagcaaatgcactggacttattggtgttttctgaccatctagccataaagtgggtcatgcacagcagcattgcatcatcaagtggaagtggtatatgcgtgatcaggctcaagaaggtcctgaaggcacaacctgcaccaatggcctcatggggggttctctatgatcagttgacagaagaagagaagattagggcctag

SEQ ID NO: 130392 - DNA, 2756 bp, Homo sapiens
gaagaccaaaaccaaaatttactcaaatcaaagttaagtacagagtttatttttaacaaatgtcatagctatgtcaccttactacagaatccagcagtcagaaaataacacaaaaaatgccgaggtttggcgtacgtggtagctggggacagtgtcttcgtttgattactgccagttatttccagcatgctaaatcccctaccccacgttcccagcctcctaggtgagtcagtgcgtcactctgtctcccgtcccaattaattaatttctccatcaactcccctcaatcccaagtaaacaaaccttggaaacacgaacataagaacacccaggcttattggggcgtgcacagccaagaccccaagaagtgactccttgtaaaatgtatttgtccttctcgaagcaaaccagaggacctccactgtcaccctggcaactgtcagtgcctccggccaaatgccccagcacagagttcggtggattggactcttcccattcagaaactcatagcgattgcacactttattctcaatcacagggagctgggcttccttgagaaggccagctccaaaagtaccttgggtttctccccagccagtgatgaaacattcggtccggtcagcgaccacataatttggggatggcagacaagctgggattactttgtcagtgatgacggcaggactgcttagctttagcaaggcaatatcttttcgtgtgggctccaagaacagcctagacacttctatttcctgaacatgcggttcgagattcacttcttggtgtgcacccaggatgaccttgtaggatgaaggccttggggacttctccaagcagtgggcagcagtcaacacccactctggggatatcaaggtgcctccacagaagtgcattccaaaccttgttctaagactgacttgccagggccaggaatgtgggtgggccacacacccccccacaacccttccaggacatttcttcggctccacttgaggcttcccacaatcaaatgaaggggccgcacactgagggacatcacagtagtcgtaaagttttcttggatttgtcgtgtagcaccagggaccacctacatcaccatcagggttacggcagtaatttttttccagacccgcccgtggatttgtctctggagtgaaaatgctgtgtctatggggctcctgggcagcccagtcctggcatggcgtcccagtaacagtggtcgccctcttgcctcggtatcctttcccattcccaaacatacagtcttcttcggaaggagtctctacatctggaagcaggacaacaggcggaggtgctacaacactcgcttctgttcctgagcattttttcaggttgcagtactcccacctgacgctggggtctgtggtaaaacaccaggggcctttatcggcatctggattcctgcagtagttcattgtcaggccagcatttgggtagttttctggggtcttctggtgccggtgtggtgtcatagatgaccaagactgacacttctttcctgtggtggtggtggaggatgtgcctcggtagctctgtccatcaccatggtagcagtcctggaccacaggggttagctcaggtggtgctgtgggagccaattgttccgtggatactggggaggagtcacaggacggtatcttacagtactcccaccgcacttggctgttggttgtatggcaccatggggccctttttccgtcaggattgcggcagtagttttcatccaaatttttgcaggggaagttttctggtgtcctgttatgtgtgtgaggggtctgtgcactccagtgctgacaggtgtgcccggaaacggtaacagccacattcccgcgatagttttcacctgttcccttcagacactggtaggtgggaccagaagatggtggaggtgttgtgcagcgggggatgtcgcaaagttcccagcgcttgttggggtcggtggtgaaacaccaaggccgcagctccctatcggggttacgacagtaattcttcttcaggttcttgtttggaaatttggaaggaatgtatccatgagcgtgtgggctctgagagtcccaggcctggcattccagtccagacatggtcttggaaattttgccgtcatagttttctccactgcaatgcatacattcctcttcacactcaagaatgtcgcagtagtcatatctcttttctggatcagtagtatagcaccagggcccctgcggatcgttgtctggattcctgcagtagttctcctccagtccctctgaggggtgtgtagcaggtgagaatctaggtctgtggggagaagtggaactccatttttgacaggtgatgccattttttgttttggacatcgtccctctgtagttctttccattcccagtcttgcactctgagagatacactttcttttcaaataaaactacatctctcatcctaatgattatggaggacttcctgttttcagccattatcacacattgttgctctttactgtgatattggaatgccctgcaggtgaattcttcgtcctcctcacattttgctgcacattcttctatacttcctgctcccagctgcttcttagtgacactgaacagtgaagccccctgggtattcacatagtcatccagaggctctccttgacctgatttcagaaataaaagaagtagaagaaccacttccttatgttccattttgggactggccagcagtgcccagaaagtgggtcccaatcccaggatgttgtt

SEQ ID NO: 130393 - DNA, 448 bp, Homo sapiens
  misc_feature (1)...(448): n = a,t,c or g
tgtgagtactgcccgagttcacccaggngaaccaaacagccatgtannnnnnnnnnnnnnnnnnnnnnnnnnnnnnnnnnnnnnnnnnnnnnnnntttggtgccctgactcggatcgggggacctcccttgggagatcaatcccctgtcctcctgttctttgctccctgagaaagatccacctatgacttcaggtcctcagactgaccagcccaaggaacatctcaccaattttaaatcagcggccaggcgttcctccagaacctcctcccacaggaacttgctacacgtgctggaaatctggcaactggaccaaggaatgcccgcagcccgggattcctaagccgcatcccatctgtgtgggaccccacggaaaatcggactgttcaactcacctggcagccactcccagagcccctggaactctgcccaaggctctctgactcctt

SEQ ID NO: 130394 - DNA, 303 bp, Homo sapiens
atggctgacagggacgacctggtgacccgttcgatgacgcgcgtgatatttggtgccgtgactcggatcgggggacctaccttggagatcaatcccttgtcctcctgctctttgctccatgagaaagatccacctatgaccttgggtcctcagaccaaccagcccaaggaacatctcaccaattttaaattggataactcaaatgctcagctgccgttccgcaactctataccaattacccatgatccttccgcacttctggctctcccttttgcaaatgagaagacatttttcttctcctga

SEQ ID NO: 130395 - DNA, 903 bp, Homo sapiens
atgctcacagaaggctttttggccttcttggggtcaagcctaactgccacatctttaagtgctgtgtctattggagaaagcagttggatccagtgtcatacaagtctttggggatgtaaaggtggccaagaaagagcccctggtgaggtggaagagccttggtgggccaaggccaaggcaggcatcacctttggctgtcacctggccaaacaagagatggggcagacccctgtggcacagacagccccaaaggatgtgagtccccagagtacagatgatccttattcacaatcgggggacctccctcgggagatcaatcccctgtcctcctgctatttgctccatgagaaagatccacctacgacatcgaatcctcagaccaaccagcccaaggaacatctcaccaattttaaatcagtgcgactcatcccaaacctttcttctttccctcccacctgtccccacagtcccaaccccaagcgttgctttcaatcttccttttctaccgacccatctgacctctcccttcatcccaagattgctcctcctcaggtgtacaataatagagaagagttgcaattacttgcctcttctctgagagaaagcctagccacatctccagcacacaagaacttcaaaatgcctaaaccacagtggccaggtgttccttcaggacttcatccctcaggatcttgcttcacgtgctggaaatctggccactgggccaaggaatgcctgtggcccgggatccctcctaagctgtatcccatctatgagggactccactggaaatcggactgtccaactcacctggcaaccactcccagagcccctggaactctggcccaagactctctgactgactccttcccagatcttctcagcttagcagctgaagactga

SEQ ID NO: 130396 - DNA, 890 bp, Homo sapiens
atggtcaaccccaaattctttgccagtgaaaagattactcaagaacacaatgataaagactttttcagacatacaaagttaaaagaagttactaacagcagatctacactacacttgacgccagcacatcttagagtctcactcaaggcccatactgtgtactacctggctaccactgttgattattcaggacccaaggactcttcagtcagcagccatgttgctcacacaaagcctgtttggtggtatcttcacacggacgcgcatgaaatttggtgccgtgacttggatcgggggacctcccttgggagatcaatcccctgtcctcctgttctttgctccgtgagaaagatccacctacgacctcaggtcctcagacccaccagcccaaggaacatctcaccaattttaaatcgggtgtcagaccacgcagggacgcctgccttggtccttcacccttagcggcaagtcccgcttttctggggaaggggcaagtaccccaaccccttatatctctgtgccccgatcccttatttccgcaccccaacctcatatctctgcgccccaatcccttatgtccgcaccccgacctcgtatctctgtgccctgacccctttcccgcttttctggaggcacataagaacttccaaacgcctgaaccgcagcagcccggcattccaccagaacctcctcccccaggagcttgctacaagtgccagaaatctgaccaccaggccaaggaatgcctgcagcccaggattcctcctaagccatgtcccatctgtgcgggaccccactggaaatcagactgttcaactcacctggcagccactcccagagcccctggaactctggccgaaggctctctgactgactccttctcggcttag

SEQ ID NO: 130397 - DNA, 528 bp, Homo sapiens
atggggggaaaaaaggaaaagaaaaaagaaaagcgttttaatccaaagaagagcttggagaagtcgaagaccatgatgtgtgcatggaacagtgagatggtcatggagagggaagcactggaagtggccggggcagagatagaatttggagttgtgtacagttgtgtggaagacaagaggtacactgtcaggaaaggaaaaggtgccttttataatggtcaaaaactacaggtttcacaagaagaactgaaggaagcggggcttcttggcgcttctgaagggagaaagctgcacaaggatgccgccaggaatgctcgcacctcctaccgggatggcctgcgtaagacggggcggtctctgtgcggaaaaggtcctctgagagcaggtcaaggtggccacgcatatcctaaagaatggttgtggtgggctagactgctgtcaatggcagctggcgaggtggccaactcagctgcatatgggtttgcaccggccacactggtgactccactaggaactctcagcgtccta

SEQ ID NO: 130398 - DNA, 2299 bp, Homo sapiens
cgacggtatcgataagcttgatatcgaattccctccgactcaagatatttgtcaaatattttcagaagatggctgatccttggcaggaatgcatggattatgcagtaactctagcaagacaagctggagaggtagtttgtgaagctataaaaaatgaaatgaatgttatgctgaaaagttctccagttgatttggtaactgctacggaccaaaaagttgaaaaaatgcttatctcttccataaaggaaaagtatccatctcacagtttcattggtgaagaatctgtggcagctggggaaaaaagtatcttaaccgacaaccccacatggatcattgaccctattgatggaacaactaactttgtacatagatttccttttgtagctgtttcaattggctttgctgtaaataaaaagatagaatttggagttgtgtacagttgtgtggaaggcaagatgtacactgccagaaaaggaaaaggtgccttttgtaatggtcaaaaactacaagtttcacaacaagaagatattaccaaatctctcttggtgactgagttgggctcttccagaacaccagagactgtgagaatggttctttctaatatggaaaagcttttttgcattcctgttcatgggatccggagtgttggaacagcagctgttaatatgtgccttgtggcaactggcggagcagatgcatattatgaaatgggaattcactgctgggatgttgcaggagctggcattattgttactgaagctggtggcgtgctaatggatgttacaggtggaccatttgatttgatgtcacgaagagtaattgctgcaaataatagaatattagcagaaaggatagctaaagaaattcaggttatacctttgcagcgagacgacgaagattaattaaggcagcctcatagtcaatcccagttgcttttccccagatttggtgactcatcaatggatatgtgttttggatgtatgatatgcttggtttaaattctctttgtccaggtcaaaaatttggaacttgtttcttattttactatgtctaggtttgcaagaattgacataatgtttgtttcactgatttaaaaaattttgcatgtaagaatgtactttaggaaacatacccaggaagtacagttgataaatataacatcaactgaaatagtcaattagcaattttgtgtttctaaatatctatggtcccctgaaattttgacttagtatataggtgcagagacacccacttagaaagttaactgtttggaaaaacatttctctttagtttcaaaaaccatatataattaaatttgtaaggatatactgagtaccctaggccaacttttttttctttgcagagaaccttttttgttttattcttcagtgttcatatagcacctggcccattacatatctaggcaactaaaaacaaacattgtaagaatgaatatttttaatgtagtaattcctagttacaatagatacataaagtaatgaactcagcattctgtacttttgcttcaggtttgaagtaaaaattatctagttaaattttttttatttcacgttaccatgccatttcacattaccataccatcagatagcatggcttattgtgggcatttctgcagtgaatacattttccaaaacagttaaattgtctgtttggatttgctttaaagtcttgtgtaagagagaagaaactatttctataataaaaagcactctcatcagatatctgacataattagatacaatataacattttactaagttcagtattcatgttttaaaggtgtttatactgatttgattgtgctggcaaatatactgtattgttaatattgaactatttatttttctcttagtcttcttatttaattaacttcattgccgctggattctgttcagcctttaaaaatatttcttagtggtcattgctctgcagaactcaaaaagaaaattgtacttgttcatagacatttttaaagggttaatttattgttcagccttatcccttggcacgtaaacagactactagacttattgtaggttcgtttgagctttgtgttgtaaaattaaaaatgcttctataaagttttcaaggtagggagtgattttattattgtgtatatctaatatattaagtatgtgtgatactaaggtttgactgctataattatttgtactgttgatcacatgtacttaaaacatctgatactgtattctaagacaggttgtttttgcaattaaatttattttaataagacgatcatgaataaaactttaaattg

SEQ ID NO: 130399 - DNA, 687 bp, Homo sapiens
atgctgctagatgcgaccaacagcatgcagctgcactgcccggtgtcgggaacacgggtctggctgagagaaaatggccagcattttccaagtactgtaaattcctgtgcagaaggcatcgtcgtcttccggacagactatggtcaggaccccttctgggacattggatgtaatcgtcatgctccttctttgatagccttgacggttttgagaaatgctggtcaggaagcctctcacctcctgaggaccaatggcacctttaccaattggttgaccaatcatgagcacctttttaatatagcccgaggccctcccacacctgtgaactgtcagcgcagcattctctctagcaacatcctcgaccgctgctcacccagcgtctgcgcctatatccagtgctaccaggcctgttgctttgccagcaacaccaatgcatcctctggcttcggcattcacatacattacctcctctcagaggccctcgctggcctgctgggcgcccctcctccgtcagtcagcttgctgcatgtacctttgtccccagcacacaaggtggtgcccagcaaagaaggcaggaaggaggatttccaacaacccaagaacctggtgaacttcagtataaactccacccatctggaaactttgccagaagagcgtatttgtctcttaccagccctgccctattaa

SEQ ID NO: 130400 - DNA, 1030 bp, Homo sapiens
gccatacgaccccccatatccaatggtgattgaggtgtcagtggcagataggcatgctgtttggagcctttggcaggcccccataggtgaatcacatcagaggcctctaggattttggaacaaggccctgccatcttctgcagataactactctccttttgagagacagctcttggcctgttactgggctttggtggaaattgaacgtttgattatacccaatggtttggctggatggtcagggacttggaagaagcatgactggaaaattggtgacaaagaaatttggggaagaggtgtatggatgaaactctctgagtggtcaacaactgtgaagatatttgtattccatgtgagtgctcaccaatgggtgacctcagcagaggaggattttaataatcaagtggataggatgacctgttctgtggacaccattcagcctctttccccagccacccctgtcatcgcccagtgggcccacgaacaaaggggccatagtggcacagatggaggttatggatgggctcagcaacatggacttccactcaccaaggctgacctggctatggccactgctaagtgcccaatttgccagcacttatgggggaatggccttttgaagtcacaattacaacgtaaacaaggtaacaatagtttgcagggctggggcaaagttctccagacggccgtgaatgctctgaatcagcatgcaatatatggtactctttctcccatagccagaattcatgggtccaggcatcaagggttggatgtagaagtggctccactcaccatcatccctagtgatccactagcaaaatttttgcttcctgttcctgcaacattacgttctgttgacctagaggtcttagttccagagacaggaatgctgccaccaggagacacaacaatgattccattaaactggaagttaaggttgctacctggacactttgggctccttctacctttaactcaacaggctaagaagggagttacagtgttggctggggtgattgacccagactaa

SEQ ID NO: 130401 - DNA, 338 bp, Homo sapiens; identical to SEQ ID NO: 118590

SEQ ID NO: 130402 - DNA, 392 bp, Homo sapiens
gggaactgtgtactggggaaagggaaatgatcagacatttcagggactactggacactggctctgagctgacgttgattccaggggacccaaaacatcattgtggtcctccaggaccaaaagtaagggcttatggagatcaggtaattaacggagttttggctcaggtccaacttatagtgggtccagtgggcccctggactcatcctgtggtcatttccccagtgccagaatgcgtaattggcatagccatacttaacagctggcagaacccccacattggctccctgactggtagggtgagggctgcagacttgagccagtttatagactcagaaccctttgaatggagtggcagtcgggtcttcttgaggaaggacctggtacgctacc

SEQ ID NO: 130403 - DNA, 2187 bp, Homo sapiens
tccaagtcccaaaactgaagaaccctgactaatacagattttggtattgggagtggttctagaggaacagaatattaaggatggagttcttttgttggttttggggtttctgaagttggctgcttaatatgattagaccccaaaatgctaaggactctacttctaatagtatggagaacacggataatccttggcatgaactgtttagagagttatgcaaaataaatgcatttgacacttctgattcattgcacatgagaggcgaggagtttagtgactctatacataatgcctttgcgcatatgtggagaaccaaggaacatagtgaagctggttggttgctcctaaattctgtagacaaagtgatgaaagaaaatgatgaacttagggattctatctcctggcttcagaagcagatactgagcctcagatctgctaagattgccctgagtgagagtcttatcagctgtagagaaagagttgaaattgtggaaaaacagacacaagctcttatcatgcgagtggctgacctgcaacaaaaggtgcatgcacagcctcaccatgcacagcctcgccaagtatctactgttaaagtgagggcactgattggaaaagaatgggaccctgcaacttggaatggggatgtgtgggaggaccctgatgaagctggggatactgagtttgtaaactctgatgaactttttttgccagaagagacagcttccccatccccagtagtggcaacatccactccccaacccatgctgccatcagcctttccacctttgaattaaggtgattaaccatacactgcctgaggcaacagtgatggcctctcttgaggcagttgccaggcaagataatgctgattctcctcaggaactacccccaacacccctgtttgcttctagacctacaactagactaaagtcccggtgggcccctagagggccagaatgcataattggcatagacatacttagcagcggacagaacccccacattggctccctgactggtagggtgagggctattatggtgggaaaggccaaacggaagccattagagctgcctctacctagaaaaatattaaatcaaaaacaatatcgcatagctggagggattgaggagattagtgccaccatcaaggacctgaaagacgcaggggtggtgattcctaccacatccctgttcgactctcccatttggcctgtgcagaagacagatggatcttggagaatgacagtggattatcgtcagattaatcaagtggcaactccaattgcagctgctataccagatgtggcttcattgcttaagcaaattaacacatctcctgacacctggccatacgaccccccatatccaatggtgattgaggtgtcagtggcagataggcatgctgtttggagcctttggcaggcccccataggtgaatcacatcagaggcctctaggattttggaacaaggccctgccatcttctgcagataactactctccttttgagagacagctcttggcctgttactgggctttggtggaaattgaacgtttgattatgggtcatcaagtcaccatgcagtctgaactgcctatcatgaactgggtgatttctgacccatctagttataaaaaatggccagatgtgcaattatatactgattcatgggctgtagccaatggtttggctggatggtcagggacttggaagaagcatgattggaaaattggtgacaaagaaatttggggaagaggcatgtggatggagctctctgagtggtcaaaaactgtgaaggtatttgtatcccatgtgagtgctcaccaacgggtgacctctgcagaggaggattttaataatcaagtggacccggtgacccattctgtggacaccactcagcctctttccccagccacctctgtcatcgcccaatggatccatgaacaaagtggccatggtggcagggatggaggttactcatgggctcagcaacatggacttccattcaccaaggctgacctggctatggccactgctgagtgcccaatttgtcagcagaagagacccacactgagccctccatatggcaccattccttggggtgatcagccagctacctggtggcagattgattatattggacctcttttatcatggaaagagcagaggtttttcctccctggatag

SEQ ID NO: 130404 - DNA, 890 bp, Homo sapiens
cggcacgaggtaaaatccatttccttacttgttcattttagtcttggacagagaggggaacattcttgcctttggatcggaggagggccagtagaggtttaagcaaagactccccaggaggtgtagacatgtagaaaaagagccttttgttactactgcagatatctgacccttcgttagccagtcagagtatgctggcagagcccaattataggctcctgaagaggacgtgggaagagaagaaaggggggaagtggtttctctctggaaattcccattttcctgcaagagagttcatggatattcctttccgaagtggtggaaacagcattgaatccagattccttcttttcagctgtgggaatgacatcttctcaggcagtcttgagaatcaaaagaacaaagaattagcaatgcccgaaaccgaatcacttgatagaagatatcaaggctctaagccctcttctaaagagaagctgctcagcctggacccccagggcacctcccaaaaagctcaccagtcattctccagcgatagtatttgtcacacactggcatttcctacactcctactgaccacatctccagggactgctgggagcccactgaccaagctcccgaagatcaaggagaatgaatattggataaaaatcgggtaccactctggttcctctgcttttctgcctgccatgttctgtggtatcaagttgagcctaaaggaagagtcctcttctgccatggccccagtacccctggatcttacctcccttgaagaatcactggatggcatttcaggatacccagccatcatcaccaccatcactgccactaccatcatcactgtcttcattatcatcatcattatgatcatcacagttcacatgtactga

SEQ ID NO: 130405 - DNA, 606 bp, Homo sapiens
tcaaaagagccctgctaggtctgttcgtgatatcactagaaaactaagggtcacaaactctagaaagagaaagagccaggatttgaagactactaaagcctgcattgtttctgctttcgctgaagcttccagttgaccactgatttcaatcttctctttcagcttttccccagaggtagcataataagcatagtaaatggggcccctaactgcaaaagagagaagataggcttcagtggaatacctaaatgcaaactcaagaagcttgcagcgatggtattgagcttgaatatgtaatcttctgttagcttgtttaattaatcggtcattttgcgttagaatctcatggatgtatagcagagttaccatgctttgaatgagaatgatggtcacacactgatcctgcagtaatctaggcagattcatttctaacaagtccccaagtgagttgatgctgctggtctgagaaccacactgcagagaggctttggggaattctggccagtggatctcgtttcgctgggcaccttcctgctgctgcctctttggtttacacagttgccttccatctccccttgtgtcccgagtctggaactcagagtccat

SEQ ID NO: 130406 - DNA, 1962 bp, Homo sapiens
tcattgccttgagggtgcttgggcaggaatcaggcctgatgggcaccctgggcactggccatagaggccacagctgtagccccagccacagcggcaggtgggaccatccagcacttccccagatgcttggcctgcatgagggacattaaaagcattgcagcttgatcctgaagatagatccataaaactgtagcctctacagaggtgtggatctagggtgactgctgggcactggcttctgccagctggcctctgggctgtgtggctacttttcccaccctttggtccttctgaacccagggcctttgcttggcccaagacctccaccctggtcagctgactctcctgcttggtttgggcagagcttagtctgagcagggactcctggcctgagcctgagaggtcgatgttgcagtgagccgtgatcacgccactgtactctagccttttcttgtcgttcaggatatgtctgtggagtttagtcaggggcttcagacagccaccagctggttccgaccccagggcaggccctctgattgtggggtctaggatggtgggagcatgcagaggcaccttccaggccttgaagggagcccccttcctgctgatgtgcttcctttgagttagcagcaaagactcgccaactgttcttactgtcattagtggtgatgtttgcattatctgtgttggattgttgggtctataaagtgcctgtcttgtcagggctgcccactggcctgttgagacctcaggtttgcacacaggtctggctacttggtggttctgggctcccaagggcagcaagagggggagcttcaggatgccatggtctgcagtatttgcttgcatcacatttgctgcagtcccctcgggtttattgatgtggccagagcgaacggtgaccatttccagggtcactgtgggagaagacttcccaaaatgtgagtggaagtggatcgtagtaaaggtttcatctgcattgtcttcatgttgagtgggctcccagatgtggacaagtgtcctcccagatggagggatggtgacacggctccgtggagggtgctcctgccttccctggctgtcttggctgagggctgggtctgtatcctccacagtccccctcgtctgtggccgatgctgcatacttgtcccttgtgcagaagcactggcccagtacacagttcctcctcgaaaggtgtcacaaggatgcatatgagaacgtgtgaccctgctggagaaggtggtccacccctttatcgtgagtctttcccatcgagagaccttggagttgatggagattgggtgtgtaggtgttctgtgctgatgtggacagctgggtggtgagaaggtagcgatgaaggttccataccctgccctcacgctgctcatccgttcgctcagggggcctgtcttggcaggaggcaccatctgaagctccctcggtgcctctgggacctgagccctgctgatgggcagccaggggtgaccagggcagaacctgctgaaggcttcatgggagacacaaagcctgggtggcagcagcagtcctgcaccctgcaacgctgtagaaatgggcacagtgtctttcggttcctgctcctcttcctttgcctccacctggggtccctgctcctctccctgtgcctccccctggggtccctgctcctctccctgtgcctccgcctggggtccctgctcctctccctgtgcctccgcctggggtccctgctcctctccctgtgcctccgcctggggtccctgctcctcttcctgtgcctccacctgctgttccgacctggttacccagtgagggaatggggaagaaacctctcctaccatagcaaggattcctggtggcaacaacgtcctagagctttgcaaagctctcggtctttgacgttgacgaagtcgattcatggaaactgctggaaccctttgacgacttggattgactgtattcat

SEQ ID NO: 130407 - DNA, 1155 bp, Homo sapiens
  misc_feature (1)...(1155): n = a,t,c or g
tttttcgatatgcttcgtgatctgctcaagaacgttgatcttaaagggttcgagcctgatgtacgtattttgcttaccaaatacagcaatagtaatggctctcagtccccgtggatggaggagcaaattcgggatgcctggggaagcatggttctaaaaaatgttgtacgtcgaaacggnataatgaagcgtgcgcctgttattccaaaacatacgctcaatactcaaccggttgaagatacttcgttatcgacaccagctgccccgatggtggattcgttaattgcgcgcgtaggagtaatggctcgcggtaatgccattactttgcctgtatgtggtcgggatgtgaagtttactcttgaagtgctccggggtgatagtgttgagaagacctctcgggtatggtcaggtaatgaacgtgaccaggngctgcttactgaggacgcactggatgatctcatcccttcttttctactgactggtcaacagacaccggctttcggtcgaagagtatctggtgtcatagaaattgccgatgggagtcgccgtcgtaaagctgctgcacttaccgaaagtaattatcgtgttctggttggcgagctggatgatgagcagatggctgcattatccagattgggtaacgattatcgcccaacaagtgcttatgaacgtggtcagcgttatgcaagccgattgcagaatgaatttgctggaaatatttctgcgctggctgatgcggaaaatatttcacgtaagattattacccgctgtatcaacaccgccaaattgcctaaatcagttgttgctcttttttctcaccccggtgaactatctgcccggtcaggtgatgcacttcaaaaagcctttacagataaagaggaattacttaagcagcaggcatctaaccttcatgagcagaaaaaagctggggtgatatttgaagctgaagaagttatcactcttttaacttctgtgcttaaaacgtcatctgcatcaagaactagtttaagctcacgacatcagtttgctcctggagcgacagtattgtataagggcgataaaatggtgcttaacctggacaggtctcgtgttccaactgagtgtatagagaaaattgaggccattcttaaggaacttgaaaagccagcaccctga

SEQ ID NO: 130408 - DNA, 549 bp, Homo sapiens
atgaagcgtgcgcctgttattccaaaacatacgctcaatactcaaccggttgaagatacttcgttatcgacaccagctgccccgatggtggattcgttaattgcgcgcgtaggagtaatggctcgcggtaatgccattactttgcctgtatgtggtcgggatgtgaagtttactcttgaagtgctccggggtgatagtgttgagaagacctctcgggtatggtcaggtaatgaacgtgaccaggagctgcttactgaggacgcactggatgatctcatcccttcttttctactgactggtcaacagacaccggcgttcggtcgaagagtatctggtgtcatagaaattgccgatgggagtcgccgtcgtaaagctgctgcacttaccgaaagtgattatcgtgttctggttggcgagctggatgatgagcagatggctgcattatccagatttggtgcttatgaacgtggtcagcgttatgcaggcgattgcagaatgaatgtgctgggaatacttcctgcgctggctgatgcgggaaaatattcacag

SEQ ID NO: 130409 - DNA, 622 bp, Homo sapiens
atgcttcgtgatctgctcaagaacgttgatcttaaagggttcgagcctgatgtacgtattttgcttaccaaatacagcaatagtaatggctctcagtccccgtggatggaggagcaaattcgggatgcctggggaagcatggttctaaaaaatgttgtacgtgaaacggatgaagttggtaaaggtcagatccggatgagaactgtttttgaacaggccattgatcaacgctcttcaactgataatgaaggtgcgcctgttattccaaaacatacgctcaatactcaaccggttgaagatacttcgttatcgacaccagctgccccgatggtggattcgttaattgcgcgcgtaggagtaatggctcgcggtaatgccattactttgcctgtatgtggtcgggatgtgaagtttactcttgaagtgctccggggtgatagtgttgagaagacctctcgggtatggtcaggtaatgaacgtgaccaggagctgcttactgaggacgcactggatgatctcatcccttcttttctactgactggtcaacagacaccggcgttcggtcgaagagtatctggtgtcatagaaattgccgatgggggatcctctagatccaagaaaa

SEQ ID NO: 130410 - DNA, 350 bp, Homo sapiens
tcatttctgcaatcggcttgcataacgctgaccacgttcataagcacttgttgggcgataatcgttacccaatctggataatgcagccatctgctcatcatccagctcgccaaccagaacacgataatcactttcggtaagtgcagcagctttacgacggcgactcccatcggcaatttctgaccatacccgagaggtcttctcaacactatcaccccggagcacttcaagagtaaacttcacatcccgaccacatacaggcaaagtaatggcattaccgcgagccattactcctacgcgcgcaattaacgaatccaccatcggggcagctggtgtcgataacgaagtat

SEQ ID NO: 130411 - DNA, 801 bp, Homo sapiens
tcagggtgctggcttttcaagttccttaagaatggcctcaattttctctatacactcagttggaacacgagacctgtccaggttaagcaccattttatcgcccttatacaatactgtcgctccaggagcaaactgatgtcgtgagctccccccagttcttgatgcagatgacgtaataagcacagaagttaaaagagtgataacttcttcagcttcaaatatcaccccagcttttttctgctcatgaaggttagatgcctgctgcttaagtaactcctctttatctgtaaaggctttttgaagtgcatcaccacgttcataagcacttgttgggcgataatcgttacccaatctggataatgcagccatctgctcatcatccagctcgccaaccagaacacgataatcactttcggtaagtgcagcagctttacgacggcgactcccatcggcaatttctatgacaccagatactcttcgaccgaacgccggtgtctgttgaccagtcagtagaaaagaagggatgagatcatccagtgcgtcctcagtaagcagctcctggtcacgttcattacctgaccatacccgagaggtcttctcaacactatcaccccggagcacttcaagagtaaacttcacatcccgaccacatacaggcaaagtaatggcattaccgcgagccattactcctacgcgcgcaattaacgaatccaccatcggggcagctggtgtcgataacgaagtatcttcaaccggttgagtattgagcgtatgttttggaataacaggcgcacgcttcat

SEQ ID NO: 130412 - DNA, 381 bp, Homo sapiens
atgaagcgtgagagtgcgattccaaaacatacgctcaatactggggcggttgaagatacttcgttatcgacaccagctgccccgatggtggattcgttaattgcgcgcgtaggagtaatggctcgcgatagaaaggcaggagagtgtcttctgcatgaatatgaagatctggtacccatccgtgatacattgaggctgttccctgggggtcgttaccttccacgagcaaaacacgtagccccttcagagccagatcctgagcaagatgaacagaaactgaggttttgtaaacgccacctttatgggcagcaaccccgatcaccggtggaaatacgttttcaacacgtggcaatcgcgtacccaacacattcacgcatatga

SEQ ID NO: 130413 - DNA, 732 bp, Homo sapiens
cggcataaccaagcctatgcctacagcatccagggtgacggtgccgaggatgacgatgagcgcattgttagatttcatacacggtgcctgacgggggtgagaaaaaagagcaacaactgatttaggcaatttggcggtgttgatacagcgggtaataatcttacgtgaaatattttccgcatcagccagcgcagaaatatttccagcaaattcattctgcaatcggcttgcataacgctgaccacgttcataagcacttgttgggcgataatcgttacccaatctggataatgcagccatctgctcatcatccagctcgccaaccagaacacgataatcactttcggtaagtgcagcagctttacgacggcgactcccatcggcaatttctatgacaccagatactcttcgaccgaacgccggtgtctgttgaccagtcagtagaaaagaagggatgagatcatccagtgcgtcctcagtaagcagctcctggtcacgttcattacctgaccatacccgagaggtcttctcaacactatcaccccggagcacttcaagagtaaacttcacatcccgaccacatacaggcaaagtaatggcattaccgcgagccattactcctacgcgcgcaattaacgaatccaccatcggggcagctggtgtcgataacgaagtatcttcaaccggttgagtattgagcgtatgtttttgaataacaggcgcacgcttcat

SEQ ID NO: 130414 - DNA, 624 bp, Homo sapiens
atgaagcgtgcgcctgttattccaaaacatacgctcaatactcaaccggttgaagatacttcgttatcgacaccagctgccccgatggtggattcgttaattgcgcgcgtaggagtaatggctcgcggtaatgccattactttgcctgtatgtggtcgggatgtgaagtttactcttgaagtgctccggggtgatagtgttgagaagacctctcgggtctggtcaggtaatgaacgtgaccaggagctgcttactgaggacgcactggatgatctcatcccttcttttctactggctgggcaacagacaccggcgttcggtcgaagagtttctggtgtcttagaaattgccgatggagtccccgtcgtaaagctgctgccctcaccgaaagtgattaatcctgttctggtgggcgagcttggtgaggagcagatggttgctttatccaaatggtctggaaccacgggcccactcgtatcggctgtcttgatattagtccgggaccacggtcccactcgcatcggcggtctgattattagactgggaccacgaacccactcgtgtttgcggtctgaaaataggtctggaaccaagatccccttgtatttgtctattaaactataa

SEQ ID NO: 130415 - DNA, 299 bp, Homo sapiens
ggttcgagcctgatgtacgtattttgcttacgaaatacagcaatagtaatggctctcagtccccgtggatggaggagcaaattcgggatgcctggggaagcatggttctaaaaaatgttgtacgtgaaacggatgaagttggtaaagaccccaggcccctgccgtatctgggccatgacgagccctacacatttgacatcaacctctctgttaacctgaaaagtatggttgtaggggggaccgacatgggccaggagcctctgaagcaaatgggtgcctgggggcccttgtccctgaag

SEQ ID NO: 130416 - DNA, 702 bp, Homo sapiens
cccctctgccttccaggggccctgcaatgcgctttcaggcccagcctttcctcacaggccaggctttgttctccatctcggcctgtctgctgcccaccttccctttctctcccctcctgtggctttcaggaacatctctggtttggctcctgtgacctttgacctgctgatgccccttccttggctgcatttcctggagacccacagtatgatcccccctactgctatccagggacacagtgctgggtccctggagagggaatgctcctgctgtctcagaccctctgcctaggggagcaggtgctgctgggggcctggctggtatgggggcccagccgggaccccaggcccctgccgtatctgtgccatgacgagccctacacatttgacatcaacctctctgttaacctgaaaggccctggaaacagattgggagagccgatccccatttccaaggcccatgagcacatttttggaatggtccttatgaacgactggagtggtaattactggagctctgttcctgtaaagatgaccgggaaggagctggggacttggggcaatttcataaaagctgaagattggtgcaggtcaaaaggggcagtaatggcattaccgcgagcggtgactcctacgcgcgcaattaacgaatccaccatcggggcagctggtgtcgataacgaagtatcttcaaccggttga

SEQ ID NO: 130417 - DNA, 1677 bp, Homo sapiens
cagtcgtatggctgctatgtgctgattgttcccacgcctgctgagttgtgtgcctcacctccgcactgcagtttttcgatatgcttcgtgatctggcaagacggttatcttaaagggttcgagccagatgtacgtatttgcctacccaaatccaccaatagtaatgcttctcagtccccgtggaatgaaggagccaaattcgggatggcctgggaaagcatgggttctaaaaaatgttgtacgtgaaacggatgaagtttggtaaaggtcagatccggatgagagctgattttgtgcacggccattgattaacgctcttcaactggtgcctggagaaatgctctttctatttgggaacctgtctgcaatgaaattttcgatcgtctgattaaaccacgctgggagattagatgggggaagcgtgcgcctgttattccaaaacatacgctcaatactcaaccggttgaagatacttcgttatcgacaccagctgccccgatggtggattcgttaattgcgcgcgtaggagtaatggctcgcggtaatgccattactttgcctgtatgtggtcgggatgtgaagtttactcttgaagtgctccgggcgtgatagtgttgagaagaacctctcgggtatggtcaggtaatgaacaagaccggtagcgccattggttatcccgctctggatgatctcatcccttctttttctactgactggtcaaaaaaacaccggcgttcggtcaaaaaagtatttggtgtcataaaaaattgcccatgggaagtgccccgccgtaaaactggttgcacttaccgaaagtgattatcgtgttctggttggcgagctggatgatgagcagatggctgcattatccagattgggtaacgattatgggcccaacaattgcttatgaacgtggtcagcggttttgcaagcccgattgcagaatgaatttgctgggaaatatttcttgcgctggctgatgcggaaaatatttcacgaaagattattacccgctgtatcaacaccgccaaattgcctaaatcagttgttgctcttttttctcaccccggtgaactatctgcccggtcaggtgatgcacttcaaaaagcctttacagataaagaggaattacttaagcagcaggcatctaaccttcatgagcagaaaaaagctggggtgatatttgaagctgaagaagttatcactcttttaacttctgtgcttaaaacgtcatctgcatcaagaactagtttaagctcacgacatcagtttgctcctggagcgacagtattgtataagggcgataaaatgtttatcacagttaaaattgctaaacgcagtcaggcaccgtgtatgaaatctaacaatgcgctcatcgtcatcctcggcaccgtcaccctggatgctgtaggcataggcttggttatgccggtactgccgggcctcttgcgggatatcgtccattccgacagcatcgccagtcactatggcgtgctgctagcgctatatgcgttgatgcaatttctatgcgcacccgttctcggagcactgtccgaccgctttggccgccgcccagtcctgctcgcttcgctacttggagccactatcgactacgcgatcatggcgaccacacccgtcctgtggatctacccactagtcaattcaccatcttgttga

SEQ ID NO: 130418 - DNA, 963 bp, Homo sapiens
atggacagcagaagacatgaatataaactcaataatgaggggtgtgagaaggttggtgagtatgtgaaagccctggagtgtgccaaagcctatcttctatgccatccagatgatgaggatgtcctagacaatgtggattactatgagagtctgctggatgatagcattgacccggcatccattgaggccagagaggatttaacaatgtttgtgaaacgtcataagctggagtctgagctgataaaatcagctgcagaaggtctggggttttcatacactgaaccgcttaaccagctcgaaaaagcagtggaagcagctcacacatttttcgtggctaaccctgagcacatggaaatgcagcagaacattgagaattacagggcgacagctggtgttgaagcattgcagttggtagacagagaagccaagccacacatggagagttacaatgcaggagttaaacattatgaggctgatgactttgagatggctatcaggcacttcgaacaagccttaagagaatatttcgttgaagatacagaatgccggaccctatgtgaggggcctcagagatttgaagaatatgagtatttagggtataaggctggtctgtatgaagctattgcagatcactacatgcaggtgcttgtttgtcagcatgaatgtgtgagggaacttgccacccgccctggccgcctctctcccatcgagaattttcttcctctgcactatgattacctacagtttgcctactatcgaggaagtgggaactttaaggagccaaacaaagactgtttctatgttgatgccttgttgccagaaaacagaaatcagatcctcacccagatcctccaatcagcaaatctgagtgccaacaagctcttcacagtgggaggacaaatagcaatctacctttgcaaagctcaagaacttttaggtctaaatttgggtttacgtttttaa

SEQ ID NO: 130419 - DNA, 1251 bp, Homo sapiens
gggcacaggcgttcttaatgttgcatagccctgggtcccccacccggccccggttcactttgagcggtcccaaggcctgagggcctactgtccagtccccaggttatcgtcctgagcaaagacagaccccgagccctgcggtcttggggctcaaacagtccctggatggccaaacaagcaaatattcgccatggcagtgggtgctggaagggtggctcacggagctgacgccctccgcagagaaccgtggtctagtcctgcgggtcacgaggcctatctgggacagtggtgtttgagctgagacttcaacgaatagagacagggtgaggttcctgcagcccagggcttcagcgtgaacaaccccagaaggaaaaagagtgctgttgttaaagggtatctgggcatcatggacccaaccatcaccaggagtttctcacttcatctctggaaaggggttggcacgtgcacgaacaagggagtatggtgacagaggagcatgaaaatgccagcagggaccagataatgcaggtgctgagacaaaaaaaacatcactcagaagccaaacgtctgcaaggaaaaatctgtaccctgtgcttagccctgcggcctggaagttcagagaaggctgaaagtgctccctgtgaggaaaccagggcatgtttagacagagctttaatcatgtctaaccaactcagagcagtggcagcagccatcttgaagaagatgtcgcctccttctggatttgcactggagtgtgggggaggaatcatgcttgtttgtgatggatacagaggaaaaacttcaccccatacacccaatgaaaagtttgaaggtgcaactgtcctgaaagcactcaaagatttaacaatgtttgtgaaacgtcataagctggagtctgagctgataaaatcagctgcagaaggtctggggttttcatacactgaaccgcgcgggccccccgcccgacgagaaagcgggccgcggcaggaaagaggggggaagaagagaacaactggcggcccaacaccacgcggcccacgagaccgccgcgcagcagcggcgcgccgcgacggccggggcggcaagaggggctccgggcgagagccccggaccagcgcccgccccggaaacaaagaaggcacggtgggtataggtcctggggggaccgagccctctaaccctggggggatccgggggctaacctctaaggtaggagatttcgggattcgcctaactttagctcgaagttag

SEQ ID NO: 130420 - DNA, 1146 bp, Homo sapiens
atggtggtgtgtaattggtacacattgagcttcagcctgctgtttgtttcagtcaccccagactatgtccctcctcttggaaactttgatgtggaaactttagatataacacctcatactgttactgctatttcagcaaaaatcagaaagaaaggaaaaatagaaaggaaacaaaaaacagatggcagcaagacatcctcctctgacacactttcagaagagaaaaattcagaatgtgaccctacgccatctcatagaggccagctaaacaaggagttcacagggaaggaagaaaagacatcattgttactacataattcccatgcttttttccgagagctggacattgaggtcttctctattctacattgtggacttgtgacgaagttcatcttagatactgaaatgcacactgaatgtttagctgctgagaatcacggtgtagttgatggaccaggagtgaaagttcaggagtaccacataatgtcttcctgctatcagaggctgctgcagatttttcatgggctttttgcttggagtggattttctcaacctgaaaatcagaatttactgtattcagccctccatgtccttagtagccgactgaaacagggagaacacagccagcctttggaggaactactcagtatctacctggagcacacagagagcattctgaaggccatagaggagattgctggtgttggtgtcccagaactgatcaactctcctaaagatgcatcttcctccacattccctacactgaccaggcatacttttgttgttttcttccgtgtgatgatggctgaactagagaagacggtgaaaaaaattgagcctggcacagcagcagactcgcagcagattcatgaagagaaactcctctactggaacatggctgttcgagacttcagtatcctcatcaacttgataaaggtatttgatagtcatcctgttctgcatgtatgtttgaagggtgaagagattaagtcccaaaattcccaggagagcacagcagatgagagtgaggatgacatgtcatcccaggcctccaagagcaaagccactgaggatggtgaagaagacgaagtaagtgctggagaaaaggagcaagatagtgatgagagttatgatgactctgattag

SEQ ID NO: 130421 - DNA, 271 bp, Homo sapiens
atactaagcctgctactgctgccactacctgtaaaccatgaggccaaccctttgccactacatcagtttccttactcaggtatgccacgggttgcaagctcatcccttggacctgtgggagtggggctttcaggcataattagaaaagcatgtgaaaagagtaaagttcctcagtcacagcttagtgactgggagaagtatctagtgactggctgtcctaggaccccttggatagtgacagatctggaggacagttgtccgagacaggaga

SEQ ID NO: 130422 - DNA, 993 bp, Homo sapiens
  misc_feature (1)...(993): n = a,t,c or g
atgtcgaagcgtcgttggttaacgggaaacggaagtgatcgagagaacattcgcctggatttgggatttctggtcagcgatgaagagaaacggtacaaatgtgaagactgtggcaaagcctttaaccgctcctctaaccttactacacataagaaaattcatactggagagaaaccctacaaatgtgaagaatgtggcaaggcctttaagcgctcctctatccttactacacataagagaattcatactggagagaaaccctacaaatgtgaagaatgtggcaaagtttttaagtacctttcttccctttctacacataagataattcatactggagagaaaccctacaaatgtgaagaatgtggtaaagccttcaactggtcctcacaccttactacacataagagaattcatactggagagaaaccctacaaatgtgaagaatgtggcaaaggctttaagtactcctctacccttactaaacataaaataatccatactggagagaaaccctacaaatgtgaagaatgtggtgaagcctttaagtactcctgttcccttactgcacataagataattcatactggaaagaaaccttacaaatgtgaagaatgtggcaaagtgtttaagcactcctctcccctttctaaacataagagaattcatactggagagaaaccctacaaatgtgaagaatgtggcaagagactttgcccaggnaatatagcagcaccaacgatgttaagtaatgccagtaaaggcgccaaacccgctccgttggnctgtggaggtcccggtgtcttagctgtggatctcccaatacctgcaggacacggggccacacagcctgggcctttaggagaagtaagaaccagacctggagctctgactgcagcgagagacaaaggccgcaccaaacccggaaaccgtcctcttcgctccagctgcgttcctgattggatggtttccagcccaccatccctgattggataa

SEQ ID NO: 130423 - DNA, 1428 bp, Homo sapiens
ctaaaacttgaagtccctcatctcctccaccacctgggcatgcccttcctcctggtcctccaggccgctggtctggcggcagatctcagccagcatgctgttgatcatgcaggagggctgaggcaccgacgtccccgtgagcttcttcacgggacgtttttccggcaaagggtagatcttgcattggccagccggtagctgccgtctttgacgttgtccaggaggccttggcccctgaccacagagttctccatctgctgcctctcgaagacaagcaggaagggcagccctcttggccatggggatctccttggagtcagtctccttgttgttgaacgtggtatttagcagcatgtgaaacagcagtttcactgtgctgatggtgggatacttcaaggcagacagtatcttggccacttgcttgcagagctgcaggaattccaccagcccctggatggtggaccacttggtagcctccaacatcaggttgtgattgttgctgtcttcagatacaccagggatgacgcactgctgctctttgagcggcagcatgcagtgtccctgttttgctgtgtctgcttctccacaagagcatgtcaaaggccatggtgggctgctggaagtagtccaccggtggacagcaccaagagagcaggctctccagtttagggagctggaaagcctgctgatgccagcataggaggtcttcatgatgtccttgccatagtcggtggtggccctgcactccttgatgttgatgccccatttgatgaagagcaccggcatgatggtttccgctgtgttcttttcgagcacctcaaatgtcttcaggcaccggaacccacatacaggcttctcttctagctctgtgatgctgggactaggattctgcaaacacttttctcctttaccatctgttttcctgttaagttcttctggtagaagaaacctcacagagccccgggtatgcttgaccattgaaggccaggaggttaactgtctctgggacactggtgtagccttctcagtcttactttcctgtcccagacaactgtcctccagatctgtcactatccgaggggtcctaggacagccagtcactagatacttctcccagccactaagttgtgagtggggagctttactcttttcacatgcttttctaattatgcctgaaagccccactcccttgttagggagacacattcctccttcacttgcaactactactgcaacttgccttgcctgctttggagcttccctggtgtcacgtaaagagatgcctgtgggaagctgcaggccactgatacgtgtacaaaactggaattgcaaggtattaatccccataagaaaactcttcaagtttgcaaaattatttctgtgcatagagcctattaaaagtattctcagccgggcacagttgctcat

SEQ ID NO: 130424 - DNA, 3867 bp, Homo sapiens; identical to SEQ ID NO: 118520

SEQ ID NO: 130425 - DNA, 281 bp, Homo sapiens
atggcccctgcttttgctaggatgtctctccctaacaaaggagtggggctttcaggcataattagaaaagcacgtgaaaagagtaaagttccccagtcacaacttagtgcctgggagaagtatctagtgactgcctgtcctaggatcccctcagatagtgacagatctggaggacagttgtctggcacagaagacatttttagtttgtggattcaatcttgaaaatatattggtctacaatcagctgcagttggaggctcccactgagaagaatgaaaaca

SEQ ID NO: 130426 - DNA, 2209 bp, Homo sapiens
atgaacttctctagatttgatcctgtgacggcgtgtgcccggcttgttattgttctgttggcccgacctgtgggcaagaggtcgcttgtgtccagaagtctccgaccttatgagaattactactatagtggagattctaaagggacatctggcgaagagaaggccaagaggctcttcctccctgaaccagggctgggacacggctgccataagggtgtgtccccaccgcccagcagtcagccccaggatcccacccgtcacgggttccagcccccaacacggccatcggagccctccctgaactttgcccccagcaccaagggcagatatatgggggcttatataccctcagtgcaacctggccccaaagatccccctgggctccccacaactcagcgtctgatcacatctactgtcactcagggcctcagggggcggggccttaagcattatccaatcagggatggtgggctggaaaccatccaatcaggaacgcagctggagcgaagaggacggtttccgggtttggtgcggcctttgtctctcgctgcagtcagagctccaggtctggttcttacttctcctaaaggcctatgctgtgtggccccgtgtcctgcaggtattgggagatccacagctaagacaccgggacctcctggaagccaaaaatggtgagagtgagggtccgacatcccgagagaggagagggactggttggaaccggtgaaaagtggctgtggcgggactcaggcctccccgcagtcagctccacagtctgctcccccagttctccttgctcagctcggcctcagtcctgttcagccataaaatggcagctgcgctgacagccaggcccccagaagtcctgcctcttcactgcgctgtgactgtgccctggcctggagcccactttgggcagctctgcacctgcagcatggcgtctctcccagattgtgcagggaccaggggaaggtcggcagctcagcgtctgatcacatctactgtcactcagggcctcagggggcggggccttaagcattatccaatcagggatggtgggctggaaaccatccaatcaggaacgcagctggagcgaagaggacggtttccgggtttggtgcggcctttgtctctcgctgcagtcagagctccaggtctggttcttctcctaaaggcccaggctgtgtggccccgtgtcctgcaggtattgggagatccacagctaagacaccgggacctcctggaagccaaaaatggcttctcattagaatcacatggccaatttgcagaaattccttgtgtcctccgcacagcttctgtttattgttctgggtggaagcatccatggagtcccttatgtgactctaagggaccattgcaatttagagatgtggccatagaattctctctggaggagtggcattgcctggacactgcacagcggaatttatataggaatgtgatgttagagaactacagtaacctggtcttccttggtattactgtttctaagccagacctgatcacctgtctggagcaaggaagaaaacctttgaccatgaagagaaatgagatgatagccaaaccctcagaggaacgatcaggcagcagtatctgcggttcagcaaaatccgctgttctgcagccaccgctgctgatacccaggcaaacagtgtctggagtggacctccagcaaacttcaacagacctgcagctgagggtcctgtctgttagaaggaaaactaacaaagagaaaggacatccacaccaaaaacccatctgtacatcaccatcatcaaagaccaaagagaagttcttaaaggacctgatggagctgaaaaccaaggcacgagagctatgtgacgaatgcagaagcctctgtagccgatgcgatcaactggaagaaagggtatcagcgatggaaaatgaaatgaatgaaatgaagcgagaagagaagtttagagaaaaaagaataaaaagaaacgaacaaagcctccaagaaatatgggactatgtgaaaagaccaaatctacatctgattggtgtatctaaaagtgacggggagaatggaaccaagttggaaagcattctgcaggatattatccaggagaacttccccaatctagcaaggcagaccaacattcaaatcaggaaatacagagaacgccacaaagatactcctcgagaagaggaattccaagacacataa

SEQ ID NO: 130427 - DNA, 1143 bp, Homo sapiens
atggaggcagttgaaagttggaattatgactctcatacttggatctgcttaacagttgagtttttttcttctgaggaggcaagaattgaggttgctgcagacctgtacccatacggattcactaccagtaacaggtgtataatggcccctgcttttgctagaatgtctctccctaaaaagcgagtggggctttcaggcataattagaaaagcatgtgaaaagagtaaagttccccagtcacaacttagtggctggaagaagtatctagtgactggctgtcctaggaaccctcagatagtgacagatctggaggacagttgtctgggacaggagacaagggtgcagaactggacagaggatgagatggatgaattgacaaaagtaggcttcagaagatgggtaataaactctgctgagctaaaggaacatgttctaaaccaattgaaagaagctaagaaccttgataaaaggcaagatgaagcccttaggccgttacacaacctccgcctcctgggttcaagcgattcccctgcttcagccgccgtagcacctgggactacagctcagcgtctgatcacatctactgtcactcagggcctcagggggcggggccttaagcattatccaatcagggatggtgggctggaaaccatccaatcaggaacgcagctggagcgaagaggacggtttccgggtttggtgcggcctttgtctctcgctgcagtcagagctccaggtctggttcttacttctcctaaaggcccaggctgtgtggccccgtgtcctgcaggtattgggagatccacggctaagacaccgggacctcctggaagccaaaaatgggaccattgcaatttagagatgtggccatagaattctctctggaggagtggcattgcctggacactgcacagcggaatttatataggaatgtgatgttagagaactacattaacctggtcttcctgggtattacggtttctaagccagacctgatcacctgtctggagcaaggaagaaaacctttgaccatgaagagaaatgagatgatagccaaaccctcagtgagcttccttcaagtttcacagggagaagcaaaggcccttctttgtgacttataaaagactgcacagtgtggctgct

SEQ ID NO: 130428 - DNA, 2097 bp, Homo sapiens
ctcactttgaagcatgctcgttccatctctgatccccccaccccatttctttggctcagggatcaggggttaggatttccctcttatcggcccctatttccctgccctatccagctacaggcaagaacgttagtctccttaccctgtgccctgtcccaatgtgtgcccgggctttgctccttgcgtgcagttcgaggggaagacatcgtttggaatgtcagtgttcaacctcagcaacgccatcaggggtgttgtggggcaggtgggaggcctggggccaggtctgagctgtgccacctgccgcagggccctgctgctgggcctgcacctctggcctggcctcctggaccttcaaccctgttcctgactccccccgctaggcatccgagcctatgagcagctgggacagaggggaagacggggtgggggcatgaagagaatccttctgcttacacctcccccacctgcaccagccatgtccagttacctgtgtgtctgcctgacagtttcctttggctggcagctaggcactgtgtcttcctgtctctctagggactggttcttgaagggaaacttataggtgtgagccaccacgcctggctgatttctgagactctgtgttttgcccctctttttgggacattgggacatagcttcctccatgacctggcttccctgctgcccccatcctcaggtcatctacaagaagttccaacttggctgtgctataggccacaatgaaacagcaatggagagtgaagctctcgtgggatgggaagaaggggatggacccctgttggctctaatcccatgtactcgggcattcccctagatgtcctacacagtgcccagagggacctggggcaagtctcagggtctgggcatgacagttccacgacctctacacctcaggccctccaagcgcaggatgcaggccgtggccaacgtgtccggcattggtcctggtgctctctccacatcctgcatcccgtaccctctgtctcatggcccaggcagtgtgaaggcggagatgctgcacatgtacagccagaaggacccgctcatccttcacgtggaaggggggcagcacttgggtcctgacttctgtcccaccctactctggccacagatccgccgggccctgcagcagctgcttttcccaggcaaggccttcagctggccacgacatgtggccatagctctgatcctgcttatctaatatgggccttgtccccaagtcaggttgactcctgtcccttcttcttgttctccagggtccacctcagcccccagcctcatcttcatcctccccagcatgtggttgtcagaggcgggggacagcagaggctgcagactggcccacttccctcctccccagggatgccaagcttggatcatggccctaatcccaaccccaaccccatgggaggacaaaaaaaacccgaagaaaacagtccaaggccctccaacctctgactacatttttgaaagggaatctaagtgtggtgcgcacaattaccatcctttacctgtagccctggagagaggaaaatgtatttacttatgggatgtagaaggcagaaaatattttgactttctgagttcttacagtgctgtcaaccaagggcattgtcaccccaagattgtgaatgcactaaagagtcaagggaagaaattgaccttaacctctagagctttctataataacgtacttggtgaatatgaggagtatattactaaacttttcaactaccacaaagttcttcctatgaatacaggaatggaagctggagagactgcctgtaaactagctcataagtggggctatactgtgaagggcattcagaaatacaaagcaaaggttatttccgcagctggaaacttttggggtaggacgttttctgctatctccagttccacagacctgacgagttatgatggttttggaccgtttatgcctggcttcgacgtcattccctgcaatgatctgcctgcactggagagtgcttttcagaatccaaatgtggctgcattcatggtagaaccaattcagggtgaagcaggtgttgttccagatccaggttacttaatgggagt

SEQ ID NO: 130429 - DNA, 2070 bp, Homo sapiens
acccgactgcagacataccgacccgcaatccgggtcgacccacgcgtccgcattgttaaagctcggcgctgacaagatctgaggcttttctatttgaaggacacaatgttttccaaactagcacatttgcagaggtttgctgtacttagtcgcggagttcattcttcagtggcttctgctacatctgttgcaactaaaaaaacagtccaaggccctccaacctctgatgacatttttgaaagggaatataagtatggtgcacacaactaccatcctttacctgtagccctggagagaggaaaaggtatttacttatgggatgtagaaggcagaaaatattttgacttcctgagttcttacagtgctgtcaaccaagggcattgtcaccccaagattgtgaatgctcttgaagagtcaagtgggacaaaattgacctttaacatctagagctttctataataacgtacttggtgaatatgaggagtattattactaaactttttcaactaccacaaagttcttcctatgaatacaggagtggaggctggagagactgcctggtaaactagcttcgtaagtgggggctattaccgtgaagggcattcagaaatacaaagtcaaagattgtttttgcagctgggaacttctggggtaggacgttgtctgctatctccagttccacagacccaaccagttacgatggttttggaccatttatgccgggattcgacatcattccctataatgatctgcccgcactggagcgtgctcttcaggatccaaatgtggctgcgttcatggtagaaccaattcagggtgaagcaggcgttgttgttccggatccaggttacctaatgggagtgcgagagctctgcaccaggcaccaggttctctttattgctgatgaaatacagacaggattggccagaactggtagatggctggctgttgattatgaaaatgtcagacctgatatagtcctccttggaaaggccctttctgggggcttataccctgtgtctgcagtgctgtgtgatgatgacatcatgctgaccattaagccaggggagcatgggtccacatacggtggcaatccactaggctgccgagtggccatcgcagcccttggaggtttttagaagaagaaaaccttgctgaaaatgcagacaaattgggcattatcttgagaaatgaactcatgaagctaccttctgatgttgtaactgccgtaagaggaaaaggattattaaacgctattgtcattaaagaaaccaaagattgggatgcttggaaggtgtgtctacgacttcgagataatggacttctggccaagccaacccatggcgacattatcaggtttgcgcctccgctggtgatcaaggaggatgagcttcgagagtccattgaaattattaacaagaccatcttgtctttctgagggtagccagctgttttcagtggtccctgggagccagctggagacaggtggtcctgtaaaagctttattcctaatgtgggcacattccactcccatgagtcttcaaaaactttttttttgaatatatttttttcagttgatacataatagaacaacgtttatgaacctgccgtttgctttgtaacgtaactaaataatgtaatggcatctatattcagttgaagtgttttgatgtgcatgtgtacttcctaaggtgaaatgcatctatatacagacagcctctaaatcaagtccttcagtataattgatatatgtttttataatttcctcactggtataagtgtttcatatttgaaaaagttatctctgggtattgcataaaaggcttcatcttataaagtgaaatcattgttattgaattttaggaaggattaatggttaagtgtatataaaatactaatattaagtaaacttcatattggccaacaccagggttgtattctatggatgtcattattttgaattaagaattagtgtttaacattcctaaattgttttgagtgcttgattataatttgtaaaaaatgtttattttcaatacttctttaaatttaaaataaagcttatatttc

SEQ ID NO: 130430 - DNA, 2169 bp, Homo sapiens
tcaggtcgggggtctcctctcctcctgcaatgccttgggcgtgggtccagccttgtctgagacacagagaaatggacctccagtgcggaagatctgcaccaacattcgaaagaaaaaagatatgcagccagggatgagaaccaatggcccaccctgctgagtgctggaatgtgtaatgaagtcctgcgtgggtctgtaatgaacccagattcggctcctaacaggtgctgagtgcatgtttgcaaacccaggcgcctgttgcaaggagaggacagagctaaagcaaggagccttgaaaggtagagagtggaatcgttgccctgagcacctgggtgtggtcgcagcatcccccgtgaggcctcccaacctgcagctgcctcctgcgtgcgcatctgccactgctggctttagggccagggccaggcccagcattctactgtcacacttctggtggaggcttttaatgatccagtttcctggactcctctccagaggctctgatcctgccacgctggtgttggagcctgggtgtctgtatttttcaaaaccaccccaagtgatctgctgtagtgtatagcctgcatccctgaccccagtagccagctggtcagggactgtccttggttttctgccctcagctcgccgtggagacagcctgtgggacctgggagagacgaaggaaaggactgggcactcagtggggctgcagaactggcttgaagggtatagcaatgtggggacccagcaaaatcctggtgtgggaaccagcagacttggctgctcagaacggcagcctaactctgtaaggttctcatttcccaatcctttccttctccccacggctgcccagaaccatggtcctcccgggctctcaggtggtccctggcagctgagctgtgccacctcctcggaaggcccctcgtggccctgaaagggaaccttcagaagcgtgtgcccacagccaagatggggcctaaagtataattcaacttttagctccttacaagcatccccagatggatttctagcttccgtccctctcttgggcccagctctgtctctacgtggtgcctggaagtccctctggccccacgcacttcctcgtcttgttcccaaagctgctttgcttcttaccttcccatcttggtggacaccatctccatcttcctggtcatcctggctcaaaactttggccatactttcctccttcctcccttggccctgcactgaaatgtcaagaaggtccagacctgtgctcagtacccgcagggtgcacatgtgttccaggagggcgaggaacagtggcagctggaatcctgagctaggtttctctggttttgtcacaagctccctgccaagcagccaggtgagcggctccagtccaggcctgtggcctccctcatccacagcagtgattgcctcgtcactatgggtgtagttgggtgcatcagagcccaccaggcccagccccacggtgtgcacacatgcccctgaactggctaggcttcctgtcctgacatctgccaatcctgaacggcttcttgaccctaatggatcactcaggggagtgggtgctggcagcacagtgggtgtccctggcagcacagtcagacccccatcagcaggggattggccgtcactgggtggacggcagcatctaggaatcaggtttcgaaggatggtgtagaatggttgccgggggccgggcagtggagaggtgcttcgagccgagggctcagcatgtgcaaatgtgcagaagtgtgaaacagccccgctggagtcattcagctggctaggcaaatccgtcaaagccacgcacactggcatggtcggcctctgtttttcatctgtataatgggctttgtgctcccttagggctcctcctgtgggttctgctgctggaccagggctcagcctccagtttagcttgagggtgcccaggcctgcagaaggtgtcaagcaagggctgggagagggggaggaaggaggaggcaggaaggcaacgggaggggaaggaggagggcagaggaagggtctccgagtgcctctcactcccgcctcagctctccgctccagtggtcccatatagggctctgggtcccaaacaccagaggaaggagcggggacagcccaggcttcttccctgggtcttgttcctgagctgcccat

SEQ ID NO: 130431 - DNA, 2257 bp, Homo sapiens
gagccggacgtgtgcgcgaagatggcgggccggagcatgcaagcggcaagatgtcctacagatgaattatctttaaccaattgttcagttgtgaatgaaaaggatttccagtctggccagcatgtgattgtgaggacctctcccaatcacaggtacacatttacactgaagacacatccatcggtggttccagggagcattgcattcagtttacctcagagaaaatgggctgggctttctattgggcaagaaatagaagtctccttatatacatttgacaaagccaaacagtgtattggcacaatgaccatcgagattgatttcctgcagaaaaaaagcaatgactccaacccttatgacaccgacaagatggcagcagaatttattcagcaattcaacaaccaggcctactcagtgggacaacagcttgtctttagcttcaatgaaaagctttttggcttactggtgaaggacattgaatccatggatcctagcatcctgaagggagagcctgcgacagggaaaaggcagaagattgaagtaggactggttgttggaaacagtcaagttgcatttgaaaaagcagaaaattcgtcacttaatcttattggcaaagctaaaaccaaggaaaatcgccaatcaattatcaatcctgactggaactttgaaaaaatgggaataggaggtctagacaagggggttttcagatattttccgacgagcatttgcttcccgagtatttcctccacagattgtggagcagatgggttgtaaacatgttaaaggcatcctgttatatggacccccaggttgtggtaagactctcttggctcgacagattggcaagatgttgaatgcaagagagcccaaagtggtcaatgggccagaaatccttaacaaatatgtgggagaatcagaggctaacattcgcaaactttttgctgatgctgaagaggagcaaaggaggcttggtgctaacagtggtttgcacatcatcatctttgatgaaattgatgccatctgcaagcagagagggagcatggctggtagcacgggagttcatgacactgttgtcaaccagttgctgtccaaaattgatggcgtggagcagctaaacaacatcctagtcattggaatgaccaatagaccagatctgatagatgaggctcttcttagacctggaagactggaagttaaaatggagataggcttgccagatgagaaaggccgactacagattcttcacatccacacagcaagaatgagagggcatcagttactctctgctgatgtagacattaaagaactggccgtggagaccaagaatttcagtggtgctgaattggagggtctggtgcgagcagcccagtccactgctatgaatagacacataaaggccagtactaaagtggaagtggacatggagaaagcagaaagcctgcaagtgacgagaggagacttccttgcttctttggagaatgatatcaaaccagcctttggcacaaaccaagaagattatgcaagttacattatgaacggtatcatcaaatggggtgacccagttactcgagttctagatgatggggagctgctggtgcagcagactaagaacagtgaccgcacaccattggtcagcgtgcttctggaaggccctcctcacagtgggaagactgctttagctgcaaaaattgcagaggaatccaacttcccgttcatcaagatctgttctcctgataaaatgattggcttttctgaaacagccaaatgtcaggccatgaagaagatctttgatgatgcgtacaaatcccagctcagttgtgtggttgtggatgacattgagagattgcttgattacgtccctattggccctcgattttcaaatcttgtattacaggctcttctcgttttactgaaaaaggcacctcctcagggccgcaagcttcttatcattgggaccactagccgcaaagatgtccttcaggagatggaaatgcttaacgctttcagcaccaccatccacgtgcccaacattgccacaggagagcagctgttggaagctttggagcttttgggcaacttaaaggataaggaacgcaccacaattgcacagcaagtcaaagggaagaaggtctggataggaatcaagaagttactaatgctgatcgagatgtccctacagatggatcctgaataccgtgtgagaaaattcttggccctcttaagagaagaaggagctagcccccttgattttgattga

SEQ ID NO: 130432 - DNA, 2181 bp, Homo sapiens
atggggcagggcctgggcaccctcaagctaaactggaggctgagccctggtccagcagcagaacccacaggaggagccctaagggagcacaaagcccattatacagatgaaaaacagaggccgaccatgccagtgtgcgtggctttgacggatttgcctagccagctgaatgactccagcggggctgtttcacacttctgcacatttgcacatgctgagccctcggctcgaagcacctctccactgcccggcccccggcaaccattctacaccatccttcgaaacctgattcctagatgctgccgtccacccagtgacggccaatcccctgctgatgggggtctgactgtgctgccagggacacccactgtgctgccagcacccactcccctgagtgatccattagggtcaagaagccgttcaggattggcagatgtcaggacaggaagcctagccagttcaggggcatgtgtgcataccgtggggctgggcctggtgggctctgatgcacccaactacacccatagtgacgaggcaatcactgctgtggatgagggaggccacaggcctggactggagccgctcacctggctgcttggcagggagcttgtgacaaaaccagagaaacctagctcaggattccagctgccactgttcctcgccctcctggaacacatgtgcaccctgcggcttctgaaggttccctttcagggccacgaggggccttccgaggaggtggcacagctcagctgccagggaccacctgagagcccgggaggaccatggttctgggcagccgtggggagaaggaaaggaaaaccaaggacagtccctgaccagctggctactggggtcagggatgcaggctatacactacggcagatcacttggggtggttttgaaaaatacagacacccaggctccaacaccagcgtggcaggatcagagcctctggagaggagtccaggaaactggatcattaaaagcctccaccagaagtgtgacagtagaatgcttcatcttcaggcagctttcctcatagtcacagaatggctgctgcagctccaggccaatccctggcaagcagaatgggtccccgtgattgacttagatcagtcaggatttacctctgagcaaggaaacatttacgtatttggtcctctgatgaatgactgtccccagcagatggcaagttccttgcaggccaaaacctgggctgcttttgctcatcagtgctcagctgccaaggggcagctgcacacagagttgctccatgaagatgcgttgaagaaatggaccagtccagcaatgggctgggaacgcagcaggagccatgacaagcccaggcggctctcccgacccttggtgcccccgaggccatttccccgcgctccctgtgccggcagcagccgcgtgcggagagggctcgccgaccagaaggggcagcagttccctacacagcggtccctgctccccaccggcagtgcttccttcaccccagaccggggctgcgcagagtcctggtgcctcaggccgcgggcgctgattggctgctcgctgacatcctcaaacccggctgctccgcgctgggctcgggaggggggcggctgcgggtggaggtgcgcttctgacaagcccgaaagtcatttccaatctcaagtggactttgttccaactattgggggcgtcgctccccctcttcatggtcgcgggcaaacttcctcctcggcgcctcttctaatggagccccacctgctcgggctgctcctcggcctcctgctcggtggcaccagggtcctcgctggctacccaatttggtggtgctgggcccagggctgtgtggctgtgaatatctttgcagacatctacctgtggtgggttcgtggtctcactgacttcaagaatgaagccacgtacctttgcgcctggcccctgccgccctgcacccgctcctctcccaaccccaacatgggttgtaaacatgttaaaggcatcctgttatatggacccccaggttgtggtaagactctcttggctcgacagattggcaagatgttgaatgcaagagagcccaaagtggtcaatgggccagaaatccttaacaaatatgtgggagaatcagaggctaacattcgcaaactttttgctgatgctgaagaggagcaaaggagggtaatgtga

SEQ ID NO: 130433 - DNA, 450 bp, Homo sapiens; identical to SEQ ID NO: 118344
  misc_feature (1)...(450): n = a,t,c or g

SEQ ID NO: 130434 - DNA, 501 bp, Homo sapiens; identical to SEQ ID NO: 118345

SEQ ID NO: 130435 - DNA, 636 bp, Homo sapiens; identical to SEQ ID NO: 119153

SEQ ID NO: 130436 - DNA, 765 bp, Homo sapiens; identical to SEQ ID NO: 118346

SEQ ID NO: 130437 - DNA, 1042 bp, Homo sapiens
gagctgtgggaccagaccccagcacacattgtcagcagcagctgcctctcagccagatatgcctaagaggaaactgtggggtgtttgtgagcctagagggggctggtttgccctggttcaaaaattaagctttatagagaagctgacaccagctctctataaaatgtcctacctggcagccatcttgaaggactatgtggtaaggagagatccaaagaccaagtgctccaggggctttgggtttgtcacttatgccactgtggaggaggtggatgcagccatgaatacaaggccacacaaggtggatggaagagttgtggaaccaaagagagctgtctcaagagaagattctcaaagaccaggtgcccgcttaactgtgaaaaagatatttgttggtggcattaaagaagacactgaagaacatcacctaagaaattattctgaacaatatagaaaaattgaagtgattgaaattacgactgacagaggcagtgtcaagaaaaggggctttgctcttgtaacctttgatgaccatgactctgtggataagattgtcattcagaaataccattctgtgaatggccacaactatgaagttaggaaagccctgccaaacaagagatggctagtgtttcatccagacaaagaggtcgaaatggttctggaaactttggtggtagtcgtggaggtgtttatggtgggaatgacaactttggttgtggaggaaacttcagtagctttggtggcagtggggatggctataatggattcggtgatgatggaggcagttttggaggtggtggaagctacaatgattttgggcattatcacaatcagtttttcaaattttgggaccgatgaggggaagaactttggagccagtatctctgcccccctgtgtggtggaggcaatacttcgccaaccagaggatccccgtcttcgaaagagcctgaagagctgcagaaacttttcattggatggctgggctttgaaacaactgatgagagcctgagggaccatttgagccatggggaatactga

SEQ ID NO: 130438 - DNA, 2017 bp, Homo sapiens
  misc_feature (1)...(2017): n = a,t,c or g
ccatatgtggcccagggggacctgagtggattccaagacattggtggctacacaaaaaggaaactggacttttattccacgctgttggctggcagtccaggacctcagcatccaggaagtcacctttgtcctcagaccaacctggaaaaatctcgcttttctgcccgtggacaccgccgaagaagcactcgttaaaagtctcctcttcaccctgccgtcattggtctaaagtcaaagtctcctaaagagccccgaacagcctgaggggngggaagctcttcattckgagggttygagctttgaaacaactcgatgagagcctcgaggagccatttttgagcaaatgggggaaacgcthcacggacttgtgtggtaatgagagatcccaaaccaccaagcgctccagggggcttttgggtttgtcacataatgccacttgtggaggaggtggatgcagcctatgaatgcaaggcccacacaaaggtggattggaagagttgttggaacccaaagaggagcttgtcttccagaggaagatttctcaaaggaccaggttgcccacattaacttgtgaaaaaagatattttgtttggttggcattaaaagaagacacttgaaagaacattcacctaaagagattattttgaagagattattttgaacagtattggaaaaatttgaagtggttgaaatccattgactggaccggaggccagtggccaagaaaaaggggctttgccttttgtaacctttggacggaccatggactccgtgggataagattgtccatttcaggaattaccatactgtgaatgggccacaacctgtgaagtttagaaaagccctgtcaaaagccaagaagatggctagtgctttcatccaagccaaaagaggtccgaagtggttctgggaaacttttggtggtgggtcgtggaggtgggtttcggtgggaatgacaacttcggtccgtggaggaaacttcagttggtccgtggtggcctttggtggcagccgtggttggtggtggatatggttggcagtggggatggcctataatggatttggaactgatggaagcaattttggaggtggtgtgaagctacaatgattttgggaattacaacaatcagtcttcaaattttggacccatgaaagggaggaaatttttggaggcagaagctctggcccctatgggcggtggaggccaatacttttgctaaaccccgaaaaccaaggtggctatggcggttccagcagcagcaagtaactattggcagtggcagaagattttaattaggaaacaaagcttagccaggagaggagagccagagaagttgacagggaagctacaggttacaacagatttgtgaactcagcctaagcacagtggtggcagggcctagcctgctacaaagaagacatgttttagacaaatactccatggtgtaatgggcaaaaaactccgaggactgtatttgtgactaattgtataacaggttattttagtttcctgttcctgtggaaagtgtaaagcattcccaccaaagggttttaatgtagattttttttttttgcaccccatgctgttgattgctaaatgtaacagtctgatcgtgacgctgaataaatgtcttttttttttaatgtgctgtataaagttagtctgctctgaagccatcttggtaaattttccccaagagtgtgaagttagaattccttcagggtgatgccaggttctttttggagtttatatacaacctgcttgggtggagaagccattgtcttcagaaaccttggtgtaggtgaactgatggttactgttgcgatctgaagttcaccattaaaagggattacccaagcaaaatcatggaattattggttataaaaatgattgttggcccatcctatgcaatatatctaaattgaataatggtaccagataaaattatagatgggaatgaagcttgtgtatcattcattatcatgtgtaatcaataaacgatttaattctcttgaa

SEQ ID NO: 130439 - DNA, 439 bp, Homo sapiens; identical to SEQ ID NO: 125330

SEQ ID NO: 130440 - DNA, 408 bp, Homo sapiens
cagaacctgacagcccagagaagtaggttgggagcctgcggcgtccagggcctccgcgcgaagaaacaaggcgtctgcgggaaaggagacggagcctggaaccctgggcttttctacttaaggaagcgaaggtcgggtgacagccaagctccctgttccagtgggaaggccccatgggtctgtgttccacgcctcttgtcatgaatatgggggattcacttataaccaaagcatttgttccaggtcccaccactaactattactagtcctgggcccagaaccaggcgtcctcactcctagtacccaagcccttctctagccacaggtgtttgggctgcggtgtggtgtaagcagccccattttcccgcaaagtgatgggaagagacactgagtcacacgggctcagga

SEQ ID NO: 130441 - DNA, 418 bp, Homo sapiens
cggcacgagggaagagatcggtacagacccgggcatgaccccagcacgtgggagtgatgtgttggaggtgtgcaccaggctcttgaggcgctggctctgccagcctcaggcatagcacctttcctgcccacaggcacaacgaggccctcttggaggaggcgaagatgatgaacagactgagacacagccgggtggtgaagctcctgggcgttcatcatagaggaagggaagtactccctggtgatggagtacatggagaagggcaacctgatgcacgtgcttgaaagccgagggtagagagggcccctccgcacggggattccccagcgctttgggccctggctgtttgttatggctccccttaggggtggttgttgcagctccgtaacatacaatttgcccattgcttgggaggttg

SEQ ID NO: 130442 - DNA, 2016 bp, Homo sapiens
atgcaaccagacatgtccttgaatgtcattaagatgaaatccagtgacttcctggagagtgcagaactggacagcggaggctttgggaaggtgtctctgtgtttccacagaacccagggactcatgatcatgaaaacagtgtacaaggggcccaactgcattgagcacaacgaggccctcttggaggaggcgaagatgatgaacagactgagacacagccgggtggtgaagctcctgggcgtcatcatagaggaagggaagtactccctggtgatggagtacatggagaagggcaacctgatgcacgtgctgaaagccgagatgagtactccgctttctgtaaaaggaaggataattttggaaatcattgaaggaatgtgctacttacatggaaaaggcgtgatacacaaggacctgaagcctgaaaatatccttgttgataatgacttccacattaagatcgcagacctcggccttgcctcctttaagatgtggagcaaactgaataatgaagagcacaatgagctgagggaagtggacggcaccgctaagaagaatggcggcaccctctactacatggcgcccgagcacctgaatgacgtcaacgcaaagcccacagagaagtcggatgtgtacagctttgctgtagtactctgggcgatatttgcaaataaggagccatatgaaaatgctatctgtgagcagcagttgataatgtgcataaaatctgggaacaggccagatgtggatgacatcactgagtactgcccaagagaaattatcagtctcatgaagctctgctgggaagcgaatccggaagctcggccgacatttcctggcattgaagaaaaatttaggcctttttatttaagtcaattagaagaaagtgtagaagaggacgtgaagagtttaaagaaagagtattcaaacgaaaatgcagttgtgaagagaatgcagtctcttcaacttgattgtgtggcagtaccttcaagccggtcaaattcagccacagaacagcctggttcactgcacagttcccagggacttgggatgggtcctgtggaggagtcctggtttgctccttccctggagcacccacaagaagagaatgagcccagcctgcagagtaaactccaagacgaagccaactaccatctttatggcagccgcatggacaggcagacgaaacagcagcccagacagaatgtggcttacaacagagaggaggaaaggagacgcagggtctcccatgacccttttgcacagcaaagaccttacgagaattttcagaatacagagggaaaaggcactgtttattccagtgcagccagtcatggtaatgcagtgcaccagccctcagggctcaccagccaacctcaagtactgtatcagaacaatggattatatagctcacatggctttggaacaagaccactggatccaggaacagcaggtcccagagtttggtacaggccaattccaagtcatatgcctagtctgcataatatcccagtgcctgagaccaactatctaggaaatacacccaccatgccattcagctccttgccaccaacagatgaatctataaaatataccatatacaatagtactggcattcagattggagcctacaattatatggagattggtgggacgagttcatcactactagacagcacaaatacgaacttcaaagaagagccagctgctaagtaccaagctatctttgataataccactagtctgacggataaacacctggacccaatcagggaaaatctgggaaagcactggaaaaactgtgcccgtaaactgggcttcacacagtctcagattgatgaaattgaccatgactatgagcgagatggactgaaagaaaaggtttaccagatgctccaaaagtgggtgatgagggaaggcataaagggagccacggtggggaagctggcccaggcgctccaccagtgttccaggatcgaccttctgagcagcttgatttacgtcagccagaactaa

SEQ ID NO: 130443 - DNA, 770 bp, Homo sapiens
agggactgaaacataaaataaccagtgtccagaggcaagtgacatatgccttacgcttgtggccatccttcatttcttcattcgtaaactttgcttaaaagactaaaattcccaattccttataaaaaatatattcttgccctcagccctgatggccactggcaaatacttttattttccaattgataagagagcctccttcatcttcttggtcatagttgggatgaggtgcatgtggtcatccacacacttggtcacacaactgtccagctgctgcttcacctgaagctccttactcccagcatctattgaatctttggctttgtcgttgcaatgcatggtgcaccgggccaggcggtcctggaacttctccagctcactggtgaccaaagcctgggcttgagccagaggcacatggcagcgctcgatgcactggtgcacctgcttcatggaggcctggctgtcctcacaacagctggcgctgcaccggaacatgagaccagaggcattgcggggctcagagaagaacagtgtagaaacccgcgctgtgtgaagcgaggttgggcgcaagagaagcaggcatgacctggccaacggggaggccggaagtcctcgcctttctggtctttcacgttggcagcgcctctgctgggcctcgggccgctcacctgcatcttccggatgttctctctctccagactcttcaccatggactccaccgcctcctgcacccggagctgctgcagctcagccatggccccacgcgtccg

SEQ ID NO: 130444 - DNA, 2879 bp, Homo sapiens
atggtggagctgcagcagctgcgggtgcaggaggtggtggactccatggtgaagagtctggaaagggagaacatctggaagacacagggtctcatgttctggtgcagcgccagctgttgtgaggacagccaggcattcacccagcaggtgcaccagtgcatcgagtgctgccctgtgcctctggctcaagtccaggccttggtcaccagtgagttggagaagttccaggaccacctggctcggtgcaccatgcattgcaatgacaaagccaaagattcaatagatgctgggagtaaggagcttcaggtgaagcagcagctggacggttgtgtgaccaatcctgaaaagggaagtggaaaaaagtgtgctaaattgggtcagagatattacgggagagttttagagcttattcttcctgtggccagtgcttgtcctggaagtaaggatctcctctgtaacaagccagagccctccaacataccagactcttcttactacacaggagggctcatctctgggcaggtgctggggccacaagacagatacgaatggaactttgtactcttcggggacggtacggggggcgggcaagaaacaataaacaagccggcaaagaaagcgccacaaaattccaggtggcgatatccaggttacagaatgagagtctgtagtgcgacaaaaagaatgagccactggtactccacacccatcagcctgctggatctcccggggagttacgctgatcaaaccagccacagaactcccttcagccaaagccgaatccagagcaaggccccaactctcttcaatcctatgcaggatgagagaagtgaggaaattgcagaagaaaagttggaagctagcagagacgccttgtttcttcgcgcggaggccctggacgccgcaggctcccaacctacttctctgggctgtcaggttctgaacccggtcctgaagaggccctggcgccggggggccggggcagggggaggaggcagcgcgaacagtccacgccctccagccgggcgcgctcgacgcggacggcgggccagctgccggagcgcggcgactccaggggacccacagctggggcgccagagcgcggccatccgggcggggccgacggagcgcggcaggacttggctggacggcgcggccacggagaagggcgcgggtacagctctgccggggggggaaaaagtggtaccattttgggcgttcttgagcttcagaatgcaaccagacatgtccttgaatgtcattaagatgaaatccagtgacttcctggagagtgcagaactggacagcggaggctttgggaaggtgtctctgtgtttccacagaacccagggactcatgatcatgaaaacagtgtacaaggggcccaactgcattgagcacaacgaggccctcttggaggaggcgaagatgatgaacagactgagacacagccgggtggtgaagctcctgggcgtcatcatagaggaagggaagtactccctggtgatggagtacatggagaagggcaacctgatgcacgtgctgaaagccgagatgagtactccgctttctgtaaaaggaaggataattttggaaatcattgaaggaatgtgctacttacatggaaaaggcgtgatacacaaggacctgaagcctgaaaatatccttgttgataatgacttccacattaagatgagtactccgctttctgtaaaaggaaggataattttggaaatcattgaaggaatgtgctacttacatggaaaaggcgtgatacacaaggacctgaagcctgaaaatatccttgttgataatgacttccacattaagatgtggagcaaactgaataatgaagagcacaatgagctgagggaagtggacggcaccgctaagaagaatggcggcaccctctactacatggcgcccgagcacctgaatgacgtcaacgcaaagcccacagagaagtcggatgtgtacagctttgctgtagtactctgggcgatatttgcaaataaggagccatatgaaaatgctatctgtgagcagcagttgataatgtgcataaaatctgggaacaggccagatgtggatgacatcactgagtactgcccaagagaaattatcagtctcatgaagctctgctgggaagcgaatccggaagctcggccgacatttcctgtgggtacaattcagaaacagccaaatggaagagatgtacaaggcattgaagaaaaatttaggcctttttatttaagtcaattagaagaaagtgtagaagaggacgtgaagagtttaaagcgcgcctacctgccgcacctagtaaccgcagagcgcctacctgccgcacctcggaaccgcagagcgcctacctgccgcacctcggaaccgcagagcgcctacctgccgcacctcggaaccgcagagcgcctacctgccgcacctcggaaccgcagagcgcctacctgccgcacctcggaaccgcagagcgcctacctgccgcacctcggaaccgcagagcgcctacctgccgcacctcggaaccgcagagcgcctacctgccgcacctcggaaccgcagcgcgcctacctgccgcacctcggaaccgcagcgcgcctacctgccgcacctcggaaccgcagcgcgcctacctgccgcacctcggaaccgcagcgcgcctacctgccgcacctcggaaccgcagcgcgcctacctgccgcacctagtaaccgcagcgcgcctacctgccgcacctagtaaccgcagcgcgcctacctgccgcacctagtaaccgcagagcgcctacctgccgcacctagtaaccgcagagcgcctacctgccgcacctagtaaccgcagagcgcctacctgccgcacctagg

SEQ ID NO: 130445 - DNA, 1363 bp, Homo sapiens
cctgctgcagctgtggaactggtcctatcagccatatgcagtatcctgggtctgatttcccctgctcttaccttggagcacacagcccgtgctaagggttctgtgcctccccacatcactccccgtgttggcctctccaaagacagtctctttcacacacctcccctgccccaggactcctcatcagatgaaacgaacccctctcatgtcctggatccagtgaaccactttcactttgttagtggggacacaagtttcatccaaattggcaagccactcctgctgcccccaaccactctgggttggattagtggtcattccccaggaggacttttatctgtggagcagactctagggcagctttctgcagtcgggtccatatatagtggcccttatatcaggatgcaaatgagtatggctttcactgagtaccagagaggatttcctcaggaatcacaaatactggtgaattccatgggccaaccgactcttctatatgtcctgcttccaattgcccttttactaattgatggagttgaatcagtttcccctgtgataggggccactgatccacccatacaggtttgtcagtcagccactctagcggcaaagcaggcactgaccaatacctctttagggtatatcgctgccggcatactcagaatccttgcccttcttgtactgtgtcactttgtggggttggtgcttgccacacttcttacagaaagtccagtgggttttagggacattcgccatgtttgtgtgagtgctgtcagcatggaaagcgataccaaatgtggcaaagcttttaagtggtcctcataccttagtagacataaggtcattcatattggaattcatactgaggagaaattctacaaatgtgaagaatgtggcaaagggctttactggtcctcttcccttactaaagaatgtggaaaagcttttaaacggtacttaaaccttactacacataagataattcctgctggagagaaaccctacaaatgtgaagaatgtggcaaagcttttaacaaatcttcatccattactaaacataagataattcatactggagagaaaacctacaaatgtgaggaatgtggcaaagcctttaacctgtccccccaacttactgcacataagataacttatactggagagaagccctacaaatgtgaaaaatgtggcaaacattttaaccaatcatcaacccttactacacatatgttaattcatgctggagagaaaccctacaaatatgaagaatgtggcaaagcttttaaccaatcctcaaaacttactaaacataagataactcatactggagaaaaatcctacaaatgtgaagaatgtggccaag

SEQ ID NO: 130446 - DNA, 312 bp, Homo sapiens
gggatgcagctccgtggctaagtagggatccccagtgactggccccaaatatcccctaagactgaccctcgttctgcagcccctcaactcgaaccgagctgcccacctttcccgggggtcggaggggcaggacgtagcgcaagcccatgtcggggttacagcttccaacccactgagttaagcaataaaacggtctgctgtcctgaccccgcccccacagggcccgcggcggagcccgcgtacgccccccagttttctcgtccccagccgcactccagctggtccttctctaggcagatccggaggcggccg

SEQ ID NO: 130447 - DNA, 870 bp, Homo sapiens
cggccgagtcgacgtttgctgagaatcatcatggaccattatgattctcagcaaaccaacgattacatgcagccagaagaggactgggaccgggacctgctcctggacccggcctgggagaagcagcagagaaaggcgcctggcggaagcgggagcgcccctgccccggagcccgggaacgccgggccggagcgcggggaggtggcgccgctggcgggcaggtctccttgggggtccgtggtccaggccaccctgcggctgttgcaaccatccccgcgcggaggggagagcgccggagagatcggcggccgcctccggatctgcctggagaaggaccagctggagtgcggctggggacgagaaaactggggggcgtacgcgggctcccccgcgggcccttgggttggaagctgtaaccccgacatgggcttgcgctacgtcctgcccctccgacccccgggaaaggtgggcagctcggttcgagttgaggggctgcagaacgagggtgtatgtgtgtacccagtcaagctggaggaacttaatcaatacttgttgagcgaatggatgttgaaacagagaggcagcgttggcaagtgcatagaggtggttgtgaataaggcccacatcccgattctgcagacagggggttatctggcgggcaagtctggttatctgggcatgaagccactggttcggaagcaagctcagcataggcccacattgctggccctgggactgttctgggaatatggagctgagcatccctgcgtcccgctgccctgcccccagcagcagccagccctgcctactcaatgtggagacaaccaggatgaaaactttcatgatgatccacttccacttactgaatag

SEQ ID NO: 130448 - DNA, 1447 bp, Homo sapiens
atggacagaatcctgggactagtgccagtgactctgtggatacgccgagcgatctgggcgtgcactgctgtggtggcctttatggtcaggaggcgacatgcagtgagaagaagggaagaactggcccaaagggattcagcccagggtgaggtccacggaaaggccagggccaagatgcagccagcaccccaggccggtggtggcctcacatcacccatgccagaggtcagtcctcgattgctccaaaccctctgctcaagggttcagaaggaaatgagcaggtcttcccatcagggcccagatgagcttctgaaaacaagtgtgacaaaacaacctcctgaacatcctggaatgaccgatgcaaagtacaccccacacggttcacagcacgaagatcatcaggggcaaaccgtggacgatctgaatgacagcacagaccgtcagcaacctgcagagctgcctggccaagaaattacgagacggaagcaacgcttgcaggcgaaggaggagaagaaggaaaggccagagcaggcaggggcaggagtggaacgggccgcgaatgtcggagtgaagtgcagaccttcctggcccacacccctccgagcatgtgctcgagggcagtgtaaagaactcacagcggaagtccaaagtcttcctgcaggcctccctgcggggcacgagggcacagctggagagggagcttccaaaactgcagctgagggttcccgctgcctacactgcaccgagaactcccgtgatggggtctcacgggagtccacggaggagaacgcctactgcctggacctcgaccagagacttcgaaaggtgcacgaaaacacttgcaaccactacaagaagatgacccaagacctggcccaggaatcgaaaaaagacacttccaattttcagagggagatcttcttccgtgagaaaatggcccaggaaggccggatggctgctgtatccactgagacagcgctccagccgctccgggaagaaaatgaccacagcaggcagaagccagctgattttgaggccaagttccagcttctccggggtggtgctttggctcctggggttctgcccgcagcccacaggggcccggaagtgtcagggggaccatgggacgacagggcccccagaagggaggcaggtcacaatcaatcagaagatgttggagaatcctattcacaggaatacttggtagattcgcagtttgaagagtccccaccatgggcacatggattgcaggaggctagaggaccaggaaaggcaattgcgggtgtccctgtgagaagcgaagagggggtgactgcagcagaggcagcggattggcaggaggttcccctgaaggatgctaaggaatacgctgaatccataggtgccatcgtggttgagacaagtgcaaaaaatgctattaatatcgaagagctctttcaaggaatca

SEQ ID NO: 130449 - DNA, 978 bp, Homo sapiens
ccctcggacggccccggaggatgctgctgagccccggcactgcctggctgcgagcacatgatggcgatacgggagctcaaagtgtgccttctcggggacactggggttgggaaatcaagcatcgtgtgtcgatttgtccaggatcactttgaccacaacatcagccctactattgggggcatcttttatgaccaaaactgtgccttgtggaaatgaacttcacaagttcctcatctgggacactgctggtcaggaacgttttcattcattgctcccattgtacttagcggggctcagctgcagctgttatcgtgtatgattttaccgaggccggattccattttcatcccttgaagaaatgggtccaagcggctgaaagaacttggtccggaaaaacattgtaatggccatcgctggaaacaagtgcgacctctcagatatttagggaggttccccctgaagggatgctaaaggaatacggctgaatccataggtgccatcgtggttgagacaagtgcaaaaaatgctattaatatctgaagagctctttcaaggaatcagccgccagatcccacccttggacccccatgaaaatggaaacaatgggaacaatcaaagttgagaagccaaccatgcaagccagccgccggtgctgttgacccaagggcccgtggtccacgggtactttgaagaagccatgagcccacatcctgtggcactgctgaaggaccctacgcttcggtgggcctgggcacctcactttgagtaagagtgaggcacactggctttgcatcctggaagacctgcagggggcggggcaggaaatgtacctgaaaaggattttagaaaaccctgggaaaacccaccacaccaccaccacaaaatggcctttagtgtatgaaatgcacatggaggggatgtagttgcatttttgctaaaaaaaaaaaaaaacctttaaaaattgttggatgtgtaaaa

SEQ ID NO: 130450 - DNA, 1185 bp, Homo sapiens; identical to SEQ ID NO: 115117

SEQ ID NO: 130451 - DNA, 516 bp, Homo sapiens
atgcaacttttctgcaagataagcaatcctacgggaccgccagatggttacaagttcctgatacctagtacagccacggaaagagaacaaaagcctcttattcctgatgtagcttccccattctccagccaatcaacacccaaagcccaagaaaccacaggttcccatgccacccctaatcctgctcaaagcagccctgagaaacatcgcccattatctctccataccacccccaaacattttcaccgtcccaacactctgccagggtgggatctgagtcttccgactaatatcagaagccaggattgtgaggcctctgagcccaaccctatgcgcactgatagtcgcctgtgtgactgtgcgacgtacaaatttagatggccggttcctgcgtttagtgatgagtttccgagcacaaggtctcgtgaaaagggcctgttcttaccttcactgatgacatcgtctcgtgaacttccttctacctggctcatcttggctcaaaagctcccctactga

SEQ ID NO: 130452 - DNA, 429 bp, Homo sapiens
ggcacgagagctgatatctcctggtgctatccccaaactgccactcttaactcttgaagtaaataaataatctttcctggcaggactatggtgaatctccttaagcactctctaatcagacatcctgagtcgtcccaattcttagaccttttatacctgtttttctccttctgttattccatttagtttttcaattcatacaaaaccgtatccaggccatcaccaatcattctatatgacaaatgtttcttctaacaaccccacaatatcaccccttaccacaagacctcccttcagcttaatctctcccgctctaggttcccacgccgcccctaatcccgcttgaagcagccctgagaaacatcgcccattctctctccataccaccccccaaaaatttcaccgccccaacacttcaacactattttg

SEQ ID NO: 130453 - DNA, 438 bp, Homo sapiens
atggccaattactcttgtccttggagaggttttaaaggggtcacaattgaagcagactccaaggtgcaggcgagagctgccggaggcaagggtctccgatgccgtttcttgttctcatcatgtagacaaaacagccctgctgcaaagatggtcaacgtacctaaaaccggaagaaccttctgtaagaagtgtggcaagcatcagcctcacaaagtgacacagtataagaaggaattgtggaattcccactatattgaagacatggaaaatgagaatgaaaactcagttcctactctcaaaactgtacaatcttgtaaaaatgttaagaatttaacaggtcatgctgatgcaacaggtgggctcccacagcccttgggcatctcctctcctatggctttgcagagtacagtccccctcctggctgccttcacaggctga

SEQ ID NO: 130454 - DNA, 593 bp, Homo sapiens
tgcggtacccggccggaaaaccgggtcgacccacgcgtccgccctttcctgttaggcgagagctgcgaaaggcgagagctgcgaagggccaggtgtcgggcgctgtttctcgttttcatcatatagacaaaccccgccctgctgccaaagattggtcaacgtacctaaaacccgaaagaaccttttgtaagaagtagtggcaagcatccgcccccacaaagtgacacagtataagaagggcaaggattctttttatgcccacgggaaggaggcgctatgatcggaagcagagtggctatggtgggcagacaaagccaattttccggaagaaggctaagaccacaaagaagaatggggttaaggctggaatgtgttgagcctaactgcagatccaagaggattgctggctattaagagatgcaagcattttgaactgggaggagataagaagagaaagggccaagtgatccagttctaaactttgggatatttttctttcaaatttgaagagaaaatggtgaagccatagaaaagttacccgagggaaaataaatacagtactattcttacgcaaaaaaaaaaaaaaaaaaaac

SEQ ID NO: 130455 - DNA, 1572 bp, Homo sapiens
atgaagacgtgccttgcttttcccttggccttccaccatgattcaaacggatcggcggtcctaagacttcaagcaacccacggaatttctagtgacagccctctcccatctgtagaaaaggcgagccattctccggaccccagcgaatactttaggaagcacccacctgttcgcagatcagggctccggactaagcgcacgagcccaggcccgggagcccgcgtacctggcagtcagtctttccgcagcgccgaggcttgcggtgtggccgccctggaatgttggcgccgtcgtgtccctgtccccctttcgtcgccagctgaggtgcaggtcttgctcaagaaggcgcttcgacctgaaagcaggcctttcagaaatcagatcttacacaattgtgagagaaactgggggaataaaggttggaaagggctcgttggaagatcggagtcgcaaaccggacaatctgagaagctgagcatgtccagccaccacagagggactgtgcgggaggagctggtggtagaggaatatatagggggttggtgcctctgtgggtctgcatggaagcttctggtgacagggctggagcagctgctcttcagcaggacccgccctcaggaggaggctgtggacaaaacctggaggacagccaggcagctggagtcagggacacttttgtgtcgtcattgcatcacattgccctggccttctgagaggaatggtggttgtttcctttctccctccaacatgcttgtctgtgagttaagggttctttctgtcatcgttgcatccccagagcctagtacagaacatacacaggaacacttatctggagatgaatttgagaaatcccaaccaagtcgaaaagagaaaagtttaggattattgtgtcataagttcttagcacgatatcctaattatcccaaccctgctgtgaataatgacatctgccttgacgaagtggcagaggaacttaatgttgaacgtcgacgcatttacgatatcgtgaacgtcctagagagtttacatatggtgagccgcctcgccaaaaacaggtacacttggcacgggcgacacaatctcaacaaaacccttggcaccttgaagagcatcggggaggagaataagtacgccgagcagattatgatgatcaaaaagaaagaatatgagcaagagtttgactttattaagagttacacttctgtaaacagccgcaaagacaagtctttaagggtaatgagccagaaatttgtgatgctgtttttggtgtcaacgcctcagatagtaagcctagaagttgctgccaagattttaattggggaggaccatgtggaagatttggataaaagcaagtttaaaactggctccctggttcggctctttgccccttgcctctctggtgctggcagcaagcttccaggcctggtagaggcactggcctttgaggtatcattggctgccttctcagtggtggcatctgtggagtcttttgagccagtagctttagaagagtgggtggtgcacaccgttgggctcaggccttggggtggcgtcacactttggtgggcttga

SEQ ID NO: 130456 - DNA, 452 bp, Homo sapiens; identical to SEQ ID NO: 128817

SEQ ID NO: 130457 - DNA, 1701 bp, Homo sapiens
atgccctttaagtgtaaaaagcagcatactttcaataaaaccagtccaaaggaaggagccatcattttcacccacggctgtctgtgcacgtctccttttaactctgagctcagtgaacacttggggaatttgaaattgtcctcatgggaacatctacaccatagaagtcagcaaacactctcggtcagactccacgtccccactccacagccagttgagcacgaatttatccaactgatttatattcacacaggtgcaaaattacaggcgagcaaggttattattgcaacaaaagatgggaagcgacgtaaaagtcccttgtggcagctgaaatatcctaaactaattctccgagaagccagcagtgtatctgaggagctccataaagaggttcaagaagcctttctcacactgcacaagcatggctgcttatttcgggacctggttaggatccaaggcaaagatctgctcactccggtatctcgcatcctcattggtaatccaggctgcacctacaagtacctgaacaccaggctctttacggtcccctggccagtgaaagggtctaatataaaacacaccgaggctgaaatagccgctgcttgtgagaccttcctcaagctcaatgactacctgcagatagaaaccatccaggctttggaagaacttgctgccaaagagaaggctaatgaggatgctgtgccattgtgtatgtctgcagatttccccagggttgggatgggttcatcctacaacggacaagatgaagtggacattaagagcagagcagcatacaacgtaactttgctgaatttcatggatcctcagaaaatgccatacctgaaagaggaaccttattttggcatggggaaaatggcagtgagctggcatcatgatgaaaatctggtggacaggattcagctccaactctgggatcccgtggatggaacaacagcctcttcagctgtgccaaagcaaggaagggacaagaggagagaagtccccaacaccctctcccagccaaacagccaagaaggcctcatctcagccttccacagccgctgcgtgcatgctgtattttataaactcacgtcagcacccaagacaacatccctaccagacgtcccttctgacctcctggcagagggcttggcggcatctagagcaggtcaagccttatggaggtgtgataagaaatcccttcttaccttggttcgtaagataaacttgcagggcaagagggatggaggaagatcagccacgaaccagcaatcccagcctcacttggataacaccggccttgaaagacagctcgagcagaaggtgggacgatgccgatcaccttggagaggtctcggccatcttgaaggaaatgctcagaaggggcacctgcttcacggtgttaacaagaatgggcagcacctgcttcggcgccacggggtcagcatccgcgcgggccgcgccccgcacctggcagctgctgacacagcaccgggacgcatttcctgcctgggtcactcagaggcgctcaagcctaggatccaagctggagggctgggtgcggagagtatttggcaggtgttgtgggaaggcgggagtaacagcagcgttttttgtcggcatgatgaagagccggctgccgagcttcctcttcctggcaagcaggcgagtggtggccacatgaaaagaatgaggagctga

SEQ ID NO: 130458 - DNA, 462 bp, Homo sapiens
atggatcctccgaaaatcccacacctgaaagagaaaccttattttggcatgcggaaaatggcagtgcgctggcatcatgctgaaaatctggtggacaggccccaaagaggaaagacactaacccaggcttctacacatggtgggagcagcgttccaggtgatgagatcagcagctgggagacctgctgcgtgcgaactgagtatgttcctaagacgcctaaggagttcagcacggggctcggggtccactgcgacactgcgcggacagcggccgctcggctgggcctcaggcaccaggagcagctcaaagtcatgttcatcggaggccccaacaccaggaaggactatcacatcgaagagggtgaagaggtaggtttgactggtctccctggatctaggcctgcgggcaaggagcctggccctagcgggagggggcgcttcccactcgaggcccagagatga

SEQ ID NO: 130459 - DNA, 2028 bp, Homo sapiens
atggcctgggcaggacggggccggggcagccgtcagggttccgagctgcatcttccctgggccatagatgtctgcttatttagtttggtccgttcagggttccgtttcctaagggaggtttggtgggagatctggaagaaagtgctgctgcttctgcatgtagcaaatggtgcccagcaggcagggcccatcccctggaacacagggctacaagccaaccactctgtgcctgtgagtaaaccacaccaaaaatggccagtccagcacttccaggagctgctcaggtcagcaaactctttgacagctcctttcaaacaggtacagtactggagggggacaaagatgaaccagagggtccctgtgccccaaattcacagctggttccgaatgttctgtggcatggctcatgagagccacggcatagggaagtggggtgtggctttggagggacaccctcctggcccaggaaaacaggaaagcatagccaatgcctgctgggaggcagcagttagaagtccaggctctagatctcacaaagcagagaccaaatcttcaaaaagcagagaccaaatcctgtctgtcctgcgacctgccagctttgtcagggacaagagcattccacagccctggctggagagtgatgggattaacaagagatggagccccacatgcctctcaggggaaccctcgcttggtcgagtgaaccctctgctacatgagcttcagactcagtgctttgtaagaacaccaagttatcagagggctacagaggcagcaaagcctcaagagagatgcacaatccaactgaataagatgtgttgtctgcaagcagggtcattctcaaggtatgcttcagttattgctatcaagcacatctgccatgcacattccacccccaaagcccttctgacttcattcttggttcttactactactcgaagtctgaacttacacttacaccttcgcctttcacatccagacaaattcagagatggaggagtatcatcttcacagtactcccgctactgctccttaactcagccagactttgactctagcaattcctctactttcttcctcctattaaccatatcccttctaagtagccaattctgtatcaggcttatatccctgcctgagtgtcccgtcagtcaatggcaggaagcagcccgtgaacatcttggagggggcagtgatttgtcctcaatgggggagacacatccagatttgggtgggggccccagtgagggccctggtggctggccgtgggagcaagtcagtgcagcatttgctcagcttgtgcttgtgagcaccatgtccttccaaggcacttggcgaaagagattctcctccacagacacacagatcctgcctttcacctgtgcctatggcctcgtccttcaggtccccatgatgcaccaaacgaccgaggtcaactacggtcagttccaggacactgcaggccatcaggtgggggtgctggagcttccttacctgggaagtgcagtgagtctgttcctggtgctgccccgtgacaaagacacccccctgagccacatcgagccacacctcacagccagcaccatccacctctggaccaccagcctgaggagagccaggatggatgtgttcctgcccagtgaattgaccaaggaaccttttcgttgggatcagagactctttgcattagtgttgcggttgcctggcaccatgtcagtagaatcagaacagttgacaggtgtgcctttagatgactctgcaatcacaccaatgtgtgaagtgacaggcgtgggtatggagtgctttagtgatgctaaagacaccattgaagacctttcagaaatgcatgggagtcaagacctctcagaaatgcgggggaaccccaccaagccttcacccccactctctgggaccacagtggagaattttggcagcagagggacagacagctatgaggccttctctgagccttctttgggcaaagagcctgtcacacacaggaccagggttccactccagtggccctga

SEQ ID NO: 130460 - DNA, 819 bp, Homo sapiens; identical to SEQ ID NO: 114163

SEQ ID NO: 130461 - DNA, 217 bp, Homo sapiens
catttacaatttcgtatctggtggtcacaagaggcccatctgcaggctcagctaaatcggactaatagtattctaattactcaggctcagctcacaggctccgatagtttctctgatacttatgcccaattaaactttgatgctcttaccacagaacaagtaacaaagccaaattacaagatgccattgaaaaatctgtctgatgagcatgctcaag

SEQ ID NO: 130462 - DNA, 135 bp, Homo sapiens
ttatccttcttcctcctcctcctcttcctcctcctcctcctcctcctcctcctcctcctcttcttcttcttcttcttcttcttcttcttcttcttcctcttcttctttttcttcttcaggtatgttcttgtacat

SEQ ID NO: 130463 - DNA, 426 bp, Homo sapiens
tcaagcatatactacattgattatttccacctcctcctcctccttttcttcctcctcctcctcttcctccttctcctcctcttcttcctcctcctcctcctccttcttcttcttcttcttcttcttcttcttcttcttcttcttcttcttcttcttcttcttcttcttcttcttcttcttcttcttccttggccttgccacctcaatttctaccatagatttaagtctagaagcaacaagagtggtacatcgaattggcacaaaaggtacacccacaggtccctttagctccccttcctgggatgtgtcaacagtcatggggacctggagctcagggagggaagatgccagcccgtggggctgctgtggtgagtggggggggctgcttttctttggtttctcactctggggtgggcatcgccccat

SEQ ID NO: 130464 - DNA, 3747 bp, Homo sapiens
ttactacagttttctgaatctgatgatcctccaccttttcctcaaccttcctctcctgcacggccttcgttatctgatcagcctctccctccagctactcctcccctacctgacagtgtagagaattcaatgtctaactctggtgactttgacttatggtcaccccctgatgatcttatttcttttcatgaagagctgttactcaggcagctcacaggctctgatagtttctctgatacttctgtccaattaaactttgatgcccttaccacagaacaagtaacaaagttgtgtatgagagcttgggataaattacgtgctccaggccaagctcctgtttcttttaccatgattaaacaaggtcactctgaattataccctgattttttagctaaattacaagatgctgttgaaaaatctgtctccgatgagcatgctgaaggcattctctttcgccatcccaatgcaacccccagcacaaacaaatctacctacagccaaaccaaatgggttccagcctctccttctgtctcagtacaatgcttgtccacctccacagtaggaggcggggcagttgatctctgtagtactattcctctgaatttactacctgactctttgcctttgactgtccccactggccctttacctcaaggttcagtgggcctggtgttaggtagggcatctagctctgctaaaggaatcaccattcatactggtctcattaattctgattctgttgatgagattaaattaatcacatctgccaaggttcctgtttccattctggctggtgagtcaatcgctcaattgcttttactacctaatatcattttaaacaaaggagataagacacgtggccctgggatgggctccagaggtgaaaaggccgcttattggattaatgtaatttctaaacaaaggcccacctgcaccatacacattcaaggaagaaagtttgagggcctagtagatactggtgctgatgtttctgttatttcctctagtttatggccttcctcttggcttaaacatcccactaacatgggactagtaggtgttggaaaggccgaggaagtttatgggagcacatttatcttgccttgcactggccttgatggtcaaaagggtacaattcagccctatatcatgacaattcctattaatatttggggtagagatttactggcacaatggggggctgaaattaatattccacataactcttatagtgctcccagtcagcacatgatggaaaatagggggtttgttcctggactcggtcttagtccaaagcatgaagggattactaaactcctcccagttactataaaagaaaacaggttatcctttttagtggtggctgctgccacacctcctgatcctatacctttacagtgtaaatctgacacacccgtttggattcagcagtggccactttctaaagaaaaactggaggctttaactcacttggtttctgagcagttactacttggaaatgtggaaccttctctttccccttggaattatcctgtgtttctagtaaaaaagaaatcaggcacatggcagatggattgtgagaaatttgcttttactgtaccatctatcaataatcaggagcctgcagctcgttatcaatggaaagtacttcctcagggaatgctaaatagccctacaatctgccagctttatgttggacaagtgctttcaccagttcgagcccaatttcctgaggcctatattcttcattatattgatgatattttaattgctgcccccacagataaagaattaattgactgttaccaaattttgaaccgctgtgttacagaggccggattacacatcgctcaggataaaattcaacagaccactcctgttcaatatttagtaatggtggtcgataaacaatgtattcaacctcaaaaagttcaaattaggagagattctttaaaaactttaaatgacttccaaaaacttttgggtaacattaattatttaagacctactttaggcattccgacctatgcattgtctaacttgttttctacgctgaggggagcttccgatctccacagccccaggactttgacccctgaggctttactagaactggaattcatagaggaaagaatccagactgcccagttatctagagtaaagccgtttcagccttttcagcttctggtttttgcttcattacactcccctactggactaataattcaacataatgatttagtggagtggttacaacaggtggcttgccaatgtagacaccctttctatattacacatattagatctcataccactttaccaggatccatgtctgccggtaaccataaagtcgactgtttggtctcttttacaacccaagaagctcaggagttccataatctcactcatgtcaatgctgctggattaaaagataaattttctcttatctggaaacaggctaagtttattgttcacagctgccctcagtgccaggtcttcgtacttccaaatcaggaaactggcattaatcctagaggcctaactcctaatgctttatggcaaatggatgtgactcatgttagctcctttggcagactgtcatatgtgcatgtctctgtagataccttctcaggttttatctgggctacttgccaaacaggggaaggcacggcccatgttaaaaaacatctgtattcttgctttgcagttatggggcttccatatcaaataaagacagacaatgcccctgcatatgttagtaaggcttttgatacatttatgcaacagtggggaatttcccatattactggaatcccttgcaatcctcagggacaagctgtggtggaatgggccaatcgcactttaaaaacccaactgtccaaacagtctgaacaaccaaaacatgatttaactactccccacttccaattacatttggcattgtttactttaaattttttaaatgttcctaaagataatattctaactgcagctgaatgccattatacaggcaaaaaattcttcttaaatgaaggcaagccagtgttatggaaaaactcccaaaccaatacctgggaacctggcacaattataacgtggggaagaggatatgcttgtgtttcaccaggagatcatcaatcccctgtgtgggtacccaccagaagactcaagcttcgggtgaatactgacaatgaaaaccacagaggaaagacgtctgtgtcagagactgccctcagacatgtttcctctcacactgatttacctgctacacatgattattcttattgggcttatgtgccttttcctccacttattcgacctctcacctggatagatgctcctgcagaaatctacactaaccacagtgaaaggaatgttggctttgtttcccttcatggaggtctagccatcatgtgggaccagaataatgtcttgcggcaactgaatgcttctggccatgactacacccttggtctggggtatctaaccttttggcttcccttggctacattggaaggagaagaagaagaagagaaagaagaagaaggaggaggaggaggaggagaagaagaagaagaagaagaagaagaagaagaagaagaagaagaagaagaagaaggaggaggaggaggaggaggaggaggaggagaaggaggaggaggaggaggaactttcttgggctacacaaaatacactaacactaaaatagctgatctaaaaaaaaatcacaaaaaacatactgtttaa

SEQ ID NO: 130465 - DNA, 786 bp, Homo sapiens
atggcctgccagctgtggatgcaactaagggagccaagaaagacaggctttcaagccctcaccctgaaatttccccatggcctttccaggagcgtgatacactgtgaaaaggtaaccaataaaagcccctttcttgagcacactgaagtaaggaagacagtttacaagtcactctccaaagcccctagctgcctgggcaaaagagtgagaacctgtctcaaaaaaaaaagaaaagtgggatattctcgctacctctgcattctagccgttagcggcttggtgactgttattccagacctgtttccagtgcagatggtccccatccctgctggagtatttacaatgggcacagatgatcctcagataaagcaggatggggaagcacctgcgaggagagttactattgatgccttttacatggatgcctatgaagtcagtaatactgaatttgagaagtttgtgaactcaactggctatttgacagagcctcctgtggatgccgtcctggccacagaccactcactgaaaacacagaaacagcagcaattcaacttagggagaattccagatcttatccaggaccaacaaggcggtacctgtataagtctgcaaaaaccagtgttactgcatttggggcccaagtcccttcgaatacctggaaagccttcccaagaaggagaggcacacacaagcccagactgtggagactacaataaatacctaactcttcaatgcctagacaccagtgaatatctacacgtatcaacaccatccaggaaaacatga

SEQ ID NO: 130466 - DNA, 1914 bp, Homo sapiens
atggggagaaaacagagcagaaaagctgaaaattctaaaaaccagagtgcctcttcttcaaaggattgcagttccttgccagcaactgaacaaagctggacagagaatgactttgatgagttgacagaagtaggtttcagaaggtcagtaataacaaacttctccgagctaaaaatgtatgttcgaacccattgcaaggaagctaaaaaccttgaaaaaaggagcacccaattcataaaacaagtccttagagacctacaaagagacttagattcccacacaataataatgggagactttaacactccactgtcaatattagaaagatcaacgacacagaaggttaacaacgatactcaggaattgaactcagctctgcaccaagtggacctaatagacatctacagaactctccaccccaaatcaacagaatatacattcttcttagcaccacatcatacttattccaaaattgaccacatagttagaagtaaagcactcttcagcaaatgtaaaagaacagaaatcacaacaaactgtctctcagaccacagtgcaatcaaattagaactcaggattaagaaactcactcaaaaccacacaactacatggaaactgaacaacctgctcctgaatgactactgggtaaataatgaaatgagagcagaaataaagatgttctttgaaaccaatgagaacaaagacacaatgtaccagaatctctgggacacatttaaagcagtgtgtagagggaaatttatagcactaaatgcccacaagagaaagcaggaaagatctaaaattgacaacctaacatcacaattaaaagaactagagatgcaagagcaaacacattcaaaagccagcagaaggcaagaaacaactaagatcagagcagaactgaaggagatagagacacaaaaaacccttcaaaaaatcactgaatccaggagctggtgttttgaaaagatcaacaaaattgatagactgctagcaagactaataatgaagaaaagagagaagaatcaaatagacacaataaaaaatgataaaggggatataaccacagatcccacagaaatacaaactaccatcagtggatactataaacacctctccacaaataaactagaaaatctagaagaaatggataaattgctggacacatacaccctcccaagactataccaggaacaagttgaatctctgaatacaccaataacaggccctgaaattgaggcaatagttaatagcccaccaaccaaaaaaattccagtatcagacgaattcacagctgaattctaccagagaaccaacgacaaaaaccacatgattatctcaatagatgcagaaaaggccttcgacgaaagtcaacagcacttcatgctgaaaactcttaataaactaggtattcatggaacgcatctcaaaatattaagagctgtttatgacaaacccacagccaatatcatactgaatgggcaaaaactggaagcattccctttgaaaacccgcacaagagaaggatgccctccgtcaccactcctattcaacatagtgttggaagttctgaccagggcaatcaggcaagagaaagaaataaagggtattcaattaggaaaagaggaagtcaaattgtccctgtttgcagatgacgtgattgtatatttagaaaaccccattgtctcagcccaaaaactccttaagctgataagcaatttcagcaaagtctcaggacttcgagtgctagcgaacgtctatgggagcttccaggacatggaaacacaagggctgaggttctttgggcagaattcagtcccccaacagctgcgcccctacaatggtgcctcgctgcagacactcgagtctggggaaaaggcaagtgcccctgcaaaagatcactgtctagtgtaa

SEQ ID NO: 130467 - DNA, 1382 bp, Homo sapiens
ccaaaaccccatttgtaggttaccaacatcaaagaccaaaggtagataaaaccacaaagatggggagaaaccagagcagaaaagctgaaaattctaaaaatcagagcacctcatctcctccaaaggatcgcagctccttgccagcaacggaacaaagctggacagagaatgactttgacgagttgacagaagtaggcttcagaaggtcggcaataacaaacttctccgagctaaaggagcatgttctaacccgtcgcaaagaagctaaaaaccttgaaaaaaggttagatgaatggcttactagaataaacagtgtagagaagaccttaaatgacctgatggagctgaaaaccatggcacaagaacttcgtgatgcacgcacaagcttcaatagctgattcaatcaagtggaaaaaaggatatcagtaattgaagatcaaattgatgaaataaagcaagacgacaaggcggcagagacctgcaactggcgctgggtgagtgaatcgctacggcaactgcgcgccagcgttgatgccttccacgcccgcgccagccactataatgccggagaatgcttacatcagcttgcggcattaaacagtcgattaaattgcgcacaagagatggcccggcgcgacagtattggtgaagttcctcctgtgccgtggcgcacggtcgttggctctggcattgccggagaagcaaagcttgatcatctgcggctggtgtctttaattggccgcgaagtgaacaaggaaaactcaccggcagctacccggtggctgtttagttttcaagctggcgcactggcgggcgggcaaattgttttacaagcagcaaaacccaatgcccatgggcagcctgtggtagctacccgcaacctgcttaatccagctggcattgtggcagtgctaaagcagcgccccagattggtggctgcagcagtccaggcattttacctacgagaccctattgacctgcgagcttgtcgtgttttcaagacattcttgcctgaaacacgaataatgacatcgtattatgccatagagtggtcgctctggacactagttgacgtgcttcatgcggagaatagtgagtcagcgcacatgtcccataactcgtatgatccgccatcggatgtcgcgcgtcatcttactcatttgcccatgtctcctatccctgattatatcatcgctaggttccgttaccgtcatcgctcaagagtgcgtcttaccgctcgaaagttaagtcccgcgttcatgcgttgctcgtccgagatacaaaggtattctactatgttggagagaggcttcaacgggggatattgtcgctctacaacagttagagtggtcaccgaggcgactcgtatgttgagtttctaa

SEQ ID NO: 130468 - DNA, 1194 bp, Homo sapiens
atggctcatgcctgtaatcccagcactttgggaggccaaggaaaaaaagtcaatgtcagtaatctggaaactcttctaaataatatagaaatcgaagttgggaaagaggaatatgaggacctactgaaccatctgccagttgatgaaaatgaaatggttgatgtgaatgtggtgatggatgaagcaaaagcttttacaggagaaaaagttaatgtcagtaatctggggaatgagctgaggaaaatggggctcgtactcactgatgaggagcacgagaagctgctgaaaactctgccaattcgcaggccaagggtcaacacaaaaaaggtggagatttttttggaaaacatgggaactaaaatcaaggatgaggaacttgaggaactcattacccaactaccaactgaggaaaggaatagcgtcaacatcaacgaaaaggtcatctacaccaaaaccccatctgtaggtcaccaacatcaaagaccaaaggtagataaaaccacaaagatggggagaaaccagagcagaaaagctgaaaattctaaaaaccagagcacgtcttctcctccaaaggattgcagctcctcaccagcaactgaacaaagctggacggagaatgactttgacaaattgacagaagtaggcttcagaaggtcagtaataacaaacttctccgagctaaaggagcatgttcgaacccatctcaaggaagctaaaagccttgaaaaaaggttagacgaatggctaactagaataaacagtgtagagaagaccataaatgacctgatggagctgaaaaccatggcacgagaacttcatgatgcatgcacaagcttcaatagccgattcgatcaagtggaagaaaaggtgaagagagctactgatacctataatttaggaattgcccttgaacaccgaaaagagatgctaaacctctggcagaagatccgaggggatttgattgggatggactctagaaatgagtccttttatgacaccttttctacttatacatggtcctggaatgtttgccaagaattactttctcctaaggacttaaggttatatgatgcctatgtgaatagaaattcctcccataactccagatcctcttcctcatcagataccagtgaatgttacacagactcaggaagaaaaagaaaacggaaaggtttaaagggatttcaacaatga

SEQ ID NO: 130469 - DNA, 1909 bp, Homo sapiens; identical to SEQ ID NO: 119720

SEQ ID NO: 130470 - DNA, 1791 bp, Homo sapiens
atggataaattccttgacacatacaccctcccaagacttaaccaggaagaagttgaatctctgaatagaccaataacaggctctgaaattgaggcaataattaatagcttaccaaccaaagaaagtccaggaccagacggattcacagccgaattctaccagaggtacaaggaggagctggtaccattccttctgaaactattgcaatcaatagaaaaagagggaatcctctctaactcattttatgaggccagcatcatcctgataccaaagcctaggagagacacaaccaaaaaagagaattttagaccaatatccttgatgaacattgatgcaaaaatcctcaataaaatactggcaaaccgaatccagcaacacatcgaaaagcttatccaccatgatcaagtgggcttcatccctgggatgcaaggctggttcaacatacgcaaatcaataaacgtaatccagcatataaacagaaccaaagacaaaaaccacatgattatctcaatagatgcagaaaaggcctttgacaaaattcaacaacccttcatgctaaaaattctcaataaattagtgttggaagttctggccagggcagtcagacaggagaaggaaataaagggcattcaattaggaaaaggggaagtcaaattgtccctgtttgccgatgacatgattgtatatctagaaaaccccatcgtctcagcccaaaatctccttaagctgataagcaacttcagcaaagtctcaggatacaaaatcagtgtacaaaaatcacaagcattcttatacaccaataacagacaaacagagagccaaatcatgagtgaactcccattcacaattgcttcaaagagaataaaatacctaggaatccaccttacaagggacgtgaaggacctcttcaaggagaactacaaaccactgctcaatgaaataaaagaggacacaaacaaatggaagaacattccatgctcatgggtaggaagaatcaatatcgtgaaaatggccatactgcccaaggtaatttatagattcaatgccatccccatcaagctgccaatgactttcttcacagaattggaaaaaactactttaaagttcatatggaaccaaaaaagagcccgcatcgccaagtcaatcctaagccaaaagaacaaagctggaggcatcacactacctgacttcaaactatactacaaggctacagtaaccaaaacagcatggtactggtaccaaaacagagttatagaccaatggaacagaacagagccctcagaaataatgccgcatatctacaactacctgatctttgacaaacctgagaaaaagaagcaatggggaaaggattccctatttaataaaaggtgctgggcaaactggctagccatatgtagaaagctgaaactggatcccttccttacaccttatacaaaaattaattcaagatggattaaagacttaaaggttagacctaaaaccataaaaaccctagaagaaaacctaggcattaccattcaggacataggcatgggcaaggacttcatgtctaaaacaccaaaagcaatggcaacaaaagccaaaattgacaaatgggatctaattaaactaaagaccttctgcacagcaaaagaaaccaccatcagagtgaacaggcaacctacagaatgggagaaaatttttgcaacctactcatctgacaaagggctaatatccagaatctacaatgaactcaaacaaatttacaggaaaaaaacaaccccatcaaaaagtgggcaaaggatatga

SEQ ID NO: 130471 - DNA, 1821 bp, Homo sapiens
atggataaattcctcgacacatacgctctcccaagactaaaccaggaagaagttgaatctctgaatagaccaataacaggatctgaaattgtggcaataatcaatagcttaccaaccaaaaagagtccacgaccagatggattcacagccgaattctaccagaggtacaaggaggaactgcatataaacagaaccaaagacaaaaaccacatgattatctcaatagatgcagaaaaggcctttgacaaaattcaacaacacttcatgctaaaaactctcaataaattaggtattgatgggacgtatttcaaaataataagagctatctgtgacaaacccaaagccaatatcatactgaatgggcaaaaactggaagcattccctttgaaaactggcacaagacagggatgccctctctcaccactcctattcaacatagtgttggaagttctggccagggcaattaggcaggagaaggaaataaagggtattcaattgggaaaagaagaagtcaaattgtccctgtttgcagacgacatgattgtgtgtgcagaaaaccccattgtctcagcccaaaatctccttaagctgataagcaacttcagcaaagtctcaggatacaaaatcaatgtacaaaaatcacaagtattcttatacaccaacaacagacaaacagagagccaaatcatgagtgaactcccattcacaattgcttcaaagagaataaaatacctaggaatccaacttacaagggatgtgaaggacctcttcaaggagaagtataaaccactgctcaatgaaataaaagaggatacaaacaaatggaagaacattccatgctcatgggtaggaagactcaatatcgtgaaaatggccatactgcccaaggtaatttacagattcaatgccatccccatcaagctaccaatgactttcttcacagaattggaaaaaactactttaaagttcatatggaaccaaaaaacagcccgcatcgccaagtcaatcctaagccaaaagaacaaagctggaggcatcacactacctgacttcaaactatactacaaggctacagtaaccaaaacagcatggtactggtaccaaaacagagatatagatcaatggaacagaacagagccctcagaaataatgccgcatatctacaactatctgatctttgacaaacctgagaaaaacaagcaatggggaaaggattccctatttaataaatggtgctgggaaaactggctagccatatgtagaaagctgaaactggatcccttccttacaccttatacaaaaatcaattccagatggattaaagaattaaatgttagacctaaaaccataaaaaccctagaagaaaacctaggcaataccattcaggacataggcatgggcaaggacttcatgtctaaaacaccaaaagcaatggcaacaaaagccaaaattgacaaatgggatctaattcaactaaacagcttctgcacagcaaaagaaactaccatcagagtgaacaggcaacctacaaaatgggagaaaatttttgcaacctactcatctgacaaagggctaatatccagaatctacaatgaactcaaacaaatttacaagaaaaaaacaaacaaccccatcaaaaagtgggcaaaggacatgaacagacacttctcaaaagaagacatttatgcagccaaaaaacacatgaaaaaatgctcatcatcactggccatcagagaaatgcaaatcaaaaccacattgagataccatctcacaccagttagaatggcaatcattaaaaagtcaggaaacaacaggtgctag

SEQ ID NO: 130472 - DNA, 1047 bp, Homo sapiens; identical to SEQ ID NO: 121599

SEQ ID NO: 130473 - DNA, 1140 bp, Homo sapiens
atgattatttcaatagatgcagaaaaggccttcaacaaaattcaacagcccttcatgctaaaaactctcaataaactaggaataaaatacctaggaatccaacttacaagggatgtgaaggacctcttcaaggagaactacaaaccactgctcaatggaataaaagaggacacaaacaaatggaagaacattccatgctcatggataggaagaatcaatattgtgaaggtggccatactgcccaaggtaatttatagattcaatgccatccccatcaagctaccaatgactttcttcacagaattggaaaaaactactttaaagttcatatggaaccaaaaaagagcccgcaattccaagacaatcctaagccaaaagaacaaagctggaggcatcatgctacctgacctcaaactatactacaagcccacagtaaccaacacagcatggtactggtaccaaaacagagataaagaccaatggaacagaatagagccctcagaaataataccacacatctacaaccatctcatctgtgacaaacctgacaaaaacaagaaatggggaaaagattccctatttaatgaatggtgctgggaaaactggctagccatatgtagaaagctgaaactggatcccttccttacaccttatacaaaaattaattcaagatggattaaagacttaaatgttagacctaaaaccataaaaaccctagaagaaaacctaggcagttccattcaggacataggcatgggcaaggacttcatgactaaaataccaaaagcaatggcaacagaagccaaaattgacaaatgggatctaattaaactaaaaagcttctgcacagcaaaagaaactaccatcagagtgaacaggaaacttacagaacaggagaaaatttttacaatctacccatctgacaaagggctaatacccagaatctacacacaacttaaacaaatttacaagaaaaaaatcaaacaaccccatcaaaaagtggacaaaggatatgaacaagcatttctcaaaagaacacatttatgcagccaacagacacatgaaaaaatgctcatcatcactggtcatcagagaaatgcaaatcaaaaccacaatgagataccatctcacaccagttag

SEQ ID NO: 130474 - DNA, 1065 bp, Homo sapiens
atggccatactgcccaaggtaatttatagattcaatgccatccccatcaagctaccattgactttcttcacagaattggaaaaaactactttaaagttcatatggaaccaaaaaagagcccacattgccaagtcaatcctaagccaaaagaacaaagctggaggcatcatgctacctgacttcaaactttactacaagggtacagtaaccaaaacagcatggtactggtaccaaaacagagatatagaccagtggaacagaacagagccctcagaaatactaccacacatctacaactatctgatctttgacaaacctgagaaaaacaagaaatggggaaaggattccctatttaataaatggtgctgggaaaactggctagacatatgtagaaagctgaaactggatcccttccttacaccttatacaaaaattaattcaagatggattaaagacttaaatgttagacctaaaaccataaaaaccctagaagaaaacccaggcaataccattcaggacagaggcatgggcaaggacttcatgtctaaaacaccaaaagcaatggcgacagaagccaaaattgacaaatgggatctaattaaactaaagagcttctgcacagcaaaagaaacgaccatcagagtgaacaggcaacctacagaatgggagaaaatttttacaatctactcatctgacaaagggctaatatccagaatctacaaagaactcaaacaaatttacaagaaaaaaacaaacaaccccatcaaaaagtgggcgaaggatatgaacagacacttctcaaaggaagaaatttatgcagccaacagacacatgaaaaaatgctcatcatcactggccatcagagaaatgcaaatcaaaaccacaatgagataccatctcacaccagttagaatggcaatcattaaaaagtcaggaaacaacaggtgggaattgaacaatgagaacacttggacacaggaaggggaacatcacacaccagggcctgtcgtggggtggggggatcggggagggatagcattaggagatatacctaatgctaaatga

SEQ ID NO: 130475 - DNA, 972 bp, Homo sapiens
atgagtgaactcccattcacaattgcttcaaagagaataaaatacctaggaatccaacttacaatggatgtgaaggacctcttcagggagaactacaaaccattgctcaatgaaataaaagaggatacaaagaaatggaagaacattccatgctcatgggtaggaagaatcaatatcgtgaaaatggccatactgcccaagaattggaaaaaaactactttaaagttcatatggaaccaaaaaagagcccgcatcgtcaagtcaatcctaagccaaaagaacaaagctggaggcatcacactacctgacttcaaactatactacaaggctacagtaaccaaaacagcatggtactggtaccaaaacagagatatagatcaatggaacagaacagagccctcagaaataacgccacatatctacaactatctgatctttgacaaacctgagaaaaacaagcaatggggaaaggattccctatttaataaatggtgctgggaaaactggctagccatatgtagaaagctgaaactggatccctttcttacaccttatacaaaaatcaattcaagatggattaaagacttaaacgttagacctaaaaccataaaaaccctagaagaaaacctaggcaataccattcaggacataggcatgggcaaggacttcatgtctaaaacaccaaaagcaatggcaacagaagccaaaattgacaaatgggatctaattaaactaaagagcttctgcacagcaaaagaaactaccatcagagtgaacaggcaacctacaaaatgggagaaaattttcgcaacttactcatctgacaaagggctaatatccagaatctacaatgaattcaaacaaatttacaagaaaaaaacaaacaaccccatcaaaaagtgggccaaggacatgaacagacacttctcacaagaagacatttatgcagccaaaaaacacatgaaaaaatga

SEQ ID NO: 130476 - DNA, 1761 bp, Homo sapiens
atggacacctttcttcaggctgaaagaaaggactatatggaggcctacgagttgattgagcaggaagaacagggggtgaaggagctcaacagacccctcactgctccaagtgccttgcatcccagggatgaagcccacttgatcatggtggataagctgtttgatgtgctgctggattcggtttgccagtattttattgaggatttttgcatcgatgttcatcacattaattcaagatggattaaagacttaaatgttagacctaaaaccataaaaaccctagaagaaaacctaggcaataccattcaggacataggcatgggcaaggacttcctgtctaaaacaccaaaagcaatggcaacaaaagccaaaattgacaaatgggatctaattaaactaaataacttctgcacagcaaaagaaactaccatcagactgcccgttccaaacccttgcggaccagtagctgaaacaccgctatcccgtgtgtttgtcttgcgggaagcccgaaagacgctgaagccacatcaatctacatgtttatcaaaaggtcgcgacaactcaatcgacagctggaaaaccgcggcccgtgtcttaaagacagcgataagttcgacgccaacgatcccgatcctgaaagatcagacgcaagaatggtcggtttctgcaacctttacatctgacggaaaaatccgtttattctacactgactattccggtaaacattacggcaaacaaagcctgacaacagcgcaggtaaatgtgtcaaaatctgatgacacactcaaaatcaacggagtggaagatcacaaaacgatttttgacggagacggaaaaacatatcagaacgttcagcagtttatcgatgaaggcaattatacatccggcgacaaccatacgctgagagaccctcactacgttgaagacaaaggccataaataccttgtattcgaagccaacacgggaacagaaaacggataccaaggcgaagaatctttatttaacaaagcgtactacggcggcggcacgaacttcttccgtaaagaaagccagaagcttcagcagagcgctaaaaaacgcgatgctgagttagcgaacggcgccctcggtatcatagagttaaataatgattacacattgaaaaaagtaatgaagccgctgatcacttcaaacacggtaactgatgaaatcgagcgcgcgaatgttttcaaaatgaacggcaaatggtacttgggagagttgggctggaggagggagtggagcagtggggacaggaagtccctcgctagactcagcaaaacagggacccttggcttggctgctctgacctacaaatgcacacgagaccagtggacggtatattgccgggtcatccgagaaaagaacctctgccaggacatgcggtggtaccagcgctgctgccagacctgcagggacttctatgcaaacaagatgtcgccagccaccgccgagctcgtgacacgcagtcccaagggtcgctcaaagctcagactcaggtaccagcttgtatttatcagtttgaaggggaagcccgcaagaaagggcaaggccagctcaggatcaaagctcagcctcctctccagctccaagactgtggctctggctggcatgggaaggggagatgagtttcaaatggagcttgagagtgaagatttaaccagtgaacgggatggaatcctaactcctacaagcagtaaccaaaagaagtcgaaagcttatggctccctaataaggacttag

SEQ ID NO: 130477 - DNA, 4452 bp, Homo sapiens
atgggagactttaacaccccactgtcaacattagacagatcaacgcgacagaaagttaacaaggatatccagaaatggaactcagctctgcaccaagtggacctaatagacatctacagaactctccaccccaaatcaacagaatatacattcttctcaacactacatcacacttattccaaaattgaccacatagttggaaaaatacaaattcccatcagggaatactataaacacctctacgcaagtaaactagaaaatctagaagaaacggataaattcctggacacatacaccctcccaagactaaaccaggaagaagttgaatccctgaatagaccaatagcaggttctgaaattgaggcaataattaatagcctaccaaccaaaaaaagtccaggaccagatggattcacagccgaattctaccagagtgttggaagttctggccagggcaatcaggcaggagaaagaaataaagggtattcaattaggaaaaaggaagtcaaattgtccatgtttgcagatgacattactgcatatttagaaaaccccatcgtctcagccccaaatctccttaagctgataagcaacttcagcaaatctcaggatacaaaatcaatgtgcaaaaatcacaagcattcctctacaccaataagagacaaacagagccaaatcatgagtgaactcccattcacagttgcttcaaagagaataaaatacctaggaatcaaacttagaagggatgtgaaggacctcttcaaggagaactacaaaccactgctcaatgaaataaaagaggacacaaacaaatggaagaacattccatgctcatggataggaagaatcaatattgtgaaaatgaccatactgcccaaggtaatttatagattcaatgccatccccatcaagctaccaatgactttctttgcagaattggaaaaaactactttaaagttcatatggaatcaaaaaagagcccacattgccaagacaatcctaagccaaaagaacaaagctggaggcatcatgctacctgacttcaaactatactacaaggctacagtcaccaaaacagcatggtactggtaccaaaacagagatatagaccaatggaacagaatagagccctcagaaataataccacacatctgtaagcatctaatctttgacaaacctgacaaaaacaagaaatggggaaaggattccctatttaataaatggtgctgggaaaactggctagccatatgtagaaagctgcatctggaccccttccttacaccttatacgaagattaattcaagatggattaaagacttaaatgttagacataaaaccataaaaaccctagaagaaaacctaggcaataccattcaggacataggcatgggcaaggacttcatgactaaaacaccaaaagcaatggcaacaaaagccaaaattgacaaatgggatctaattaaactaaagagcttctgcacagcaaaagaaactatcatcagactgtcccccagaaacgctgagcccccagcggcctgggtctgggtgtttgtagatccatgtgctacggtcagacttgagcaagttcctgaccttcaggcttgggcaacacctgtatttatagacgtggcccacacctaccaaacagtcaccggcatgctgctaggggaaggatatctgcagatcgtcgctttcggcaccttggtcacagggagctgcaccctgcaccctgcgtcccaggtcgtggggagccgcaccctgcaccctgcgttccaggtcatggggagctgcatcctgcactctgcgtcccaggtcgtgggcagctgcactctgtaccctgcatcccaggtcgtggggagccgcaccctgcaccctgtgtcccaggtcgtgggcagctgcaccctgcatcccagagatcttcgctttaacagaatcagagagatccaacctggggcattcaggcggctgaggaacttgaacacattgcttctcaataataatcagatcaagaggatacctagtggagcatttgaagacttggaaaatttaaaatatctctatctgtacaagaatgagatccagtcaattgacaggcaagcatttaagggacttgcctctctagagcaactgcgactggactcaaacacacttcactgcgactgtgaaatcctgtggttggcggatttgctgaaaacctacgcggagtcggggaacgcgcaggcagcggccatctgtgaatatcccagacgcatccagggacgctcagtggcaaccatcaccccggaagagctgaactgtgaaaggccccggatcacctccgagccccaggacgcagatgtgacctcggggaacaccgtgtacttcacctgcagagccgaaggcaaccccaagcctgagatcatctggctgcgaaacaagagcctggagcgccatgcagctgctgacacaggttcgctcagctcccgtgtggatctaacttgtctcccaaacaaaggaagtcttctcttgtgtccacaaacatgctgtggacctgttaaggctaagacggccctggctgcggctgtcagggtgacggagggaagtcctaccgctgaccattacatgcgtcctggcagcgagccccacctctcgagtctcacctgccggctggccttacctaacatccagagtcacctgcaggccaccctcacctgctggctcgccgtgtttctgactgggatctcagtggcatccaatgtcacctctctcctcttcacctgcttctgcataaagggaactaaagtgaagttacaggtgggtaatgagctgagcatgaagacagattcccgcctaaacttgctggacgatgggaccctgatgatccagaacacacaggagacagaccagggtatctaccagtgcatggcaaagaacgtggccggagaggtgaagacgcaagaggtgaccctcaggtacttcgggtctccagggtcatttctgggcaatagagtgtgcacatcttcagtgtcagtatgcacggccacgtccctgcagccacagaatacagaggtgctggttggggagagcgtcacgctggagtgcagcgccacaggccaccccccgccgcggatctcctggacgagaggtgaccgcacacccttgccagttgacccgcgggtgaacatcacgccttctggcgggctttacatacagaacgtcgtacagggggacagcggagagtatgcgtgctctgcgaccaacaacattgacagcgtccatgccaccgctttcatcatcgtccaggctcttcctcagttcactgtgacgcctcaggacagagtcgttattgagggccagaccgtggatttccagtgtgaagccaagggcaacccgccgcccgtcatcgcctggaccaagggagggagccagctctccgtggaccggcggcacctggtcctgtcatcgggaacacttagaatctctggtgttgccctccacgaccagggccagtacgaatgccaggctgtcaacatcatcggctcccagaaggtcgtggcccacctgactgtgcagcccagagaggaggaagctcccctctgtttccttctccgagagtcgggctctccccagagcttgttatcctctgtgggccctgcggcacagcatatgcctgagactgccccaccatcgttttttgatgtaattgactcgttctcctggattctctacatctgccttccagtcaccccagtgtttgccagcattcccagcgacacaacagtggaggtgggcgccaatgtgcagctcccgtgcagctcccagggcgagcccgagccagccatcacctggaacaaggatggggttcaggtgacagaaagtggaaaatttcacatcagccctgaaggattcttgaccatcaatgacgttggccctgcagacgcaggtcgctatgagtgtgtggcccggaacaccattgggtcggcctcgtccggtgtgagcacatgttgtaagaagatggttcagaagggccctcgggttggcccagttatcaccaatagtcgccgccacttggtcgttcgttcagcaaatgccttcgtgggctggactctgtcctcagtgctgagccagacataccgggacgccatgaggaagttcccagcagaggagcaccttcctgacgtcagtcgaaatggagatccgtttgtagctacctccatcgtggaagcgattgcgactgttgacagagctataaactcaacccgaacacatttgtttgacaggtatcgtggggctgtaaacacgctgaccctcaaatcactgagctttagggtgaagggcacaccctctatgccagtcattgtcctgggccagggcctacagtcacaaacggaagaaataaaaacctctgccctcaaagatcagaccttccagagaaatgcagatggaaaaccagagagaggcccctgcacataa

SEQ ID NO: 130478 - DNA, 3860 bp, Homo sapiens
accaattccttcctaacctggattccactgtccttggtgaaaactactttgatggaacctaccagatgctttatcttttggttaaaggaactatacctgttgaaattcacactgccacagtgatatttgtttctttccaattatctgttgcaacagaagatgacttttatacctctcacaatctggttaaaaatcttgccttgttcctaaagataccaagtgacaaaatccgtatcagcaaaataagagggaagagtctgaggaggaagagatccatgggattcataattgaaatagagattggagaccctcctattcagttcataagcaatggcaccacaggtcagatgcagttatctgaactccaggaaattgctggttctcttggacaagctgtaattttaggaaacatcagtagtatccttggatttaacatttcgtccatgtctattactaatcccctccccagcccaagtgactctgggtggattaaggtgactgcccagccagttgaaaggtctgcatttcctgttcatcacgtggccttcgtgtcctcactcttagtgatcactcagccggtggcagcacagccaggacagccatttcctcagcagccttcggtaaaggcaacagattctgacggtaactgtgtatcagttggaattactgcactaactttgagggccatactcaaggactccaataataaccaagtcaatggccttagtggaaatacaacaattccgtttagcagctgttgggccaactacacagaccttactccccttagaacaggaaaaaattataagattgaatttatactggataatgttgttggggtagaatccagaactttcagcctgctggcagagtctgtctctagcagtggcagcagcagcagcagcaacagcaaagcatcaactgtgggagactttgatctgcttggttatgaagtagttgaagggaataatgtcacactggatattacagaacaaaccaaaggaaaacccaacttggagacattcacactgaattgggatgggatcgcttctaagccactcactctatggtcatcagaagctgaagaacatattaacagagggcagaagacagctgaaaccgatgcttactgtggtcgttattccctgaaaaacccagctgttctttttgactcagcagatgttaaaccaaacagacgaccatatggagatattttattgtttccttataatcagtgctttgccatgactgatggagcagttcagcaaccagtaccacatttcatcactgcttaccatcctgatccaggatttcataccatagcaggatttccccactcttgggagcatttgcaaatgtgtgaagaatcccctggctgtcatagtaactgggaaagattcattcttcaagagcatatggaagaagaggtggttctacctgccttcgtgctcagctcaggttttccttacttctttaatgctcgcattaccaatgttgctttaataccagtcaccactaaagcctggtcctcatggaatgtcaccatgattttcccttcacaaggaagcattcgaggtggcaccacgctgacaataagtgggcgtttctttgatcagacagatttccccgtcagagttctagttggaggtgaaccttgtgatattttgaatgtcacagaaaatagtatatgttgcaagacaccccccaaacctcatattctcaaaactgtatatccaggagggagaggcctgaagcttgaggtgtggaataatagccgtccaatacgtttggaagagatactggaatacaatgaaaaaacgcctgggtacatgggtgccagttgggtagattcagcttcctatatttggctcatggaacaagacacatttgttgcacgctttagtggatttttggtggctccagattctgatgtttatagattctacatcaagggtgatgaccgttatgctatttattttagccagactggacttccagaagataaggtgaggattgcatatcattctgctaatgccaacagttatttttccagtccaacacaaagatcagatgatattcatctgcagaaaggaaaagaatactatattgaaatcttgctgcaggagtacagattaagtgcatttgttgatgttggactgtaccagtatcgaaatgtttatactgaacaacaaacaggagatgcagtgaatgaagaacaagttatcaaatcccagtcgacaatcctccaggaagtacaggttataacattggaaaactgggaaacaactaatgcaattaatgaggttcagaagatcaaggtaaccagcccatgtgtggaagctaattcatgttcactttaccaatatagattaatctataatatggaaaaaactgtgttggaagttctggccagggcaattaggcaggagaaggaaataaagggtattcaattacgaaaagaggaagtcaaattgtccctgtttgcagatgacatgattgtatatctagaaaaccccattgtctcagcccaaaatctccttaagctgataagcaacttcagcaaagtctcaggatacaaaatcaatgtacaaaaatcacaagcattcttatacaccaataacagacaaacagagagccaaatcatgagtgaactcccattcataattgcttcaaagaaaataaaatacctaggaatccaacttacaagggatgtgaaggacctcttcaaggagaactacaaaccactgctcaaggaaataaaagaggatacaaacaaatggaagaacattccatgctcatgggtaggaagaatcaatatcatgaaaatggccatactgcccaaggtaatttatagattcaatgccatccccatcaagctgccaatgactttcttcacagaactggaaaaaactactttaaagttcatatggaacaaaaaaagagcccgcaacgccaagtcaatcctaagccaaaagaacaaagctggaggcatcatgctacctgacttcaaactatactacaaggctacagtaaccaaaacagcatggtactggtaccaaaacagagatatagatcaatggaacagaacagagccctcagaaataatgccgcatatctacaactatctgatctttggcaaacccgagaaaaacaagcaatggggaaaggattccctatttaataaatggtgctgggaaaactggctagccatatgtagaaagctgaaactggatcccttccttacaccttatacaaaaattaattcaagatggattaaagacttaaatgttagacctaaaaccataaaaaccctagaagaaaacctaggcattaccattcaggacatagacatgggcaaggacttcatgtctaaaacaccaaaagcaatggcaacaaaagccaaaattgacaaatgggatctaattaaactaaaaagcttctgcacaacaaaagaaactaccatcagagtgaacaggcaacctacaaaatgggagaaaattttcgcgacctactcatctgacaaagggctaatatccagaatctacaatgaactcaaacaaatttacaagaaaaaaacaaacaaccccatcaaaaagtgggcaaaggacatgaacagacacttctcaaaagaagacatttatgcagccaaaaaaacgcatgaaaaaatgctcaccatcactggccatcagagaaatgcaaatcaaaccacaatgagataccatctcacaccagttagaatggcaatcattaaaaagtcaggaaacagtaggtgctggagaggttgtggagaaataggaacacttttacactgttggtgggactgtaaactagttcaacccctgtggaagtcagtgtggtga

SEQ ID NO: 130479 - DNA, 1942 bp, Homo sapiens
atgagtgaactcccattcacaattgcttcaaagagaataaaaaacctgggtaaagggcatgtgaaggacctcttcaaggaaaactacaaaccactgctcagaaataaaagaggacacaaacaactggaagaacattccatgctcatggataggaagaatcaatatcgtaaaaatggccaaactgcccaagcctccactggtgatacccaggcaaacagggtctggagtggacctccagcaaactccaacagaccttcacctgagggtcctgactgtcagaaggaaaactaacaaacagaaaggacatccacaccaaaaccccatctgtacgtcaccatcatcaaagaccaaagtgttggaagttctggccagggcattcaggcaggagaaggaaataaagggtattcaagtaggaaaagaggaagtcaaattgtccctgtttgcagatgacatgattgtatatctagaaaaccccatcgtctcagcccaaaatctccttaagctgataagcaatttcagcaaagtctcaggatacaaaatcaatgtgcaaaaatcacaagcattcttatataccaataacagacaaacagagagccaaatcatgactgaactcccatttacaactgcttcaaagagaataaaatacctaggaatccaacttacaagggatgtgaaggacctcttcaaggagaactacaaaccactgctcaacgaaataaaagaggatacaaacaaatggaagaacattccatgctcatgggtaggaagaatcaatattgtgaaaatggccatactgcccaaggtaatttatagattcaatgccatccccatcaagctaccaatgactttcttcatagaattggaaaaaactactttaaagttcatatggaaccaaaaaagagcccgcatcgccaagtcaatcctaagccaaaagaacaaagctggaggcatcacgctacctgacttcaaactatactacaaggctacagtaaccaaaacagcatggtactggtaccaaaacagagatatagaccaatggaacagaacagagccctcagaaataatgctccatatctacaactatctgatctttgacaaacctgagaaaaacaagcaatggggaaaggattccctatttaatatatggtgctgggaaaactggctagccatatgtagaaagctgaaactggatcccttccttacaccttatacaaaaattaattcaagatggattaaagacttaaatgttagatctaaaaccataaaaaccctagaagaaaacctaggcaataccattcaggacataggcatgggcaaggacttcatgtctaaaacaccaaaagcaatggcaacaaaagccaaaattgacaaatgggatctaattaaactaaagagcttctgcacagcaaaagagactaccatcagcgtgaacaggcaacctacagaatgggagaaaatttttgcaatctactcatctgacaaagggctaatatccagaatctacaatgaactcaaacaaatttacaagaaaaaaacaaacaaccccatcaaaaagtgggtgaaggatacgaacagacacttctcaaaagaagacatttatgcagccaaaagacacatgacaaaatgctcatcatcactggctgttagagaaatgcaaatcaaaaccacaatgagataccatctcacaccagttgaagaggtgagggcgggtgagatggccaagacaagaagatgccaaaatgtcaaaggtgccagtgaggaaggcatcagagctcttgctttgtttctcattaacctcactgtccatatggagggcaaccacattgatggagacattgaaattcaaaccaatagaagtcccttgcaagcccctggagaaatctgtgagtcttttactgctttgatggcaatgcaactgctcagtaaattgttttggagttga

SEQ ID NO: 130480 - DNA, 3635 bp, Homo sapiens
atgggcccgcactcctcagcccttgggtggtcgatgggactgggcgccgtggagcagggtgtggcgttcgtcggggaggctcgggccgcacatgagcccatggagggggtgggaggctcaggcatggcaagctgcaggtcccgagccctgccccgtgggaaggcagctaagacccgaccaaaaacagaagacgcttgggtatttgcaaagcccaatgccattcaagcggtcggggttatgtcttttgcatttatttgccaccataactccttcttagtttacagttctctagaagaacccacagtagctaagtggtcccgccttatccatatgtccatcgtgatttctgtatttatctgtatattctttgctacatgtggatacttgacatttactggcttcacccaaggggacttatttgaaaattactgcagaaatgatgacctggtaacatttggaagattttgttatggtgtcactgtcattttgacataccctatggaatgctttgtgacaagagaggatatggccactactatgaagatgacttttggacaaaggactggttttaggaatcctgaaagtttctgggagactttaccagtcttatttctgcaagtcatgattaccacatattttgtagctaaacaattgctgttcctacacagtaagatcatcatcttggccaggaaaaagagatcaaacatgtgcaagaaggaagaagaagaaggaagaggagaagaaggaggagaaatacaaactaccatcagagaatactacaaacccctctacgcaaataaactagaaaatctagaagaaatggataaattcctcgacatatacactctcccaagactaaaccaggaagaagttgaatctctgaatagaccaataacaggatctgaaattgtggcaataatcaatagcttaccaaccaaaaagagtccaggaccagatggattcacagcagaattctaccagaggtacaaggaggaactggtaccattccttctgaaactattcgaatcaacagaaaaagagggaatcctccctaactcattttatgaggccggcaccatcctgataccaaagccaggcagagacacaaccaaaaaagagaattttagaccaatattcttgatgaatattgatgcaaaactcctcaataaaatactggcaaaccaaatccagcagcacatcaaaaagcttatccaccatgatcaagtgggcttcatccctgggatgcaaggctggttcaatatatgcaaaccaataaatgtaatccagcatataaacagaaccaaagacaaaaaccacatgattatctcaatagatgcagaaaaggcctttgacaaaattcaacaaccctccatgctaaaaactctcaataaattaagtactgatgggacgtatctcaaaataataagagctatctatgacaaacccacagccaatatcatactgaatgggcaaaaactggaagcattccctttgaaaactggcacaagacaaggatgccctctctcaccactcctattcaacatagtgttggaagttctggccagggcaattaggcaggagaaggaaataaagggtattcaattaggaaaagaggaagtcaaattgtccctgtttgcagacgacatgattgtatatctagaaaaccccattgtctcagcccaaaatctccttaagctgataagcaacttcagcaaagtctcaggatacaaaatatacaaaatcgatgtgcaaaaatcacaagcattcctatacaccaataatagacaaacagagagccaaatcatgagtgaactcccattcacaattgcttcaaagagaataaaatacccaggaatccaacttacaaggaatgtgaaggacctcttcaaggagaactacaaaccactgctcaatgaaataaaagaggacacaaacaaatggaagaacattccatgctcatggataggaagaatcaatattgtgaaaatggccatactgcccaaggtaatttatagattcaatgccatccccatcaagctaccaatgacttccttcacagaattggaaaaaaactactttaaagttcatatggaaccaaaaaagagcccgcattgccaagtcaatcctaagccaaaagaacaaagctggaggcatcacgctacctgacttcaaactatactacaaggctacagtaaccgaaacagcatggtactggtaccaaaacagagatatagaccaatggaatagaacagagccctcagaaataataccacacatctacaactatctgatctttgacaaacctgacaaaaacaagaaatgggggaaaggattccctgtttaataaatggtgttgggaaaactggctatttaataaatggtgctgcagaaagttgaaactggatccttatacaaaatttacaccttacacaaaaattaattcaagatggattaaaggcttaaatgttagacctaaaaccataaaaaccctagaagaaaacctaggcaataccattcaggacataggcatgggcaaggacttcatgactaaaacaccaaaagcaatggcaacaaaagccaaaattgacaaatgggatctaattaaactaaagagcttctgttctttgctggggtatctgaagactgaaaacacagcaaaagaaactaccatcagactgaacaggcaacctacagaatgggagaaaatttttgcaatctacccatctgacgaagggctaatatccagaatctacaaagaacttaaacaaatttacaagaaaaaaaatcaaacaattccatcaaaaagtgggcaaaggatatgaacaaacacttctcaaaagaagacatttatgcagccaacagacacatgaaaaaaatgctcatcatcactggccatcagagaaatgcaaatcaaaaccacaatgagataccatctcacaccagttagaatggcaatcattaaaaagtcaggaaacaacaggtgctggagaggatgtggagaaataggaacacttttacactgttggtgggactgtaaactggttcaaccattgtggaagacagtgtggcgattcctcagggatctacaactagaaataccatttgacccagccatcccattactgggtatatacccaaaggattataaatcatgctgctataaagacacatgcacacgtatgtttattgcggcactattcacaatagcaaagacttggaaccaacctaaatatccaacaacaataggctagattaagaaaatgtggcacatatacaccatggaatactatgcagccataaaaaaggatgagttcatatacttgtagggacatggatgaagctggaaaccatcattctcagcaaactattgcaaggacaaaaaaccaaacatgcatgttctcactcataggtgggaattgaacaataagaacacttggacacagggtggggaacattacacactggggcctgttgtggggtggggggaggggggagggatagcattaggagatataactaatgtaaatgatgagttaatgggtgcagcacaccaacatggcacatgtatacatatgtaacaaacctgcacattgtgcacatgtaccctagaacttaaagtataataaaaaatattt

SEQ ID NO: 130481 - DNA, 663 bp, Homo sapiens
atgcctaatttctttatcgatcgcccgatttttgcgtgggtgatcgccattatcatcatgttggcaggggggctggcgatcctcaaactgccggtggcgcaatatcctacgattgcaccgccggcagtaacgatctccgcctcctaccccggcgctgatgcgaaaacagtgcaggacacggtgacacaggttatcgaacagaatatgaacggtatcgataacctgatgtacatgtcctctaacagtgactccacgggtaccgtgcagatcaccctgacctttgagtctggttcaggtgcagaacaaactgcagctggcgatgccgtgctgccgcaagaagttcagcagcaaggggtgagcgttgagaaatcatccagcagcttcctgatggttgtcggcgttatcaacaccgatggcaccatgacgcaggaggatatctccgactacgtggcggcgaatatgaaagatgccatcagccgtacgtcgggcgtgggtgatgttcagttgttcggttcacagtacgcgatgcgtatctggatgaacccgaatgagctgaacaaagtggagagaaatagtagaaggcaagatgtaggagagagagatatttcctcaggctccaggaaagtaaataaggagtcaagagaggatgaggaggtgacctga

SEQ ID NO: 130482 - DNA, 978 bp, Homo sapiens
atgggtgccaaggctgaacggggagggtttgtgatttatacgtggctgccaactatcgcccagactattggtctggaagatgcgctgactgccagcctgatgcttaatgcgttgttaattgtgggcgcgctgctgggattagttctgacgcacctgctggcacatcgcaaatttttgctgggaagttttttgctgctggcggcaacgctgtacgcgatgcgtatctggatgaacccgaatgagctgaacaaattccagctaacgccggttgatgtcattaccgccatcaaagcgcagaacgcccaggttgcggcgggtcagctcggtggtacgccgccggtgaaaggccaacagcttaacgcctctattattgctcagacgcgtctgacctctactgaagagttcggcaaaatcctgctgaaagtgaatcaggatggttcccgcgtgctgctgcgtgacgtcgcgaagattgagctgggtggtgagaactacgacatcatcgcagagtttaacggccaaccggcttccggtctggggatcaagctggcgaccggtgcaaacgcgctggataccgctgcggcaatccgtgctgaactggcgaagatggaaccgttcttcccgtcgggtctgaaaattgtttacccatacgacaccacgccgttcgtgaaaatctctattcacgaagtggttaaaacgctggtcgaagcgatcatcctcgtgttcctggttatgtatctgttcctgcagaacttccgcgcgacgttgattccgaccattgccgtaccggtggtattgctcgggacctttgccgtccttgccgcctttggcttctcgataaacacgctaacaatgttcgggatggtgctcgccatcggcctgttggtggatgacgccatcgttgtggtagaaaacgttgagcgtgttatggcggaagaaggtttgccgccaaaagaagccagcccagcaatgcggccttaa

SEQ ID NO: 130483 - DNA, 3396 bp, Homo sapiens
tcagggcgaggccgggcggcggctgtactgcacgcggtagcgggtcacgggcaggccgtgcacgtgcactgtctcacacagcgtcttgcagggtaccatgtcctcgtcctcctcacccatcagccagtcctgcaccaggctagccgcctccaccgtcacattgtcctccagccagcggctgtgccactcctcaaagtgctggtggtggcggagcaggaccaggggctgcacctgcttggcccggcagagggtcccgcgacggtacatgtagtcctcggagttcacgatgaacaccatcttgtgagtgctgagcttgaagcggcagtccacgtcgcaggcgctctccacgcccaccagccgcttccaggagctcctggcctcaccgcgcagggcccgcgcctgctcgctctgccaccggcggcggaacttcttgaggttcctctgcaggaacacaggtttcaggaggaagccctcagtgggcgagctggacgcgccctcggtccccacatactgctccacgtaccgagccaggtgctggacctccacagggtcctccgtctgggcctcctcggtgtccaggagctcgatggtcatgatcacctgccctttgcgctgcaggaacatcaccttgaagcagttctcgtcggccatgcagcgctcagccttccactggtagctggtctccctagcagcgcggacgcagcgggaggacaggttcccaccagcggcaccccgcttcttctcgttcaggtagagctccaccaccttcaggcagacgtcatcgctcacgaggtggtgcagctgccgcgcaatgttctgcaccagcttgtccatggtgaagcccacgtaggcatggatggtgaacatctcgcgtagggtgtcctcgtactgcgtggggtcgatgctgccctccagcaggctccgcaccatgtccaggaaggccgggtagtactcctccagctccacttcactgggctgcttcagccgcagctccatggcggggtcgctgcccttctccctgcggccctcacacagcagcttctcccgctccttctcggtccgatactccagaagctgcttctgcgcctggcggtagatcttcagcagcctggagcacagggtctggtgcaggcgcaggaagaagtaccagttgttgttggcaaaaaataggctgtagacatcgtccaggggcttgtgcggggctgggggcggcaggggtggctgctcagtggccggggcatccccgaaggcccccttctcctctggggggctactgtggggtcctggcgccggcttcttccgctcactggggtctgtggtctgcccctgggggctgtcccggtcctcatcagctgactcctcggaggcgcccaggtccagctgctgagagaagaagaggctgggcacgaactggtgcagcagctggtggatggtgccctggtcctccttctggatggccggctgccgcttcacgtagtagctgatgagcgctgctgcgtcctccaggatctgccggtcctcgtacacaaagatgaggtgcggctcgctagagggggcactgcggccctccgagtgctgctcctggtgctcgtcgtagacgctctcgatctcgttgagcaagctcttggagcgcagggccttggtgtcgttctgcttgaagttcacagcctggtggtcaagggacttgaggtacgccttctcatactgctcccgccagatcttgttgaagccctgctgggcctcccgccactcctcttccttggccttcagtcttttcaggacaacggggacagcggtgacagggttcttcttgaggctctcgatgatctccggggccttgtcgccatagatgcgataaatggcacggcgctggatcacctccgacgtgcctcccagggagtcgtccagccggaacttctcctggtcttccggcgccatccgagacagcttcttctgcacactttccaacacacggattgtggccaggttcgtctccaggacatcgtctaactggaagcggcttcgtcctcacagcggtgaagctgctcctcgtacggtgtcttcttggagctgacgaacgtggagtcctcagaccaggaagggaaggagacccaggtgtcgttcagtacctccttgcagatggctgtcctcccactgcacttgggctgctggtaggttttggggagtgcccggtagctggatcctatgcgcttgcaggatgcataatcaatttcccggcttatcccgtccccggatctgtcgctcatgggtggcgcgaaggacagctcttttacccccaggaaggacttgaactgtgcaaagagttctggaaatttccccagaaatgggctgacgagctgcaggagctcagagccagacaccagctcctggttgaagagtgcgatgcagcggaggaagttttcatacacctcctggctcttcagcacccggcggaccttgtcaaagaaagaaaattcctgcagagtcccgtacttccccactgcagcgatggacaggtctttggtaccacgaagtttcatttttttcttggcgggtgcagacacggggcggaggagcgagggccgggagcgcttcctgctgtgctccggggtcttgtcgtgctcgttcttctgcacgctgtgcatctcgcacggcccgtttcctgtgaacagagaccgcttggcttcgggcaggaactgtccaaactctgagagcaggtcctcctggccccggaagaggttggccacctcggtgaacacctcctcttcagacatgcctcggaatggccggcccctcgtgttcagctgctccttctggtacgtgtgcaggatctccaggaatgacctgtagatttctgggtggtctaggaagcgggttttaatcttattcacatagctgatggcgttgttgaattccacggaatcggactccaggggcacctggggtttgtcctctttatacggcacctgctgcttgaagtcctctgcaccgtccccgtggttgtgcgaattctcctggcttgtcagaggcgactgtatgtttaacttgccattcttgggaatgtctattctatatccgaggggaagaaaagcgttgaatccaacaatgaggtcagggtgctcgtggaagagctgcgagacacgtctgatgactccaggagtatcgatgctctggcttttgaactccttcatgatctccaggaagccgttgtaggtggcagggtcgctgccaaagcggatcttcacctggtccagataggtgagggcgtcttctacgtgcaccggcagcttctcgtggcctgcggagcccgagcgaccccagcgggcgccgctcagcccccggcccgcggggccgccggcaccgctgccaccgctgccaccgccagcgtgcgccatg

SEQ ID NO: 130484 - DNA, 768 bp, Homo sapiens
atggagaaccaggtgctggtaattcgcatcaagatcccaaatagtggcgcggtggactggacagtgcactccgggccgcagttactcttcagggatgtgctgaatccactattaaagaacgtggacttcaacgtcaaagggcgaaaaaccgtctatcagggcgatggcccactacgtgaaccatcacccaaatcaagtttttgggggtccagcggtatccagcgcgtttgcaccggtcgccagcttgatccccagaccggaagccggttggccgttaaactctgcgatgatgtcgtagttctcaccacccaggggtaccgagctcgaattcgtaatcatggtcatagctgtttcctgtgtgaaattgttatccgctccagttgggacaacatacgagccggaagcataaagtgtaaagcctgggtgccgcaagccaaaggcaacaatgtggttatcacaagctacatgacaaacagaggcttcttcgaggataaaaaggcaacatttgcgccaagcttcttaatgaacatcaaaggcaataaaacatccgttgtcaaaaacagcatcctggagcaaggacagctgacatggctccaagtagcgaagcgagcaggactgggcggcggccaaagcggtcggacagtgctccgagaacgggtgcgcatagaaattgcatcaacgcatatagcgctagcagcacgccatagtgactggcgatgctgtcggaatggacgatatcccgcaagaagcccggcagtaccggcataa

SEQ ID NO: 130485 - DNA, 2556 bp, Homo sapiens
atgggcggcatggtggagcagcagctttctgatgcaatcaccgcgatgcataaccaggacagcgatctggcgaagcgcgtcatcgaaggcgacaagaacgtcaacatgatggaagtggcgatcgatgaagcctgcgtgcgcattatcgccaaacgtcagccgacggcgagcgacctgcgactggttatggtgatcagtaaaaccattgccgagctggagcgtattggcgacgtggcggacaaaatctgccgtactgcgctggagaaattctcccagcagcatcagccgttgctgatgctgcacgacgtgctggacgggtaccgaatgcgaagtcgcgatccccgtcagcaccgcgccctgcaacaacgaaacaccaagaatgagtttaaaaccgatcgccgcaccaataaattccgccagcttccatacacaacatctgaaagcaggcgatcgcgtagtaataagtgggctgcagaaagtgcgtcctggtgtccaggggggctggcgatcctcaaactgccggtggcgcaatatcctacgattgcaccgccggcagtaacgatctccgcctcctaccccggcgctgatgcgaaaacagtgcaggacacggtgacacaggttatcgaacagaatatgaacggtatcgataacctgatgtacatgtcctctaacagtgactccacgggtaccgtgcagatcaccctgacctttgagtctggtactgatgcggatatcgcgcaggttcaggtgcagaacaaactgcagctggcgatgccgttgctgccgcaagaagttcagcagcaaggggtgagcgttgagaaatcatccagcagcttcctgatggttgtcggcgttatcaacaccgatggcaccatgacgcaggaggatatctccgactacgtggcggcgaatatgaaagatgccatcagccgtacgtcgggcgtgggtgatgttcagtggtaccgagatcgagttgtatcatgccgaaatgacgatctcaatgccgcccaggaggcgctcgaagagcgtgcgcgtaatgaactcagcatgaccagcccgggcgaaactttttatcgtctggtgcctgacgcgtcgaagcgcgcacacccgggaattaacatggcaaccactcatttggatgtttgcgccgtggttccggcggccggatttggccgtcgaatgcaaacggaatgtcctaagcaatatctctcaatcggtaatcaaaccattcttgaacactcggtgcatgcgctgctggcgcatccccgggtgaaacgtgtcgtcattgccataagtcctggcgatagccgttttgcacaacttcctctggcgaatcatccgcaaatcaccgttgtagatggcggtgatgagcgtgccgattccgtgctggcaggtctgaaagccgctggcgacgcgcagtgggtattggtgcatgacgccgctcgtccttgtttgcatcaggatgacctcgcgcgattgttggcgttgagcgaaaccagccgcacgggggggatcctcgccgcaccagtgcgcgatactatgaaacgtgccgaaccgggcaaaaatgccattgctcataccgttgatcgcaacggcttatggcacgcgctgacgccgcaatttttccctcgtgagctgttacatgactgtctgacgcgcgctctaaatgaaggcgcgactattaccgacgaagcctcggcgctggaatattgcggattccagtttgatattggtcggatgcccgcccaaatgttgctgagcaaaattaaaaataacgatcacaaccacaacactgttgacctcgggcaggaaactggaggatatctcatgagtgaacccctgttaattgcccgcacgccggacacagaactgtttttactgccgggaatggctaaccgtcatgggctgattaccggcgcaacggggacgggtaaaaccgttacgctgcaaaaactggcggagtcattgtcggaaatcggcgtgccggtgtttatggctgatgtgaaaggcgatctgaccggcgtcgcgcaggcaggaacggtgtcggaaaaactgctcgcaaggcttaaaaatatcggcgtcaatgactggcaaccgcatgccaatccggtggtggtgtgggatatctttggcgagaaaggccatccggtgcgggcgacggtttcggatctggggccgctgttgctggcacgactgttgaatctcaacgatgtgcaatctggcgtgctgaatatcatcttccgcattgctgacgatcaggggctgttactgctcgactttaaagatctgcgggcaattacccagtacatcggcgataacgccaaaccatcagcccacagctactcaatgcgatcgattaagccatccggcaggtgcgggtttagtggcccgacattcaccggccaggcggtggtgatttcatctggtgcagcggcatggacgattttcacgggcgtcaggggctacctggcccgcatcagctgcggcgtttgcctggccgttattagtttgcgctccgctatcggcagccagtgcggcaccgctggcaaggcttag

SEQ ID NO: 130486 - DNA, 605 bp, Homo sapiens
cgtgcgagatgcacagcgtgcagaagaacgagcacgacaagaccccggagcacagcaggaagcgctcccggccctcgctcctccgccccgtgtctgcacccgccaagaaaaaaatgaaacttcgtggtaccaaagacctgtccatcgctgcagtggggaagtacgggactctgcaggaattttctttctttgacaaggtccgccgggtgctgaagagccaggaggtgtatgaaaacttcctccgctgcatcgcactcttcaaccaggagctggtgtctggctctgagctcctgcagctcgtcagcccatttctggggtgagcagctgacttcccagggctccctaggggggttctgttcctgtcaactccatctacttggtttttagttactgtttttgagcaatgattgtgcttttctaaaatcctgtttattaattgacgtgattgatataattattgattcccatgcatttgtaaggagcaatacaccacctgggtaccctccagctggttcctttaccagtaacatctgtagtcagtatcctcaccagaatacagtgggtcctcgagtaatgccttttcatttaacactgttttaacaccg

SEQ ID NO: 130487 - DNA, 1350 bp, Homo sapiens
atgatcatcatcgccatcattatgatgggcaagaagatccattctgtagatattgggcagcttctttattcagctacaccagttgttgttcagtgtgcccatattgtaactaaccacggcaacagggatggagctatccatgggatcaacaacatggacttccctctgcaaggcagaaaacgcagcctgccaacaagagaagccacacatatggctgtgctcgatatcttcattcttgcggctaaagcggcggcgaaccaccacaaagaataccggaacgaagaagattgccagtaccgttgcggtcaccatcccgcccattacaccgttacctactgcgttctgcgcgccggaaccagcaccagtcctgttaaccagcggcataccgccgaggttaaacgccagcgagaacccccaacttttaagcgggtcctctccagtgactccacgggtaccgtgcagatcaccctgacctttgagtctggtactgatgcggatatcgcgcaggttcaggtgcagaacaaactgcagctggcgatgccgttgctgccgcaagaagttcagcagcaaggggtgagcgttgagaaatcatccagcagcttcctgatggttgtcggcgttatcaacaccgatggcaccatgacgcaggaggatatctccgactacgtggcggcgaatatgaaagatgccatcagccgtacgtcgggcgtgggtgatgttcagttgttcggttcacagtacgcgatgcgtatctggatgaacccgaatgagctgaacaaattccagctaacgccggttgatgtcattaccgccatcaaagcgcagaacgcccaggttgcggcgggtcagctcggtggtacgccgccggtgaaaggccaacagcttaacgcctctattattgctcagacgcgtctgacctctactgaagagttcggcaaaatcctgctgaaagtgaatcaggatggttcccgcgtgctgctgcgtgacgtcgcgaagattgagctgggtggtgagaactacgacatcatcgcagagtttaacggccaaccggcttccggtctggggatcaagctggcgaccggtgcaaacgcgctggataccgctgcggcaatccgtgctgaactggcgaagatggaaccgttcttcccgtcgggtctgaaaattggttacccatacgacaccacgccggttgtgaacatctctattcacgaagtgggtaaaacgctggtcgaagcgaacaatcttgtgttcctggctatgaatttggtcctgcaagaatttcccgcggacgttatttccaccattgccggtcccccaagcctgaggagcagcagggttcctgggctctaa

SEQ ID NO: 130488 - DNA, 2550 bp, Homo sapiens
atgactgtgtctctccgtgtccgccgggtgctgaagagccaggaggtgtatgaaaacttcctccgctgcatcgcactcttcaaccaggagctggtgtctggctctgagctcctgcagctcgtcagcccatttctgggagcatgcacctcgtcatcgtgcctgtcacctgctctgcacgtgtcttacgctcgattgggctcgtgtgtcatccgtactcacacgctagtcatcctcctctgtatcacaccaggtctgagtgctcactatcgcaaacaccctgatgctgcgctgcacacgtctctcagtcgatgctcacgagaccgagcgcccgtgcacgtccgctctgttctctgcggcgtcgtagtcacgactgcatcttccccgtacggcgccgtgcgctcaggctgtggtccttcgttcttctgttcgaatctacccacgcgtaccgtagaagacgccctcacctatctggaccaggtgaagatccgctttggcagcgaccctgccacctacaacggcttcctggagatcatgaaggatctccacgccgtcattcgcaccgtctgccccgtgcgaggcgatcctcgcgcgctctcccgtcgctcgcttcgctctgtgctgctccgcgccctcaggtgtctctacccggcgactctgtctcccgcctctcgtgtcagtgaggatatctccgactacgtggcggcgaatatgaaagatgccatcagccgtacgtcgggcgtgggtgatgttcagttgttcggttcacagtacgcgatgcgtatctggatgaacccgaatgagctgaacaaattccacgtaacgccggttgatgtcattaccgccatcaaagcgcagaacgcccagacgcgtctgacctctactgaagagttcggcaaaatcctgctgaaagtgaatcaggatggttcccgcgtgctgctgcgtgacgtcgcgaagattgagctgggtggtgagaactacgacatcatcgcagagtttaacggccaaccggcttccggtctggggatcaagctggcgaccggtgcaaacgcgctggataccgctgcggcaatccgtgctgaactggcgaagatggaaccacgcttctactccgcggctggcacgcatgcgcgtagctgtcacgcttacgtgtgtacgcacctgtcacgttgcgatgcgtctgtgcccgatgacctgccgcagcaacgccactccggcaaaatcctgctgcacgtgaatcaggatggttgtccgtgcctggtgcgtggcgctgcgaatcagcgagcgtgccgtgttggtctcggctgtctgctgtggcgtgcttctgtgctctgtgctgcgtgtggcgtcgcgtcgttgcccgtgctctgcgtgttcgtctctctgttcgtgcgcgtgtgcctgctcggccctcgtgtgcacgaggaaccgtcgtcagctccagtgtacctgcaccgcattcgttgtgctctctggagtagagtgtgctatcactggactgtcgagaggttcgtcgtgagccgcggcgtgcctcaattcttacgtgttctgttccagacctacggtccactggttctagatgtctcctcatactcttctcgtattgacacgccacgtatgggtctctatggccttgcaggaaacctacactctcagctcagcgttggtagccctgtgcccatcgggctctcacctcatgccctcgtttcctgctccgttccctgtccccggcaccaccagttctctgagcttcccaagctctcgctcccagcgagtctggaggagccccacgtctggggacagaccgcttctggggatgaccgccgcgacggcaacccgagtcccgtcgtttcctgcatcttggtgctggctggctttctgtactgcagcgctattgtggcgtgcgagtgtgtgttctgtgtcgtcgttcttgcctgttccagacgaatgtgtactccttacatcggcgatacgctggcaacccgtagcgactcgccctgtcggggtgacctgctatacctgctcgtcagcatcatcgtctgtagttcgagctccgttcgcgccaccgcgcggaggcgttactgtgtcgtatctgatctgtctcagtatgacatgctatcaggtagctctttccctacgtgtagtacgctctcgcgtcgagcgtccatcgtcacttcgcgctaccctacgcgtatggcgtatagctccgcgcggctcggtcgattagccctttgcatgcctatacgctacgtctccatatctcctcacgctatcgtgctctatcacatcgcgctgaacgacacttgcattccttcaggctactgtacgagctccctcgaccctgccctctctcctctgcgactcacgtacagtactacgccctctctcggtggtcctgcctgcgtacttgtgtcggggccagtgagtatgcagcgtcagcgtgtgactctcagctcgtgtctctgctccgtatccatctgcgtcttgcgtgctccgaatgccttcgatgcaccagttatgtcgactgactcgacagcggctgtgtgccagtga

SEQ ID NO: 130489 - DNA, 630 bp, Homo sapiens; identical to SEQ ID NO: 120517

SEQ ID NO: 130490 - DNA, 486 bp, Homo sapiens
gctcttgtatagaaatatagttgattttgaatattaactttgtacctgcatcttgatgcagtcagtggttctagtagcttgtttgtagaatcctttggatttttctatgcacgtgatgatagagtctataattaaaaagttttactttccagtagatatacctcaataaagctgtttaattgacatatgaccagctatcatatgtcaattaaacagctttattgaggtataattgacatatgatagctggtcatatagatgaagtgtaaagtttgattagttttggcccacctgtaaaaccatcaccagtcaagataatgagcatatccctcatccccgaagtttccctgtcctccttggtaatccctccttccttcgtctctctttgcccacatcccatccctaggaaaccactaatattctctggtcattatggtttagtttgcattttctagaattttatagaaatagaaacagagttgtctg

SEQ ID NO: 130491 - DNA, 1128 bp, Homo sapiens
ctcagcagtatgccatctccacctggatacctgatggcctcgtactgctctacacccaaaatgttcaaagtaggatcaccattcaaaacagatcttccctcaacacccccacttctatcgtgaatgccacaattcttctcccctgcctgggctcccactttggtggcatttgaggagcccttcagcctcccccctgcactgtgggagcccctttctgggctggccaaggctggagcccactccctcagcttgcagggaggtgtggagggagaggcacgagcgggaaccggggctgcgtgcggcgcttgcgggccagctggagttccgggtgggcttgggcttggtgggccccgcactcggagcagccggccagccctgctggccccgggcaatgggggacttagcacccgggccagtggctgcggagggtgtactgagtcccccagcagtggctggcccaccagtgctgcgctcgatttcttgccagggccttagctgccttcccatggggcaggactcgggacctgcagcccgccatgcctgagcctcccacccactccatggtttcctgtgcggcccgagcctccccgacgagcaccaccctcctactccacggcgcccagtcccatcgaccacccaagggctgaggaatgcgagcacacggcaccgggactggcaggcagctacccctgcagccctggtgcgggatccactaggtgaagccagctgggctcctgagtctggaactaacatttccattacacctggaaatgccacatttgtgacccgggtgcagggacaggcttggtttgcctcatgtatcactggtcatgatatgtctagtttaaaaacttccagtgtcgtggtattaaggagacaatctgaggcacttctaccagccaatttgacatgcaattggcaagattcttctgcccttgccaccttagaaagtgccctgtcccaggtcagacacaaaagattcacatttacacttatggtctttacaggctcagccatagacattatggcaactgttagcattgctgttgtatctattactgaatcagtacaaacaactgcttttgtagataatctggccaaaaatatatgtgatgaacttctcctaca

SEQ ID NO: 130492 - DNA, 413 bp, Homo sapiens
gctctgcagccacaaccatgtttggccggaagcgcagtgtctcctttgggggcttcggatggatcgacaagaccatgctggcaagtctgaaggtcaagaagcaggagctggccaacagctcggatgcgaccctcccagaccggccgctctcccctcctctcacggcacctcccaccatgaagtcgtcggagttctttgagatgctggagaaaatgcaggacgactatatcccataccccagcatcgacgaggttgtggagaagggaggcccgtaccctcaggtcatcctgccacagtttgggggctattggatcgaggacccggagaacgtgggcaccccaacatcgctggggagcagcatctgtgaggaggaggaagaggacaacctcagccccaacacatttggctacaag

SEQ ID NO: 130493 - DNA, 507 bp, Homo sapiens
cgcctgtgtttgctctcgggccctccctgacgcctggatctgggagctgccaccccgacgatcgacaagaccatgctggcaagtctgaaggtcaagaagcaggggctggccaacagctcggatgcgaccctcccagaccggccgctctcccctcctctcacggcacctcccaccatgaagtcgtcggagttctttgagatgctggagaaaatgcaggggatcaagcttgaagagcagaagccgggaccccagaagaacaaggacgactatatcccataccccagcatcgacgaggttgtggagaagggaggcccgtaccctcaggtcatcctgccacagtttgggggctattggatcgaggacccggagaacgtgggcaccccaacatcgctggggagcagcatctgtgaggaggaggaagaggacaacctcagccccaacacatttggctacaagctcgagtgcaagggtgaagccagggcctaccggaggcacttcctggggaag

SEQ ID NO: 130494 - DNA, 540 bp, Homo sapiens
accctggaggaggagctatttgggaacaatgaggagagcccagcttttaaggagttcttggacctgctgggggacacgatcacactgcaggatttcaaaggcccccccacaacatatcccccttgcaagacctggaaacagtggtcagactttacgggcactgccgggactaacggtggcatcatctggtttgtcttgcaggacgactatatcccataccccagcatcgacgaggttgtggagaagggaggcccgtaccctcaggtcatcctgccacagtttgggggctattggatcgaggacccggagaacgtgggcaccccaacatcgctggggagcagcatctgtgaggaggaggaagaggacaacctcagccccaacacatttggctacaagctcgagtgcaagggtgaagccagggcctaccggaggcacttcctggggaagggcatctgcatctcactcatcatggttgtcatcgccaccatcgccatcgtcacagtccatcacggagcacctgcgtatcagatgctccactag

SEQ ID NO: 130495 - DNA, 690 bp, Homo sapiens
tcaggtctgccacctccgggtgacatcgtcataacagtctgcagcagtagtctgatcccgtggtggcatgctagggtaactcagcagcgccaccacaaagggcccgtcagggaggctggcagcccagcacatccctgtgagaatgacttgactgtcaggctcttgtggtttccactcccggtgcaggccgatggtcaggtctgccttggggccaaggatggaagggtggtgctcgtctgaccgatagatgatccgacaggcgatgcaggcatggtcgtggttcagctcctccttgtacctctggtagaattcggctgtgaatccatctggtcctggactctttttggttggtaagctattgattattgccacaatttcagatcctgttattggcctattcagagattcaacttcttcctggtttagtcttgggagagtgtatgtgtcgaggaatttatccatttcttctagattttctagtttatctgcgtagaggtgtttgtagtattctctgatggtagtttgtatttctgtgggatcggtggtgacatcccctttatcattttttactgcatctatttgattgtgggggtcctggccttcattgtttttctgatgataactttgtacatctttgatgtcatttcttctcaagtgctcctccttaggcaggttacttctcgttaacac

SEQ ID NO: 130496 - DNA, 792 bp, Homo sapiens
atggtgttaaggagaagtaacctgcctaaggaggagcacttgagaagaaatgacatcaaagatgtacaaagttatcatcagaaaaacaatgaaggccagtgtttgcacccaagtcaaacatccagccattgcttccatctgcaaggcagtgctgtgagttgggccatggtctggtcacttcaaatatgcaggcttgccgacactttgaggatgaagtactcaggaagggaggccaagctcagcagaataggctctgaggaaaatccaggtgatgctctccatagtccctctgtggatgcctgggctcttcggtgctctgcttttggctttcttagatgtgaagtggaaagagtatgggctttggagccaaacaggcccgtgtttgaattcctgctcatatactgtgcacttgcccattttaaaagtatgctggctgctgtgcatggcctgatacagcgacttgttccccacactgcagaccctggaccagcagcattgcagcaactgggaaaaagtagtttacaagacagtgaagtacaatatgaaactgaagatgttagagaggaaaacagtgatttgagaaatgtacagtctttagccactgctctcatcccaataacagtccacggttatgggagaaactaccagggtctgggcattgggaatacacacaaccaacagccaaaaggggcaagagtctgtactatcgggattcaaagggaggaaagcagcacactgaccctgaaactgccagcacagagccacatcagcagcaggaaagacactgagtga

SEQ ID NO: 130497 - DNA, 552 bp, Homo sapiens
atgaacttgaaactcacaggattgaaagagtctgctgggtaccatgcagcccctgaaggaaacctgctgaccaccagcacctgggagctctgcagacacccccaccccgcgatctttcagtgtaattggcctgaagtgaaaaccacagcctctgatggtgaacagaccacacgtgagcctgtgctcaaagccatgtttttggctgacacccatttgcttggggaattcctaggccactggctggacaaattacgaagagctaaaaatattgtgaatggaaccatattactggtgttaaggagaagtaacctgcctaaggaggagcacttgagaagaaatgacatcaaagatgtacaaagttatcatcagaaaaacaatgaaggccagcttgaattcggagtgatttaccactgcacagaggagcggctgtacacgggccggcggggtcggggcgccttctgcaatggccagcggctccgggtctccggggagacagatggccttcgaggcagcgagaggagctatggccatggcccatctctgctgctgtga

SEQ ID NO: 130498 - DNA, 887 bp, Homo sapiens
  misc_feature (1)...(887): n = a,t,c or g
aactttaatatcttggtgagaaaagcattctaatagctttattctgacatacggaggtatggagagcttgaaggagtcagagaggtgcccagctaagacctgaatgccatcaccctccccaaggctctgcagttttctcgtggtgaacccttgatggatttgttgttgcttgagaaatggcgatgatcgaattggggtttggaagacagaattttcatccattaaagaggaagagttcattgctgttgaaactcatagctgctgtctttgctgtgcttctattttgcgaatttttaatctattacttagcgatctttcagtgtaattggcctgaagtgaaaaccacagcctctgatggtgaacagaccacacgcgatgcctgtgctcaaagccatgtttttggctgacacccatttgcttggggaatacctaggccactggctggacaaactacgaatggtatggcggatggagagagcgctccagacagctctgtggttgctgcagcccgaagaccccctcatcctgcgggatatccttcatgaaggggatcggagcacccctgaggcctgggcggatgatgtgaggcggtttcagaaaatgttcagacacccaagtcatgtacagctgaaggtagttgctggaaaccatgacattggcttccattatgagatgaacacatacaaagtagaacgctttgagaaagtgttcagctctgaaagactgttttcttggaaaggcattaactttgtgatggtcaacagcgtggcgctgaacggcgatggctgtggcatctgctctgaaacagaagcagagctcattgaagtttctcacagactgaactgctcccgagagcangcacgtggctccagcccggtgtgacctgg

SEQ ID NO: 130499 - DNA, 1604 bp, Homo sapiens
cactaatgtcagtacaaccatcgctactgttgtcctcaatgcactggcccgagctacaaagctcctaccacctggccaccgccgcagccccaaccctgccacggctgcagccagcagtcctcctaccactctggcgcactgcagtctccgtagccaccaccaaccattgcgaggtgagcagcagccccaggccatcagaaccacagcgggaagatgcaaggctttatcgtcttgcccgagcttcttcgagtgtgggtcccgcagcagcggtgcacccccaggagcttgtgggcagatcttcagggtcagcaatgccaagctggagccacaggccaggccttccagtcctgtgactggtggacccctcgacctcatggcttgcagagtggttgcggccagcacccgggagatggcgatgctcatagctcaggccttacagacgattaactatgggcgggatgatgagaatggccacacgcacagcgcctgcgaggtgcaccacgggggccgagtccccgagctcagcgtcccatctttcagttggaggaacagaaacaaccccagtttcatcatgggtagcatcacgcccacagactacaccctctccaagtgctacctcccacgtgaggatgtggttttgatcatctactgtggagtgagtacaaatgaacaaccagatgaagaagtacccaggacaagattcccgactgtggcggttagcattggatttgctgttcgacaagagcttgaattcggagtgatttaccactgcttagagttatcggctgtacacgggccggcggggtcggggcgccttctgcaatggccagcggctccgggtctccggggagacagcatcaggaatgctccctggcattcagcagatacacatacagcaggaacagaacctccaagttggagcaagcacagagctgccttgcaatctgcacaccacgcggatacgtgtggcctcagcaccaagttctgccccagaggatgggactgaaagcaagacctgcaacttccgagtcacatcctcaaaaggatactgccttgcacttcctcgtgtcccattccccctcaccacaggctacaaacacttacacaagccaccaactggcacccacagcacttatcactccatgtgtctgctcaaccagcctgggtggttacggaccatttctatcatcttgttcttgaacaacaagatatgctggcagaaaaagtctggcagggaaatcaaaattgaagactatttcccagaatatgcaaattatactgttcctgaagacggccacctcagtgcccatctctacatcctttctgggctgtgtatgtggctgcagcacagtggacaggactctatactctatactgattatagacgcggtggagaaaacagctttgtgatggtcaacagcgtggcgctgaacggggatggctgtggcatctgctctgaaacagaagcagagctcattgaagtttctcacagactgaactgctcccgagaggtaggagagcatctgaatgccacaggtgagctgggggaggaaagggctcatggcagacagcaggcagcctgtggtttcacgatagccgcctga

SEQ ID NO: 130500 - DNA, 651 bp, Homo sapiens
atgcctttattgtttctgggtgtgtctgtgagggtgttgccagagagattgacatttgagtcagtggcctgggagaggcagacacaccctctgtgtgcgtgggcaccatccagtcggctgccagtgcagctagaacaaagcgggtggaagaaagtgggattaagttggcttgctgagtcttctggctttcatctttctcctgtgctggatgattcctgcccttggacatcagactccaggttcttcagcttttggactcttggacttatacccgtggtttgccaggggccttctggcctttggccattgactggagatggcactgtcggcttccctgcttttgaggcttggactcggactgaaccactactggcttccttgctccttagcttgcagacagcctatcgtgggacttcaccgtgtgcttgtattggtgctggtgaagagaagcaaaaggaaggaggcaaaaagaagaacaaagaaggatctggagatggaggtcgagctgaggtaaaagttatcatcacagagggctctgttatcagaggacatttggcaatgtctgaaagcagttttggtcatgacaactgggagaagagtgctattgatattcagtgggtagaggtcaaggatcctgctaagcacctatag

SEQ ID NO: 130501 - DNA, 2497 bp, Homo sapiens
ggcacgagggtcagcggagagtaggcatgtagcttctgcagttgctcctcctcaccctccgcgacctgatttcctagaagggctctgtcacccgaaaagattttccactggcttagaggagggagggcccgccttcccccgttatccattggctgctcgttccgccgcaagttgggggcggggttagggcgcctttcgattgcatcagctggtccagccgaggccaagtcccgggcgctagcccacctcccacccgcctcttggctcctctcctctaggccgtcgctttcgggttctctcgatcgcttcgtcgttcgccaatgtttgaggagaaggccaagcagtccttcagggaaagatgggaggcgaggagaagccgatttggtgctggtgaagagaagcaaaaggaaggaaggcaaaaagaagaacaaagaaaggatctggagatggaagtcgagctgagttgaatccttggcctgaatatatttacacacgtcttgagatgtataatatactaaaagcagaacatgattccattctggcagaaaaggcagaaaaagatagcaagccaattaaagtcactttgcctgatggtaaacaggttgatgcggaatcttggaaaactacaccatatcaaattgcctgtggaattagtcaaggcctggccgacaacaccgttattgctaaagtaaataatgttgtgtgggacctggaccgccctctggaagaagattgtaccttggagcttctcaagtttgaggatgaggaagctcaggcagtgtattggcactctagtgctcacataatgggtgaaggcatggaaagagtctatggtggatgtttatgctacggtccgccaatagaaaatggattctattatgacatgtacctcgaagaagggggtgtgtctagcaatgatttctcttctctggaggctttgtgtaagaaaatcattaaagaaaaacaagcttttgaaagactggaagttaagaaagaaactttactggcaatgtttaagtacaacaagttcaaatgccggatattgaatgaaaaggtgaatactccaactaccacagtctatagatgtggccctttgatagatctctgccggggtcctcatgttagacacacgggcaaaattaaggctttaaaaatacacaaaaattcctccacgtactgggaaggcaaagcagatatggagactctccagagaatttatggcatttcattcccagatcctaaaatgttgaaagagtgggagaagttccaagaggaagctaaaaaccgagatcataggaaaattggcagggaccaagaactatatttctttcatgaactcagccctggaagttgcttttttctgccaaaaggagtctatatttataatgcacttattgaattcattaggagcgaatataggaaaagaggattccaggaggtagtcaccccaaacatcttcaacagccgactctggatgacctcgggccactggcagcactacagcgagaacatgttctcctttgaggtggagaaggagctgtttgccctgaaacccatgaactgcccaggacactcccttatgtttgatcatcggccaaggtcctggcgagaactgcctctgcggctagctgattttgggggtcttcataggaacgagctgtctggagcactcacaggactcacccgggtacgaagattccaacaggatgatgctcacatattctgtgccatggagcagattgaagatgaaataaaaggttgtttggattttctacgtacggtatatagcgtatttggattttcttttaaactaaacctttctactcgcccggaaaaattccttggagatatcgaagtatgggatcaagctgagaaacaacttgaaaacagtctgaatgaatttggtgaaaagtgggagttaaactctggagatggagctttctatggcccaaagattgacatacagattaaagatgcgattgggcggtaccaccagtgtgcaaccatccagctggatttccagttgcccatcagatttaatcttacttatgtaagccatgatggtgaggataagaaaaggccagtgattgttcatcgagccatcttgggatcagtggaaagaatgattgctatcctcacagaaaactatgggggcaaattggcccccttttggctgtcccctcgccaggtaatggtagttccagtgggaccaacctgtgatgaatatgcccaaaacgtacgacaacaattccacgatgccaaattcatggcagacattgatctggatccaggctgtacattgaataaaaagattcgaaatgcacagttagcacagtataacttcattttagttgttggtgaaaaagagaaaatcactggcactgttaatatccgcacaagagacaataaggtccacggggaacgcaccatttctgaaactatcgagcggctacagcagctcaaagagttccgcagcaaacaggcagaagaagaattt

SEQ ID NO: 130502 - DNA, 1023 bp, Homo sapiens
  misc_feature (1)...(1023): n = a,t,c or g
gtagtgtacattctttttcaaatggaagagctggttatagccaacaacatcagcatcgacatagtggacatgaaagagaagaggaaagaggagattggaactgggcaaactattaaaatgcaaacagaaaacttgggtgttgtttattatgtcaacaaggacttcaaaaatgaatataaaggaatgttattacaaaaggtagaaaagagtgtggaggaagattatgtgactaatattcgaaataactgctggaaagaaagacaacaaanggcaattaggcaggagaaggaaataaagggtattcaattaggaaaagaggaagtcaaattgtccctgtttgcagatgacatgattttatatctagaaaaccccattgtctcagcccaaaatctccttaagctgataagcaacttcagcaaagtctcaggatacaaaatcaatgtacaaaaatcacaagcattcttatacactaacaatagacaaacagagagccaaatcatgagtgaactcccattcacaattgcttcaaagagaataaaatacctaggaatccaacttacaagggatgtgaaggacctcttcaaggagaactacaaactactgctcaaggaaataaaagaggatagaaacaaatggaagaacattccatgctcatgggtaggaagaatcaatatggtgaaaatggccatactgcccaaggtaatttacggattcaatgccatccccatcaagctaccaatgattttcttcacagaattggaaaaaactacttcaaagttcatatggaaccaaaaaagagcccacatcgccaagtcaatcctaagccaaaagaacaaagctggaggcatcacaccacctgacttcaaactgtactacaaggctacagtaaccaaaacagcatggactagaaaaatttattcagctaagaaacgtaaagtcaaaatttcagtggaacctgtttacagcggtgtgacactaactacagcaatacagcttgttcctcttctgtgcacagctctgtaa

SEQ ID NO: 130503 - DNA, 456 bp, Homo sapiens
  misc_feature (1)...(456): n = a,t,c or g
aaaaggataacctcgggtgaagaacgnnccgnganggtgcagtggggtcgacgctgagattcgacagtttcattctgactgaggaaggagaccacaagctctgggggggcgtggactcacagctgacccccagtgggcagttccaggccctgttccctgtgggccctgtgacccccagccacaggtggatgctcagatgctatggctctcgcaggcatatcctgcaggtatggtcagaacccagtgacctcctggagattccggtctcaggagcagctgataacctcagtccgtcacaaaacaagtctgactctgggactgcctcacaccttcaggattacgcagtagagaatctcatccgcatgggcatggccggcttgatcctggcgggccttgggattctgatatttcaggattggcacagccagagaagcccccaagctgcagctggaaggg

SEQ ID NO: 130504 - DNA, 1415 bp, Homo sapiens
gaccctccaggggccccagccctccacccataggctccttctccatacctgactctcagcaacaccctagtggacagtcccaagctctgtttcctgtgggccccaagaccctcagccacagatggatgttcagatgtcatggcaataacaggaacacccttcaggtgtggtcggaactcaacgactccctgaagctcctgttctcagatggtatatgtgtctcccgtatatgtgtctccctcatgatctgcaccagcagctccatggtcctcgtcctgcatagatacaagcagagagtccaacatgttcgcagccgcaacctctcccgcagaacatctcatgaaaccacaaccacacacaccatcctcatcctggcaccatggtctcatccatctgcacagctgcagccagtgggaggagacgccgtgagccctgccctcatggttctgctctgcctcgggaacctctccaaagccaccctctgggctgagccaggctctgtgatcagccgggggaactctgtgaccatccggtgtcaggggaccctggaggcccaggaataccgtctggttaaagagggaagcccagaaccctgggacacacagaacccactggagcccaagaacaaggccagattctccatcccatccatgacagagcaccatgcagggagataccgctgttactactacagccctgcaggctggtcagagcccagcgaccccctggagctggtggtgacaggattctacaacaaacccaccctctcagccctgcccagtcctgtggtgacctcaggagagaacgtgaccctccagtgtggctcacggctgagattcgacaggttcattctgactgaggaaggagaccacaagctctcctggaccttggactcacagctgacccccagtgggcagttccaggccctgttccctgtgggccctgtgacccccagccacaggtggatgctcagatgctatggctctcgcaggcatatcctgcaggtatggtcagaacccagtgacctcctggagattccggtctcaggtgtgtctagaaagccctccctcctgaccccgcagggccctgttgtggtccctggagagaacctgaccctccagtatcactctgatgttggctatgacaggtttgctctctacaaggaggacagacgagcagctgataacctcagtccgtcacaaaacaagtctgactctgggactgcctcacaccttcaggattacgcagtagagaatctcatccgcatgggcatggccggcttgatcctggtggtccttgggattctgatatttcaggattggcacagccagagaagcccccaagctgcagctggaaggtttttggggaacgtggtgtttggttacttgcagaagttctttagtgatgatttctga

SEQ ID NO: 130505 - DNA, 293 bp, Homo sapiens
tcttcccaaaggaggccttgaaccagtctgcatatgacaggaacgcagaggggccctccaagtgctgcctggcgcacaaccaggaacgcagtgaccatgctgtccagctggcagctctcgaatgcctgggccatcaaacgcgccacccagtcttcaagcagctgctgcgcttctggaaagcagacaaccagggcagacacaaaggagagcactctctgccagtgaacctcctgcgtttccagaacttcttgcaaatggccaaccaactcctctgcactcagcatcacaaagag

SEQ ID NO: 130506 - DNA, 1722 bp, Homo sapiens
atgaagaaacggccgggtcactctctgtttcagtttcagttcctcatgttcagattgttctcagaggcccgacagcctctttctgaggaggacgtagccagcctttcctggagacccttgcaccttccttctgcagactggcagagagctgccctctctctctggacacacagaaccttccgagaggtgttgaaagaggaagatgttcacttaacttaccaagactggttacacctggagctggaaattcaacctgaagctgatgctctttcagatactgaacggcaggacttccaccagtgggcgatccatgagcactttctccctgagtcctcggcttcagggggctgtgacggagacctgcaggctgcgtgtaccattcttgtcaacgcactgatggatttccaccaaagctcaaggagttatgaccactcagaaaattctgatttggtctttggtggccgcacaggaaatgaggatattatttccagattgcaggagatggtagctgacctggagctgcagcaagacctcatagtgcctctcggccacaccccttcccaggagcacttcctctttgagattttccgcagacggctccaggctctgacaagcgggtggagcgtggctgccagccttcagagacagagggagctgctaatgtacaaacggatcctcctccgcctgccttcgtctgtcctctgcggcagcagcttccaggcagaacagcccatcactgccagatgcgagcagttcttccacttggtcaactctgagatgagaaacttctgctcccacggaggtgccctgacacaggacatcactgcccacttcttcaggggcctcctgaacgcctgtctgcggagcagagacccctccctgatggtcgacttcatactggccaagtgccagacgaaatgccccttaattttgacctctgctctggtgtggtggccgagcctggagcctgtgctgctctgccggtggaggagacactgccagagcccgctgccccgggaactgcagaagctacaagaaggccggcagtttgccagcgagtacgtgtgggtgctattggttttccttttcttcttctccttgatgggcctgctgtcgtcacatctgacctcaaatagcaccacagacctgccaaaggctttccacgtttgtgcagcaatcctcgagtgtttagagaagaggaagatatcctggctggcactctttcagttgacagagagtggtaagaaacacgctgctgaggcacaaatgcggagggccgctcttttcagaggcatcttgcaaatggttaagaacgagccctccttgaggttccttgctaatcttctctcctacttccatgaagacgcggccatcagggaagaggccttcctgcatgttgctgtggacatgtacttgaagctggtccagctcttcgtggctggggatacaagcacagtttcacctccagctggcaggagcctggagctcaagggtcaggcagggcaaccccgtggaactgataacaaaagctcgtctttttctgctgcagttaatacctcggtgcccgaaaaagagcttctcacacgtggcagaggtaacgtcaagatgcccaccttgggccatgtgggggacatgagaattgacagctgcctgggccatgtgcctgcctggctggcaatacaactcgactatttctgccagagcccctcccctgtggtctga

SEQ ID NO: 130507 - DNA, 3594 bp, Homo sapiens
agcagataaaatccccccatctctgtactccacctactgccaggcctgctctgctgctgaagagaagccagaagatgcagccctgggagtgagggcagaacccaactctgctgaggagcccctgggacagctcacagctgcactgggagagctgagagcctccatgacagaccccagccagcgtgatgttatatcggcacaggtggcagtgatttctgaaagactgagggctgtcctgggccacaatgaggatgacagcagcgttgagatatcaaagattcagctcagcatcaacacgccgagactggagccacgggaacacatggctgtggacctcctgctgacgtctttctgtcagaacctgatggctgcctccagtgtcgctcccccggagaggcagggtccctgggctgccctcttcgtgaggaccatgtgtggacgtgtgctccctgcagtgctcacccggctctgccagctgctccgtcaccagggcccgagcctgagtgccccacatgtgctggggttggctgccctggccgtgcacctgggtgagtccaggtctgcgctcccagaggtggatgtgggtcctcctgcacctggtgctggccttcctgtccctgcgctctttgacagcctcctgacctgtaggacgagggattccttgttcttctgcctgaaattttgtacagcagcaatttcttactctctctgcaagttttcttcccagtcacgagatactttgtgcagctgcttatctccaggccttattaaaaagtttcagttcctcatgttcagattgttctcagaggcccgacagcctctttctgaggaggacgtagccagcctttcctggagacccttgcaccttccttctgcagactggcagagagctgccctctctctctggacacacagaaccttccgagaggtgttgaaagaggaagatgttcacttaacttaccaagactggttacacctggagctggaaattcaacctgaagctgatgctctttcagatactgaacggcaggacttccaccagtgggcgatccatgagcactttctccctgagtcctcggcttcagggggctgtgacggagacctgcaggctgcgtgtaccattcttgtcaacgcactgatggatttccaccaaagctcaaggagttatgaccactcagaaaattctgatttggtctttggtggccgcacaggaaatgaggatattatttccagattgcaggagatggtagctgacctggagctgcagcaagacctcatagtgcctctcggccacaccccttcccaggagcacttcctctttgagattttccgcagacggctccaggctctgacaagcgggtggagcgtggctgccagccttcagagacagagggagctgctaatgtacaaacggatcctcctccgcctgccttcgtctgtcctctgcggcagcagcttccaggcagaacagcccatcactgccagatgcgagcagttcttccacttggtcaactctgagatgagaaacttctgctcccacggaggtgccctgacacaggacatcactgcccacttcttcaggggcctcctgaacgcctgtctgcggagcagagacccctccctgatggtcgacttcatactggccaagtgccagacgaaatgccccttaattttgacctctgctctggtgtggtggccgagcctggagcctgtgctgctctgccggtggaggagacactgccagagcccgctgccccgggaactgcagaagctacaagaaggccggcagtttgccagcgatttcctctcccctgaggctgcctccccagcacccaacccggactggctctcagctgctgcactgcactttgcgattcaacaagtcagggaagaaaacatcaggaagcagctaaagaagctggactgcgagagagaggagctattggttttccttttcttcttctccttgatgggcctgctgtcgtcacatctgacctcaaatagcaccacagacctgccaaaggctttccacgtttgtgcagcaatcctcgagtgtttagagaagaggaagatatcctggctggcactctttcagttgacagagagtgacctcaggctggggcggctcctcctccgtgtggccccggatcagcacaccaggctgctgcctttcgctttttacagtcttctctcctacttccatgaagacgcggccatcagggaagaggccttcctgcatgttgctgtggacatgtacttgaagctggtccagctcttcgtggctggggatacaagcacagtttcacctccagctggcaggagcctggagctcaagggtcagggcaaccccgtggaactgataacaaaagctcgtctttttctgctgcagttaatacctcggtgcccgaaaaagagcttctcacacgtggcagagctgctggctgatcgtggggactgcgacccagaggtgagcgccgccctccagagcagacagcaggctgcccctgacgctgacctgtcccaggagcctcatctcttctgacgggacctgccactgcacaccagcccagctcccgtgtaaataatttattacaagcataacatggagctcttgttgcactaaaaagtggattacaaatctcctcgactgctttagtggggaaaggaatcaattatttatgaactgtccggccccgagtcactcagcgtttgcgggaaaataaaccactggtcccagagcagaggaaggctacttgagccggacaccaagcccgcctccagcaccaagggcgggcagcaccctccgaccctcccatgcgggtgcacacgaagggtgaggctgacacagccactgcggagtccaggctgctagaggtgctcatcctcactgccgtcctcaggtgggttcgggcttcaccgcctggccctctgtggtcacagaggggctcggtggcccaggtggtggttccgcctccaggggcagggccttgtcctgggtctgtgtcagcgggtgcaccatggacatgtgtacattgaggttgtgggccttctcaaaccgccggccacactggtcacaggcaaagtccagctcagtctcagccttgtgtttggtcatgtggtacttgagggatgcccgctgcctgcactggaacccacagacctcacacctgggggacagaggcagataagaaggtgcgagggccacagccctgggagggggtcctgactcacacttactgcaaaggcttggctcccgaatgtcgcatttggtggacgagaaggtgcttccgctgcttgaaggtttgtccacattcgtcacagatatagttccgcacctctgagaggggagagtccagtgagtccaggcccctgatgctccaacctcccggggggacgacgatgacaatgtgaaaccatcacagctgggaagacatttctgcacatggttcaccatgcagtgggcccaagcaaggggcctatgagggcctcgtttattaagatctttaaactgctttatacactgtcacgtggcttcatcagctgtgtgcatttcaggatggtttttaaagaaacctcagaaagctatttccttaa

SEQ ID NO: 130508 - DNA, 996 bp, Homo sapiens
  misc_feature (1)...(996): n = a,t,c or g
tcagtgtcgtggaattcggggatagtgtggggcgaacagcctgagctgaggatacccaggtacctgtcagcagctgggagaggatgggggggtcgacctcttgcaggagggtgggtgtggtgcagagagaggcagtccccatgataggcccattggtcctggggttgaccagtgagccagtaaattatcttattgctttaaacaagtttgtgcttaatctgtcccaactaaaatggagcttataaacttacttagcaaggaacctcaaggagggctcgttcttaaccatttgcaagatgcctctgaaaagagcggccctccgcatttgtgcctcagcagcgtgtttcttaccactctctgtcaactgaaagagtgccagccaggatatcttcctcttctctaaacactcgaggattgctgcacaaacgtggaaagcctttggcaggtctgtggtgctctgtaaaccgcaggagaccaaccctgagaatggccgacctggtgctcccatgggtaagagggtacagccctcagcacagaagagggcatttcctctttgcttattgtaagtcttaaaactggtgacagttttacctatagaaggtaatactgggcctctggacagaagaggctcaggtaggaggccagggacttcgagcacccacaccaaggctgctgcaccacgtcctcaaataagacattaaaagataagcccacaggccggatgcagtggctcatgcctgtaatcccaacactttgggagnccgaggtcggcggatcactgaggccagttcaagaccagcctggcaatatggtgaaaccccgtctctactaaaaatacaaaaattagccgggtgtgacagactcacgcctgtaatcccagctactcgggaggctgatgcaggagaattgcttgaacccaggaggctgaggttgcagtgagctgagatcacaccactgcactccagcctgggtgacagagtgagacccccatctcaa

SEQ ID NO: 130509 - DNA, 1770 bp, Homo sapiens
aggccacccccagaggagcgcgtgctcgtacgggacttccagcgcctgcttggtgtggctgtccgccaggaccccaccttgtctccgtttgtctgcaagagctgccacgcccagttctaccagtgccacagccttctcaagtccttcctgcagagggtcaacgcctccccggctggtcgccggaagccttgtgcaaagcatgggcaggaggcactggcgggcattgtcagggcagggccgcatctggtgtgtccacaggaagaagagtctccgtgtggggaggtgacgctgaaacgggaccgctccttctcagagcatgacctggcccagctccgaagtgtggtggccgagcctggagcctgtgctgctctgccggtggaggagacactgccagagcccgctgccccgggaactgcagaagctacaagaaggccggcagtttgccagcgagtacgtgtgggtgcgcgccgagcggagcctaacgccgggtcctctaggaacctcgggccgggcagcacccgcgggattctgctggcgtcctccgctgccatgaagcgggaccggctgggccgcttcctgtctcctgggtcgtcccgacagtgcggggcctcggacggcggcggcggcgtcagccggactcggggccgcccttcccttagcgactgggtggcgcgtttgatggcccaggcattcgagagctgccagctggacagcatggtcactgcgttcctggttgtgcgccaggcagcactggagggcccctctgcgttcctgtcatatgcagactggttcaagaatctacctgaagccaccaaagccagagcaactctggacaggaggcctcaggggcgagcacagcagagggcaagggcgcaggacacagcagggtcaggggtgaacacagcagagggcgagggcgcagggtacagcagggtcagggcaaacacagcagagggcgagggcgcagggtacagcagggtcagggcgaacacagcagagggggagggcacagcagaggatgagggcgcagggtacagcagggtcgggctgaacacagcagagggcgagggcgcagggtacagcgggcgaaactatgagaaccctttaagacatggaacacagcactgtgcagctgagagtgtccgtgtaattgtccatcgacctcctgtgtccgactgtgctgcctctgcctgcctgtcccagcagacctggccacctggggaccacctgggcctgtgggcctggaagtcggtgcagacgatggtgactaggatgctgcagaagcttcgggaggacgagccgcatctggagacgcctcgggcagagctggacagcctgggtcacacagactgggcccgactgtgggttcagctcatgcgggagctccgccgcggagtgaagctgaagaaggtgcaagagcaggagttcaaccccctccccaccgagttccagctcacgcccttcgagatgctgatgcaggacatccgggcccggaactacaagctgcgcaaggtcatgagtgccagccaggatatcttcctcttctctaaacactcgaggattgctgcacaaacgtggaaagcctttggcaggtctgtggtgctctgtaaaccgcaggagaccaaccctgagaatggccgacctggtgctcccatgggtaggaggaaggtaatactgggcctctggacagaagaggctcaggtagcaggccagggacttcgagcacccacaccaaggctgctgcaccacgtcctcaaaggggatctctag

SEQ ID NO: 130510 - DNA, 706 bp, Homo sapiens
taggggcgggcagccaggggcacttccgctggcccaagtgatctgcatgtggcagggctgcgcagtggagcggccagtgggcagtatgacgagccagacccctctgccccagtccccccggcccaggcggccgacgatgtctactgttgtggagctgaacgtcgggggtgagttccacaccaccaccctgggtaccctgaggaagtttccgggctcaaagctggcagagatgttctctagcttagccaaggcctccacggacgcggagggccgcttcttcatcgaccgccccagcacctatttcagacccatcctggactacctgcgcactgggcaagtgcccacacagcacatccctgaagtgtaccgtgaggctcagttctacgaaatcaagcctttggtcaagctgctggaggacatgccacagatctttggtgagcaggtgtctcggaagcagtttttgctgcaagtgccgggctacagcgagaacctggagctcatggtgcgcctggcacgtgcagaagccataacagcacggaagtccagcgtgcttgtgtgcctggtggaaacttgagggagcaggatgcattattattcagaggtcctgtgtttttcttgcaggataagaagatgtttcaagttttgtttgttcaagtttgggccctgggaaggcggtcctagacaacagcgacctcattgcactttt

SEQ ID NO: 130511 - DNA, 1059 bp, Homo sapiens
atgcataatttgcctctcaatgttattcctggaaggtctctcattgccttggctgtgttagaggctctgcacacagccaagaaacatgaatcagattatgtcacttctggttttagaactctcagtggctcccattgcaaaaaggacatatcccaaactcccagccaggccccgaacgctttccacgccctgtccggtctggcttcccttggtctggcccaactaaattctttcctggcactgactgccaggagacaggaaaactatagaaagcagaagagggagaaccactacaaaattggacagctgtacatgatcagcaaacacagccatgaacagagtgaccggggagaaggggtggaggtcgtccagaatgagccctttgaggaccctcaccatggcaatgggcagttcaccgagaagcgggtgtatctcaacaggacctacactcgcggctcccctggttctaagccttctgacttggactcagccacactactggcaccccagggtctccaacttgcagtggaatatcccaaagccacacaagttctgggcactgagcttattttggggaagatctgggagaacaggaagcagaaatgggaaagagagacccaagccatgaccacaaggttctatcaacaagctgttagctccaaactccagtttcccaacatgattcagcaccaggtctttgctgacaatgcttttgaccagtttggttaactgtctccctcacccttgatactagcacatcagaggaggcaggtctttttgaatttatcacagcacctgtgaatcaggcctagccagaaagcagacactactttaagctgtcttctactaatgattatccgcggtaagttctagcttctttgaatgcagaggtaagctgtgttgtcactatacctctgagaatcagaaagccagcccttgtgtgctggatattctttttgctcatgtgttttttacatgcagctctcagatcacaaattgtaccacaaatagcagtggccacatcgtaaggaatcaaacatgatctgttttccgtcgagc

SEQ ID NO: 130512 - DNA, 1336 bp, Homo sapiens
gcggccgctcctaccaccctgggcagccgagcagagtcgtccccagcgggtctccctccctgcctccctgactttgcaacaccgcgttccgggaggaccggcctcggcgagggaggaggcgggggagctgcgaacacccagacccaaaccctgacatgctctggggcggagaggaggaagccaggagctgagcgcagccgcgggggctgcttcgccctccggctccgagcgccgggctccgggcgccctgccctgcgcctgggcagcagccttgctggtcttgggggcgccccccgcttcccgccccgggggtttcgcggccggcaagaccatgctgctgaaagaagtaccggatcttgcatgccgctcaccgtaagacgagtacaaaatttggacagctgtacatgatcagcaaacacagccatggaacagagtgaccggggagaaggggtggaggtcgtccagaaagagccctttgaggaccctcaccatggcaatgggcagttcaccgagaagcgggtgtatctcaacagcaaactgcctagttgggctagagctgttgtccccaaaatattttatgtgacagagaaggcttggaactattatccctacacaattacagaatacacatgttcctttctgccgaaattcttccattcatatagaaaccaagtatgaggacaacaaaggaagcaatgacaccattttcgacaatgaagccaaagacgtggagagagaagtttgctttattgatattgcctgcgatgaaattccagagcgctactacaaagaatctgaggatcctaagcacttcaagtcagagaagacaggacggggacagttgagggaaggctggagagatagtcatcagcctatcatgtgctcctacaagctggtgactgtgaagtctgaggtctgggggcttcagaccagagtggaacaatttgtacacaaggtggtccgagacattctgctgattggacatagacaggcttttgcatgggttgatgagtggtatgacatgacaatggatgaagtccgagaatttgaacgagccactcaggaagccaccaacaagaaaatcggcattttcccacctgcaatttctatctccagcatccccctgctgccttcttccgtccgcagtgcgccttctagtgctccatccacccctctctccacagacgcacccgaatttctgtccgttcccaaagatcggccccggaaaaagtctgccccagaaactctcacacttccagaccctgagaaaaaagccaccctgaatttacccggcatgcactcttcagataagccatgtcggcccaaatctgagtaa

SEQ ID NO: 130513 - DNA, 474 bp, Homo sapiens
atgacgccgtggcaccggcccttgatccccgtcgacccacgcgtccggtggcgacagcggcggcgagaggatgaacaacaagttcgacgctttgaaagatgatgacagtggggaccatgatcagaatgaagaaaacagcacacagaaagatggtgagaaggaaaaaacggaacgagacaagaatcagagcagtagcaagagaaaggctgttgtccctggaccggcagagcatcccctgcagtacaactacactttttggtactccaggagaacccccggccgtcccacgagctcacagagctatgaacagaatatcaaacagattggcacctttgcctctgtgagttcttggtgaattaatggagtgtgccttgatagttcgttcatgcctgtattgatatgatgtttatttactttcctagtaacctatttaagattctggttttcttaattgactgacctgagtctccggag

SEQ ID NO: 130514 - DNA, 489 bp, Homo sapiens
ccagctttccccacacactccctctcccctctgagcctcagttttctcatctgcagagtggggacggtaacaccctttgtcgtagagtttggaggatgcaatgagtttgaaagatgatgacagtggggaccatgatcagaatgaagaaaacagcacacagaaagatggtgagaaggaaaaaacggaacgagacaagaatcagagcagtagcaagagaaaggctgttgtccctggaccggcagagcatcccctgcagtacaactacactttttggtactccaggagaacccccggccgtcccacgagctcacagagctatgaacagaatatcaaacagattggcacctttgcctctgtggagcagttctggaggttttatagccacatggtacgtcctggggacctgacaggccacagtgacttccatctcttcaaagaaggaattaaacccatgtgggaggatgatgcaaataaaaatggtggcaagtg

SEQ ID NO: 130515 - DNA, 201 bp, Homo sapiens
atggtgggcaagctcacgggaaagccatgtccccagtactaccagccccagaggcctcctgagcacatcgagcttgacagcctatgcaaaattcttcccccaccatcccttgtgggcatgaatgtggtcatggaactcaagaaagacctgaacatctgtggcaccctccattcggtggatcagtatctcaacatcaaatga

SEQ ID NO: 130516 - DNA, 404 bp, Homo sapiens; identical to SEQ ID NO: 114045

SEQ ID NO: 130517 - DNA, 840 bp, Homo sapiens
cgcccagcccccagtggggttcccggcgcggggaatgtcccgggtggagctggctgagtcgcgcgctctgctccacccgacggggctgtgtgtgctgggcctggctcgcggcgaaccgagatggcagagcagtcggacgaggccgtgaagtactacaccctagaggagattcagaagcacaaccacagcaagagcacctggctgatcctgcaccacaagggggtacgatttgaccaaatttctggaagagcatcctggtggggaagaagttttaagggaacaagcttggaggtgactgctactgagaactttgaggatgtcgggcactctacagatgccagggaaatgtccaaaacattcatcattgggggagctccatccagatgacagaccaaagttaaacaagcctccagaaccttaaaggcggtgtttcaaggaaactcttatcactactattgattctagttccagttggtggaccaactgggtgatccctgccatctctgcagtggccgtcgccttgatgtatcgcctatacatggcagaggactgaacacctcctcagaagtcagcgcaggaagagcctgctttggacacgggagaaaagaagccattgctaactacttcaactgacagaaaccttcacttgaaaacaatgattttaatatatctctttctttttcttccgacattagaaacaaaacaaaaagaactgtcctttctgcgctcaaatttttcgagtgtgcctttttattcatctactttattttgatgtttccttaatgtgtaatttacttattataagcatgatcttttaaaaatatatttggcttttaaagt

SEQ ID NO: 130518 - DNA, 1856 bp, Homo sapiens
tcagggcaggtggaggattggggagcccctgccttcctgaggctgatctgagttaggctgaaccccccagtcagatctggactgaggagaccaacatcccctctgggccagcctggagagcaggcagggtcctgcatgccctgagtcctctttatttgggtctagcgccggaagttgcttgtaacggcagccagtaaagagagatgccatcccttctgtccacaggtatcgagtgaacttcagacctagatatgtcactaggtataagacagtgacacagttggaatggaggtgctgtcctggctttagagggggagattgccaagaaggtcccaaagaccccgtgaagaccctccgccccacgccggctcggcctcgaaacagcttgaagaaagccacaggtaacttcttatttgtgctattatgtatggccacctttaatatttccggtgctccttcaaacaacaggatttgtgctttacaatggtgagctttgaatggccttcgaataacacacatagatacccggctaaagtctttgtataataagtctgatctggactttcccagggacagtttttgtccatttattattccattaaatgaacgacagtttcctgtttctttgtatgctttgtgattgttgtcgttgttaattgctgatggctgaaatttgaccagatcttgcaaatcagtagaaatctggaagacgtggctgtagaactgctggactgaattcttcaggccagaaatgtctctggaatgcgacctgagcgttccgttcatctgcctgacacagttccacaggcttgctgacatgcttgttgagcccctccttgatcctctgaagatttcctgagatagagtccagcttgctgcaagttttctccatatgagacaccctgccctccaccatggagacctccctctggaccccctgcgtgcattccttacaagcatccagctccgagatgacctggctctgcaacctctgccacctctcctccagctgactgcagcaatgagccacggggtgctggggggacggcagggtgtccactgtcctttcttgctcacccaccttagtgaacctacccatgccagcgttttcacctgctctacaattgctcatttccttttgaagatgagtcacatcattttctgtgtggtttaattgagaataaagaaaactaaaatcctgttgaagtttctggatggtttgttcggtttcttgaaacttcctgtgcatcgtgtcgttgagagatttcaaaaggtgcaggctgtcgcgtactgcgcggtcttccctgtttggcaaggcaccttccatcccatgaggctttccctggatgttcagcaggcaaatgtcttcaacaacttgaactttgtccttcaggtggtttaattccatcatgacccgttcatctcctgaccctgacactcctggcagggctgctgcccctgggggactgagctttgcaccagtgttattggtcatctgtaggagaacgctccccagacggtcttccagagactgtattttctgatcaacaagctgcttcaagtcacccacctctccattaatggcgccccgaagggtttcctcaatgtaaaagcaatgttcttcagcgttcttctccgtcacattgatccttgcatcgagttcattccattttgcatcaaaatccacatctggctctggaactataaggcggtcaaactcattgtccagtcttccattcagcattctggtggcttcagcaactctctcgattttctggtccaatgtcttgatctgttgaccaatgtcaccattcttttcactgtcgcaacaatttgcctgggctgaaggctcctgt

SEQ ID NO: 130519 - DNA, 485 bp, Homo sapiens
tttgtgttttaggtgcatccgtgtatttctgtacaacaaaattatttattttaaatgttactagttttttgcttcttacgtgtacagtctcatgatagatagacaaggggactcttcagtccagagtccatgaggccagaagctgacatcctcagttcttattcagaatgaatttaaacaagccagccaagcgccctgccatgaaactcctgtaatttctgctactcggggggctgaggcaggagaatcgctggaagcaaggaggtggagattgcagccagccgagaccatgccaccgccttggcgacagaaggagacaccatttaccttaacaatcccaagttgacggtcaagtccagcgctcgccgatgacatcttatggacccagggctcgcggaaggacccagttggaactttatcacaccaagccggcccacctttgctgccatctaactccgccgacctgcccgcagttccccactctc

SEQ ID NO: 130520 - DNA, 1017 bp, Homo sapiens
atgtcctgccgtgctccggaaaccgggatccggtgcagagaaacccccatcctgggaaacgggctgctgccagaaaggcggtcaccccctgacccatcacataacgtgtttgtggggaacctgatgctaaactattcgcagacgtcctgcttctgggtcagggttttccatggagcagagcagctccctcgctgctatctattgaaagtcagacctccacacaaggctctctgcacccgtgtgcggaggacctgcggagagtggggaactgcgggcaggtcggcggagttagatggcagcaaaggtgggccggcttggtgtgataaagttccaactgggtccttccgcgagccctgggtccataagatgtcatcggcgagcgctggacttgaccgtcaacttgggattgttaaggtagaacgggtaactctggcatcatgggcatttgggccactttctcatggaacttacttgtgcttcaggatctgttcggacccaatcaggtccacagcatttctgtgtcatgctggagtgctgctgtgcacacccacttacgcccagtgtgtgatgagcggctcagctcacatgtccgagatgcatcttcaaactctcatgcgccacgggttgtcttttgactcagtcgcagtctatgcagagacacgtttggagaacggtttctgtgaagttggggaggaggggctgcgttttcggcctcaaaaagacttcgactcatggtttgggtttcccagtcatgggctgccctgccatctgggactctggcgcgtcacttgtgagtcagagctggcagtccagggctttgctgggggaggctgtcgcggtgcttccgtgccccagggcagtgtggggctgccctggctggtcgaacagcatgccacaactcctgaggcttggcccgagatccacaaggacgtattgggcatggcgctggtggctggggatgcccttcccggcccagtggcaggccagtgcaggtctgatgcacctgccaagccctag

SEQ ID NO: 130521 - DNA, 1013 bp, Homo sapiens
tttttttttgacacacttacttaatgggtttattcaaagtaagagtctttatagatcttttcactaattaaatacagttgggtgtctgctgaatttcccttgaaaacattttgaagtgaaaaaagtcagtactgagtactgtacatttgtgttgattaacatttggacacaaatatacttttaacaccaatagagctgaaagactatgcctttatcttggatttcatagatttccccttccccccagtgacttatcttacaacggcaaacaccagcaggcaagggggaatctgtagaaaatgtgcacccctggtttcctcctccatctcttctaccaatgtgggaagaaagccaatgcttcccagcactttctgaaggtggaatctcctcctctttacttaatgttggagaaaagtggccaccagtactcgatcattgtagattcggaatctcgccatctaaaccagacttcaaaagtgctctttcgggtctacttagttaagaaagagaataatggaagatgataagtggttagcaaagccagatgccttatcaccagggtcctgttctgctgatctgtgccaagcaactcatctcaccaaacctaatgtcaaccctcttgatccacaaaccttccttctcttctaacatggtctgcagtctgtcacggaggacatgaaacaagatgcaagcagttccttaatgaccttcagaccaaactgctccaaacagtggccaagacgttgcagtcaggagtaaacccaatccttaggaaaagaactgtgcattccagcatggatgtgtttccaaagaaaggagaacctgcccatgcctccatgtcccaatcaaagctgcctttgtcagataacctgaaaaccaagctaggaaaggccagaagtaaaactgttaaaatcatcatcatgatcatgatgatcatcatcatgatcatgatgatcatcatcatgatcatcatcatcatcgaaaacacagccccagtttgctttacagcccaa

SEQ ID NO: 130522 - DNA, 277 bp, Homo sapiens
tttggaggaaatcagaaaggagagaggacaggccaaaagggaaaaggagaaagaggagcaaaaagaaaagatttccctggtgctgtttgcatctctgctctggggctacttgccaagggatgtggatgaagctggaggccatcatcctcagcaaactaacacagaaacagaaaaccaaataccacatgttctcactcacaagtgggagttgaacgatgagaacacattgacacatggaggggaacaacacacactggagtctgttggggagtcgggg

SEQ ID NO: 130523 - DNA, 706 bp, Homo sapiens
  misc_feature (1)...(706): n = a,t,c or g
ggaaagttctagtggcttgaggtatccgcaggagcggccgggtggcgggaggaaccgttacgggaactgaagttgcggattaagcctgatcaagatgacaacctcccaaaagcaccgagacttcgtggcagagcccatgggggagaagccagtggggagcctggctgggattggtgaagtcctggggcaagaagctggaggaaaggggttttgacaaggcctatgttgtccttggccagtttctggtgctaaagaaagatgaagacctctttccgggaatggctgaaagacacttgtggccgcccaacgccaagcagtcccgggactgcttctgatgccttcgagagtggtgcgacgccttcttgtgatgctctctgagaagctctcaatccccagccctcatccagagtttgcagccgagtagggactcctcccctgtcctcttacggaaggaaaagaattgctattgtcgtactcacctccgacggtactccggggtcttttggggagttttctcccctaaccattttcaacttttttttgggattcttcgctcttggcatgccttcccccgtccttttttcccttggccagtttcctgggtgacagtttaccagcttttcctggaatgggatttcccgggccccatccntcaacccccaccttnaatttnaattccgttttgataacattgggttcctttttt

SEQ ID NO: 130524 - DNA, 834 bp, Homo sapiens
atggcagagaaccaggagactcgcttgagtgcctacgacaccagggccctgggtttgaagcacaaaacagagtggccatttgggcagacaccaagctctctgaagagagaagcggatctcccagcacagcactcgagctctgctaagagacagactgcctccttaagtggctccttgacccccgtgcctcctcactgggaggcacttcccagcaggggtcgacagatacctcatacaggagagctctggctggcatctgacaggtggccctctgagaagaaacttccagagaaaaagcaggcagcaatctttgctgttctgcagcctccgctggtgataaccaggaaaacagggtatggagtggaccctcagcaaactcccgcagacctacagcagacgggcttgactgttagaaggacagtaagaaacagaaaggaacatagcatcaatatcaacaaaaaggatgaccatgcaaaaacgacatttgaaggtcaccaacagcaaagaccaaaggtagataaatccacgagcatgaggaaaaaccagtacaaaaaggctaaaaattccaaaaaccagaatgcctcttctcctctcaaggatcacaactgcttgccagcaagggaacaaaacttgatggagaatgagtttgatgaatttacagaagaaggcctcaaaaggtgggtaagaacaaatttccccaagccaaaggaacatgttctaaatcaatgcaaggaacctaagaaccttgaaaaatgggtagaggaattgctaactaaaataacgagtttagagaagaacacaaatgacctgatggagctgaaaaacacagcatga

SEQ ID NO: 130525 - DNA, 679 bp, Homo sapiens; identical to SEQ ID NO: 129523

SEQ ID NO: 130526 - DNA, 755 bp, Homo sapiens
ttaactgaatggcacccttaatccagtttatctcccaatcagacctgaacattttcaaaaatgactaagtcagaatcaagtatttatcaggacagaatgaggaaatttatcaggacatattgaacaaccaaaatgtaccaggcacttcacattcattttcttatttaattcaccaaagtcatacaagaaagatcttattagctccattttacagatgagaaaaccgaggctcagggtggtaagaagctcaaccaggccacacagattgtgaatggtaaattcaagattcaaacagccagatgcccagcattgggcatggcacaaagtctgttaatctgcagagtcccaggacccagagacttacctatccaccccactctcaacaccagggctctgtaccctttccatttctaacagcagcaacttgttcgccagctgaatgaaacagggatccaagggttcagtttactttagcacatatttttatgccccagatcagtatttcagaaataagaaagattcctgtatctcctagttccccagctgtctcagaaaatcaggctggtttgatacacggttctttcaaaaacaagaatttacgtttgaggttcagcaggctggggtcattccttctgatttggggaccagggtttcctccacatccctgggtacaaactgcagtagatgggagtccatttgggacaggaactatgattgaactgttaatcgttgtctttacattgctgagcatggtc

SEQ ID NO: 130527 - DNA, 1635 bp, Homo sapiens
atggcccatcttcggtcatgctgcagttccctctatcaacctggacaccttctacctcctcacaaccccattcaggaccaccctcttacagcaccatccctaactcatctcaccaggagagcctattttacagatgagaagactaagggaggccagtcagcctacgctgtgtccctgctgcgggagtgtgtgaagttgcggccctcggaccccaccgtgcccctgatggccgcgaaggtctgcatcgggtcccttcgctggatggcggccaagcacctggcgggggtcctgctgcactccctgagtgaggagtgctactggagccccctgtcccaccctctgcctgagttcatgggcaaggaggagagttctttcgccactcaggccctgcggaaacctcacctctatgaaggagacaacctctactgccccaaggacaacatcgaggaagccctcctgctcctcctcatcagcgaatccatgctggcgaacaagttgctgctgttagaaatggaaagggtacagagccctggtgttgagagtggggtggataggcagctgagtccctatagtgacacaaatgtaaatgctcaaaatgcccaaatcgtgccagtagcggccaagtctgcacagaatgaagtcccaggatacccagaagagacagaaaaaagtcgggtacagtccaacttgctcacccagtttcaagacctccgcctcctcctggctgcaccagagtgtctgccccctcggatgagcccaccttcggcccatggggagggcctggagtcagggggcccgagcaggacaggcctctctctggaacgcctacccaactccatcgcctcccgcttccgcctgacagagagggaggaggaagtgatcacctgttttgagagggcctcctggatcgctcaggtgttcctgcaggaattggagaagaccacaaataacagcacgtcgaggcatctgaaaggctgtcacccgcttgactatgagctcacctacttcctggaagctgccctccagagcgcctatgtgaaaaacctgaagaaggggtggatggcagagtgcacgggatggccactgatggtgccgtatctggtggcacggtggcccaagggcacggagtcctgccagtgcacagaggaaagggggcaacaaggcggggaccagctgggggacggggccagcatcctgagggatgactttgggaaattgctgctggctgaggccctcctggagcagtgtttgaaggagaaccatgccaaaataaaagactccatgcctttgctggagaagaatgagccgaagatgagcgaagccaaaaattatctaagcagtatccttaaccatgggaggctctcgccacagtacatgtgtgaggccatgctgatcctgggcaaactgcattacgtggagggctcataccgagatgccatcagcatgtacgcacgggccgggattgatgacatgtccatggagaacaagcccctgtatcagatgcggctgctgtcggaggcttttgtcatcaaagattcttcacccctggtagtgcccatgccctggcactggtgtctaaggtggatgccggtggcaaccggccatgttgacattgcctggtgcctgggacgttag

SEQ ID NO: 130528 - DNA, 654 bp, Homo sapiens
atggccgaggccctcgctgtagctgtgccagtgcctgcaggagcctgggtttcgattcaaggtctgcacgtcaatggggcggggctggctgccccgaggcagttcctgtttcctcaagcagaagtgattgtcaacaaggaggatgatttcactcgctcccagccccggggacatttggccgtgtccagaaacagttttgactgtggtgacgggatgggatactactggcatgtaacagactccacctctgggagctccctttgcaagaaaccgtaccagggacaagggtcttccctacaaggccatgaagcacgcagatatctcctgcgggaggaatctctttccgagcgcccagccatggaggccatcaagaagaaaatgcagatgctgaagttggacaaggagaatgccatcgaccgcgcggagcaggcggaggcggataagaaagccgctgaggacaagtgcaagcaggtgaggtgccctccgctgggccgctccgggctgctgggagtcctctctgtgcggaaggccggggtctggagcccagttgggggtcgcagacacctgcgggaggataggaggctgatgctttggcggaggaagagcgaggggaccattgccttcttggatggtcctgggctggaagaggggtga

SEQ ID NO: 130529 - DNA, 1018 bp, Homo sapiens
gggggaggcgggaggatgaagttgattgactatggtctctccggctaccaggaagagtctgccgaaggtgaaggccatggacttcatcacctccacagccatcctgcccctgctgttcggctgcctgggcgtcttcggcctcttccggctgctgcagtgggtgcgcgggaaggcctacctgcggaatgctgtggtggtgatcacaggcgccacctcagggctgggcaaagaatgtgcaaaagtcttctatgctgcgggtgctaaactggtgctctgtggccggaatggtggggccctagaagagctcatcagagaactcaccgcttctcatgccaccaaggtgcagacacacaagccttacttggtgaccttcgacctcacagactctggggccatagttgcagcagcagctgagatcctgcagtgctttggctatgtcgacatacttgtcaacaatgctgggatcagctaccgtggtaccatcatggacaccacagtggatgtggacaagagggtcatggagacaaactactttggcccagttgctctaacgaaagcactcctgccctccatgatcaagaggaggcaaggccacattgtcgccatcagcagcatccagggcaagatggagcattccttttcgatcaggcatatgccagccttccaagcacgcaacccaggcttttctttgactgtcttgcggtgcccgagatgggaacagtttgaaattgaggtgaccgtcatcagccccggctacatccacaccaacctctctgtaaatgccatcaccgcggatggatctaggtgtggagttatggacaccaccacagcccagggccgaagccctgtggaggtggcccaggatgttcttgctgctgtggggaagaagaagaaagatgtgatcctggctgacttactgccttccttggctgtttatcttcgaactctggctcctgggctcttcttcagcctcatggcctccagggccagaaaagagcggaaatccaagaactcctag

SEQ ID NO: 130530 - DNA, 1096 bp, Homo sapiens
atggctgactcattcagcgtactagtgcactgcgtgaatgtccctgtcgttgttcctagtcgagcagtgactgcctcccacgtgcactccggcaacaagcccttcgatgtgacctctctcgagctctcgccactgctgctcggtccaagacccatccttcgccaagggaccatcttggagacactctgcttaccaacgtctgcgccaagcctccatcgggagagcaggcggtccgacgcgaagtgtagttcggctgcggtccggggccgctcggcagcggaacccagacccggcggaactaccgtgcccacaagcagcgcgcccgaaagccccccccccggggtccccgggcccctagtctttctgcgagggcgcgaggactccaggagccgtcctggttcgagcatttctgaagaaactgagttcccggcgttcgcagcctgggagtcacaggcgcccacccaccgtgggcacggttcgctatggagacctgctgccttccctgggacagtgtgacgcatggatgtcctacagctcagcagtccaggagtgggccactatctcctcagtgcctacagaagacggcctgcactccttccccatggaaagctacgccctggctcaccttggtggcatgagaagcgactgttgtcgattgctgcagagaccacatctcaatactagcgcgcagctacgaccaattcacgcgcataacacgagattcctcacgaacgagagctgcagagtgagcagattcatcggtctatctcgtgtcgtaggaactctcatacatcgggggcgatggtctatgttctccccgatacaaccatatcgttactgcgcgtgccccaagcgctatgcgtccattcaagcactcctgccctccatgatcaagaggaggcaaggccacattgtcgccatcagcagcatccagggcaagatgagcattccttttcgatcagcatacacgtatgcggcccggcaagatgccacgtgcctgcgagctgaaaggtgcttcagcatcgatcggccgcgacagcctaggctgtcgctgaggcgctgtgactgcatgttactgtcagcgacgcccgcctag

SEQ ID NO: 130531 - DNA, 909 bp, Homo sapiens
atgaccctccgccgactcaggaagctgcagcagaaggaggaggcggcggccaccccggaccccgccgcccggactcccgactcggaagtcgcgcccgccgctccggtcccgaccccgggaccccctgccgcagccgccacccctgggcccccagcggacgagctgtacgcggcgctggaggactatcaccctgccgagctgtaccgcgcgctcgccgtgtccgggggcaccctgccccgccgaaaggagcccctcgcccgagggacagagacagccccaggcaagttgaaggtccgagagcccccggtgggagaagcgggccggtggctgcgccgcgtgcgttctcactctgaggaagtgcgtggggagccgctgactccggatagcacgcccttccgaggggactccccgattcctgggctgggggcctgccgcctggccccacgtctgacgggtggagaccattttagaataatgatctccccacctgctgccagtgtggaaaccagcaagggcttagaggttcatggatctggaacccaggaggatggttgtgtccctgcagtcccaggtatgaagggctcaggattccgctggaagaatctcagccagagtcctgaacagcagcggaaagtgctgacgttggagaaggaggataaccagaccttcggctttgagatccagacttatggccttcaccaccgggaggagcagcgtgtggaaatggtgacctttgtctgccgagttcatgagtctagccctgcccagctggctgggctcacaccaggggacaccatcgccagcgtcaatggcctgaatgtggaaggcatccggcatcgagagattgtggacatcataaggcctgacatcatcatcatcatcatcatcatcactactaccaatcattga

SEQ ID NO: 130532 - DNA, 371 bp, Homo sapiens
cgagcgatgggcatctgtcgggacaactggcacaagcgccgcaaaaccgggggcaagagaaagccctaccacaagaagcggaagtatgagttggggcgcccagctgccaacaccaagattggtccccgccgcatccacacagtccgtgtgcggggaggtaacaagaaataccgtgccctgaggttggacgtggggaatttctcctggggctcaaagtgttgtactcgtaaaacaaggatcatcgatgttgtctacaatgcatctaataacgagtcccactatgcgctgcccctgggccgcaagaagggagccaagctgactccttgggaagaagagattttaaacgctaaacgatctataaaaattcagaa

SEQ ID NO: 130533 - DNA, 346 bp, Homo sapiens
  misc_feature (1)...(346): n = a,t,c or g
agttgattaaacatcaaatcagaatctagccaagctgactcctgaggaagaagagattttaaacaaaaaacgatctaaaaaaattcagaagaaatatgatgaaaggaaaaagaatgccaaaatcagcagtctccaggagactgctgattttggcatcgcttcaaggccgggacagtgtggccgagcagatggctatgtgctagagggcaaagagttggagttctatcttaggaaaatcaaggcccgcaaaggcaaataaatccttgttttgtcttcacccatgtaataaaggtgtttattgttttggttccacataatnnnnnnnnnnncgtggacgggggcgggg

SEQ ID NO: 130534 - DNA, 419 bp, Homo sapiens
ccgagcgatgggcatctctcgggacaactggcacaagcgccgcaaaaccgggggcaagagaaagccctaccacaagaagcggaagtatgagttggggcgcccagctgccaacaccaagattggcccccgccgcatccacacagtccgtttgtggggagagtgttgtactggtaaaacaaggatcgtccatgttgtctacaatacatctaataacgagctagtccgtaccaagaccctggtgaagaattgcatcgtgctcatcaacagcacaccgtaccgacagtggtacgagtcccactatgcgctgcccctgggccgcaagaagggagccaagctgactcctgaggaagaagagattttaaacaaaaaacgatctaaaaaaattcagaagaaatatgatgaaaggaaaaagaatgccc

SEQ ID NO: 130535 - DNA, 2517 bp, Homo sapiens
atgattatctcaatagatgcagaaaaagcctttgacaaaattcaacaacccttcatgctaaaaactctcaataaattaggtattgatgggacgtatttcaaaataataagagctatctatgacaaacccacagccaatatcatactgaatgggcaaaaactggaagcattccctttgaaaactggcacaagacagggatgccctctctcactgctcctattcaacatagtgttggaagttctggccagggcaatcaggcaggagaaggaaataaagggtattcaattaggaaaagaggaagtcaaattgtccctgtttgcagacgacatgattgtttatctagaaaaccccattgtctcagcccaaaatctccttaagctgataagcaacttcagcaaagtctcaggatacaaaatcaatgtacaaaaatcacaagcattcttatacaccaacaacagacaaacagagagccaaatcatgagtgaactcccattcacaattgcttcaaagagaataaaatacctaggaatccaagttacaagggatgtgaagcacctcttcaaggagaactacaaaccactgctcaagaaaataaaagaggatacaaacaaatggaagaacattccatgctcatgggtaggaagaatcaatatcgtgaaaatggccatactgcccaaggtaatttacagattcaatgccatccccatcaagctaccaatgactttcttcacagaattgggaaaaactactttaaagttcatatggaaccaaaaaagagcccgcatcgccaagtcaatcctaagccaaaagaacaaagctggaggcatcacactacctgacttcaaactatactacaaggctacagtaaccaaaatagcatggtactggtaccaaaacagagatatagatcaatggaacagaacagagccctcagaaataacgccgcatacgtacaactatcagatctttgacaaacctgagaaaaacaagcaatggggaaaggattccctatttaataaatggtgctgggaaaactggctagccatatgtagaaagctgaaactggatcccttccttacaccttatacaaaaatcaattcaagatggattaaagatttaaactttagacctaaaaccataaaaaccctagaagaaaacctaggcattaccattcaggacataggcatgggcaaggacttcatatccaaaacaccaaaagcaatggcaacaaaagccaaaattgacaaatgggatctaattaaactaaagagcttctgcacagcaaaagaaactaccatcagagtgaacaggcaacctacaacatgggagaaaattttcacaacctactcatctgacaaagggctaatatccagaatctacaatgaactcaaacaaatttacaagaaaaaaacaaacaaccccatcaaaaagtgggtgaaggacatgaacagacacttctcaaaagaagacatttatgcagccaaaaaacacatgattaaatgctccgcatcactggccatcagagaaatgcaaatcaaaaccactatgagatatcatctcacaccagttagaatggcaatcattaaaaagtcaggaaacaacagtgttcttaagagagaaggtcaaagaatagatatttctactgtttcatttccaatctgtttgtccgttgtccattcactgaagaacaggtactctctctacaacatcactgaagctgctcttgccaacgtccccagagaagggaggggattccgatgtattggcgacaaatcaccctattatatatatctgagcccaagagatcatacggtcgctaaaccgttagagcacaaatatttaccacgagggggaaattgcacgatcagtagtgatctccgaacacgtggtactatatcccggacaagaattatgtacactgtgcactgtatatacagtactacatacagatcaagactaacccagcgccgagcgatgggcatctctcgggacaactggcaccagcgccgcaaaaccgggggcaagagaaagccctaccacaagaagcggaagtatgagttggagcgcccagctgccaacaccaagattggcccccgccgcatccacacagtccgtgtgcagggaagtaacaagaaataccgtgccctgagtggtaagatgtcccactacgtgctgcccctgggccgcaagaagggagccaagctgactcctgaggaagaagagattttaaacaaaaaacgatttaaacaaattcagaagaaatatgatgaaaggaaaaagaatgccaaaatcagcagtctcctggaagagcagttccagcaggagctggaactgccgaagacggattcacctgagttggtgaagtcgaaggtcggctttagttccgccctggttgatcaccggctgaacggtatcggtgataaataccagtttgtcattcacggtaatcgccgcactcaacagaatacgcgcgttcggctgaacatcttatcaggacctgactcgtctggacgttga

SEQ ID NO: 130536 - DNA, 978 bp, Homo sapiens
gcgtgagtcaccgtgcccgacctgctctgatctttctgaactctgcagcctgagagattggggctggtaaagactgcgggttgccaaacataactagaaacgtgggttagggggttgtggaagacgaactgatgccccatggcttgtaaaggctgagagttcccttatttctccttaaggcctcatggggctgaagaacctggaggagtgtgccagggccatttgtcctccagtttacttgatgccaaatttctcctgtgagcaggttgtactcgtaaaacaaggatcatcgatgttgtctacaatgcatctaataacgagctggttcgtaccaagaccctggtgaagaattgcatcgtgctcatcgacagcacaccgtaccgacagtggtacgagtcccactatgcgcttgccctgggccgcaagaagggagccaagctggtgcgtgttacttccctgtaggggttgtggggagggcagcctgactccagccttctcgtgatgaaaactctgtccagttctgctactgaagggagagagatgagagccttttaggctgaggaaggccagcactggggtgtgcagggttcgagaaagctcccagggcctgccttccttccctgagctcatatatttgtatccccttttcagactcctgaggaagaagagattttaaacaaaaaacgatctaaaaaaattcagaagaaatatgatgaaaggaaaaagaatgccaaaatcagcagtctcctggaggagcagttccagcagggcaagcttcttggtgagaaggctgatgagttggaggtggggagtcgcagagattgagtgtgccgaggcacttttcccttgactcagttcctttgactgccagccatgcagtctaaagggttcactgataacaggctgcgagcacaaaggggaacgtttggtcaccctattcgtatgaagctgaaatgggaagcattgggtagaagagtc

SEQ ID NO: 130537 - DNA, 857 bp, Homo sapiens
  misc_feature (1)...(857): n = a,t,c or g
gtcacagtggctcaagcttccttccccgcttccacatgcaggcatctctcggtatcaactgggaccaggcgccgtaaaaaaccggggggccaagagaaagcccctaccacaagaagcgggaagtaatgaagttggggcgccccagctgcccaaacacccaaagattgggccccccgccggcatccaacacagtcccgtgtgccggggaggttaacaagtaaatacccgtgcccctgaggtttggacggtgggaaatttcttcctgggggctcatatgtngttgtactccgtaaaacaaggatccatcgattgttgtcttacaatgccatctaaataacggagcttggtttcgtacccaaggaccctgggtggaagaattttgcatcgtggcttcatccgaccagcaacaaccgtaccgaacagtgggtacgaagtcccaacttatgcgcctgccccctggggcccgcaaagaaaggggagcccaagctggactccttgaggaaagaagagatttttaaacaaaaaaacgatcttaaaaaattgcggaaggaaatatgattgaaaaggaaaaagaattgccaaattccagcagttcttcctgggagggagcagtttccagccaggggcaagctttcttgccgtgcattcggtttcaaggcccgggacagttgtgggccgagcaagatggcttttgtgcctaggaggggcaaaagagtttggagtttctatcctttaggaaaaatccaaggccccgcaaagggcaaattaaattccttgtttttgtctttcacccatgttaattaaagggtggtttattgtttttgttcccacaaaaaaaaaaaaaaagggcggccgct

SEQ ID NO: 130538 - DNA, 681 bp, Homo sapiens
ggagcgatggcggtacgcgcgttgaagctgctgaccacactgctggctgtcgtggccgctgcctcccaagccgaggtcgagtccgaggcaggatggggcatggtgacgcctgatctgctcttcgccgaggggaccgcagcctacgcgcgcggggactggcccggggtggtcctgatcatggaacgggcgctgcgctcccgggcagccctccgcgcccttcgcctgcgctgccgcacccagtgtgccgccgacttcccgtgggagctggaccccgactggtcccccagcccggcccaggcctcgggcgccgccgccctgcgcgacctgagcttcttcgggggccttctgcgtcgcgctgcctgcctgcgccgctgcctcgggccgccggccgcccactcgctcagcgaagagatggagctggagttccgcaagcggagcccctacaactacctgcaggtcgcctacttcaaggtgcagacctgcctggaaccaggcggccggggtccttctggggagaggagtgttgcaggggacctgaggagcttgggggatcggggaagtgtccgcagggaggggaaagtggcctcctggctggggagctctcctcggagccggggagagctgctccctggcaggagaccttcctcgcccagttcgcatgggcagatgctaaccccaaag

SEQ ID NO: 130539 - DNA, 694 bp, Homo sapiens
ttttttttgcaggggaagttcacagagccatttattgagccccacaaccgaccagagggaagggcgtccaccaggctcaggccatggtccttgaggggccggcgctctctacttggcccacatgtgtcctgaggagttgtggccctccgcctccgctcctccctgtgcttctgctcagccagttttatggcttcgattttctgcaaccattgctcacgcctcagcttcattttctccttcttgggcaaaacggtcttggcctctgcacctctcctgacggaagtgacactcctcacgtccagctccagcttctgcaccaaggcgctggggtctatcttggtcctggcaaagatgttggtgttgatgaacgcccagtccttccccgcggccgaggccggcggaggggtcgcctccggggcagggggcgcggggccgggggcggcctcccctttcggcctcacggcagcctggtgcactcgggcgcgcaaccccctcactttccccatcttcccggcggagcacggcaaacgtgcggagcgcctcccggaagctggtcctgcgttctcgccgcccggcggaaacaggagccgcggctgccgggagccccgcggccgccggaagtacccggaagcggctcgggcgggcgcagggtcgcgggtgtagggtggcggcgctccgcctttcaccgacgcac

SEQ ID NO: 130540 - DNA, 407 bp, Homo sapiens
cctcctgtgtacaattctttctcttcacttgctactgaatattgacactcagggagatcccagaagctccatgctgaaaatggtggatcctctttcagcctcaatctctgaaagactatgtagacccttctctcctcttctccatcttccagctgcatctgccgggccagcgtctgcccaatggctaacagggggctggctctgtaggccggactggccagcagctcctgaaaccgggtcctttcttcctcgagaaactgctgtctctgggctgcactcatccggctgagctctgagggccagggcttgttgctctccctgctgcaggcctggcgccggctgccagcctcaagccccagtagctcaggcagggcatccctgagcgggtgcaggtcccccaccaccat

SEQ ID NO: 130541 - DNA, 2392 bp, Homo sapiens
cagggcagactggtagcaaagcccccacgcccagccaggagcaccgccgcggactccagcacaccgagggacatgctgggcctgcgccccccactgctcgccctggtggggctgctctccctcgggtgcgtcctctctcaggagtgcacgaagttcaaggtcagcagctgccgggaatgcatcgagtcggggcccggctgcacctggtgccagaagctgaacttcacagggccgggggatcctgactccattcgctgcgacacccggccacagctgctcatgaggggctgtgcggctgacgacatcatggaccccacaagcctcgctgaaacccaggaagaccacaatgggggccagaagcagctgtccccacaaaaagtgacgctttacctgcgaccaggccaggcagcagcgttcaacgtgaccttccggcgggccaagggctaccccatcgacctgtactatctgatggacctctcctactccatgcttgatgacctcaggaatgtcaagaagctaggtggcgacctgctccgggccctcaacgagatcaccgagtccggccgcattggcttcgggtccttcgtggacaagaccgtgctgccgttcgtgaacacgcaccctgataagctgcgaaacccatgccccaacaaggagaaagagtgccagcccccgtttgccttcaggcacgtgctgaagctgaccaacaactccaaccagtttcagaccgaggtcgggaagcagctgatttccggaaacctggatgcacccgagggtgggctggacgccatgatgcaggtcgccgcctgcccggaggaaatcggctggcgcaacgtcacgcggctgctggtgtttgccactgatgacggcttccatttcgcgggcgacggaaagctgggcgccatcctgacccccaacgacggccgctgtcacctggaggacaacttgtacaagaggagcaacgaattcgactacccatcggtgggccagctggctgcacaagctggctgaaaacaacatccagcccatcttcgcggtgaccagtaggatggtgaagacctacgagaaactcaccgagatcatccccaagtcagccgtgggggagctgtctgaggactccagcaatgtggtccatctcattaagaatgcttacaataagactctcctccagggtcttcctggatcacaacgccctcccccgacaccctgaaagtcacctacgactccttctgcagcaatggagtgacgcacaggaaccaagcccagaggtgactgtgaatggcgtgcagatcaatgtcccgatcaccttccaggtgaaggtcacggccacagagtgcatccaggagcagtcgtttgtcatccgggcgctgggcttcacggacatagtgaccgtgcaggtccttccccagtgtgagtgccggtgccgggaccagagcagagaccgcagcctctgccatggcaagggcttcttggagtgcggcatctgcaggtgtgacactggctacattgggaaaaactgtgagtgccagacacagggccggagcagccaggagctggaaggaagctgccggaaggacaacaactccatcatctgctcagggctgggggactgtgtctgcgggcagtgcctgtgccacaccagcgacgtccccggcaagctgatatacgggcagtactgcgagtgtgacaccatcaactgtgagcgctacaacggccaggtctgcggcggcccggggagggggctctgcttctgcgggaagtgccgctgccacccgggctttgagggctcagcgtgccagtgcgagaggaccactgagggctgcctgaacccgcggcgtgttgagtgtagtggtcgtggccggtgccgctgcaacgtatgcgagtgccattcaggctaccagctgcctctgtgccaggagtgccccggctgcccctcaccctgtggcaagtacatctcctgcgccgagtgcctgaagttcgaaaagggcccctttgggaagaactgcagcgcggcgtgtccgggcctgcagctgtcgaacaaccccgtgaagggcaggacctgcaaggagagggactcagagggctgctgggtggcctacacgctggagcagcaggacgggatggaccgctacctcatctatgtggatgagagccgagagtgtgtggcaggccccaacatcgccgccatcgtcgggggcaccgtggcaggcatcgtgctgatcggcattctcctgctggtcatctggaaggctctgatccacctgagcgacctccgggagtacaggcgctttgagaaggagaagctcaagtcccagtggaacaatgataatccccttttcaagagcgccaccacgacggtcatgaaccccaagtttgctgagagttaggagca

SEQ ID NO: 130542 - DNA, 1207 bp, Homo sapiens
ttttttttttgggaacggccctggcagtgcaggggaagttcacagagccatttattgagccccacaaccgaccaaagggaagggcgttccacccaggctcaaggccatggtccttaaggggccggcgctctctacttggcccacatgtgtcctgaggagttgtggcatgcccgctgccctggtcagagctggccgccatcttccagctgcatctgccgggccagcgtctgcccgatggccaccaagggggctggcttcttaggcccggcttggccagcagctcatgaaaccgggtcctttcttcctcgagaagctgctgtctctgggctgcgctcatccggctgagctctgagggccggggcttgttgctctccctgctgcgggcttggcgccggctgccagcctcgagccccagcagctcgggcagggcatccctgagagggtgcaggtcccccaccaccaccgtggccctccgcctccgctcctccctgtgcttctgctcagccagttttatggcttcgattttctgcaaccattgctcacgcctcagcttcattttctccttcttgggcaaaacggtcttggcctctgcacctctcctgatggaagggacgctccgtgcactcgagcctgcctcacctctcctgacggaagtgacactcctcacgtccagctccagcttctgcaccaaggcgctggggtctatcttggtcctggcaaagatgttggtgttgatgaacgcccagtcctaatgtccccaacaaaaacggacgaaaagaagagcagggagagcaacaagccccggccctcagagctcagccggatgagcgcagcccagagacagcagcttctccagccgcacgccagagagctgccctgtggaacacaaaaggtggcctgggtcccctctcaggcacagaagcctcgggggcagctcccagacgggctctgccgcagctgccaagaggccctgagcctgaaactcaccgagatcatccccaagtcagccgtgggggagctgtctgaggactccagcaatgtggtccatctcattaagaatgcttacaatggtctgatctcccagtgcaaacagaagcacccggcccctgcctttgtccagcaccttcctggcctggccacgatgctcctggacactttgggccccggttttcctttcttatttcctcaccggaaggaaagctcctga

SEQ ID NO: 130543 - DNA, 440 bp, Homo sapiens
  misc_feature (1)...(440): n = a,t,c or g
tcgtgtcntcttccgggcactcacagaaggagatactcagttgaattggaacatcgtttctttccctgttgcagaagaactttcacatcatgagaatctggtttcatttttagaaactgtgaaccagccacaccaccagaatgtgtctgtccccagcaataatgttcacgcgccttattccagtgacaaagaacacatgtgtactgtggtttattttgatgactgcatgtccatacatcagtgtaaaatatcctgtggagtccatggggagccatccaaatatccgctgggtttcattaatggcctgctgcgagtgcattggtccagaatgtattgactatggtagtaaaactgtcaaatgtatgaactgcatgttttaaagaagacaaatgcaaaccaaagcaacttagtaaaataataggtataaaaagttaaaaaaa

SEQ ID NO: 130544 - DNA, 1959 bp, Homo sapiens
aaaatgctgattttttatccctgcgccagactgaactgccaggaaactcttgtgctcaggatccggcatcctttatgcctccacagcagccttgctctttccccagccaatcactttcagatgctgaatcgatttctaaacatatgtctttgtcatatgttgctaatcaagagccaggtattttacaacaaaaaaatgcagttcagattattagttctgctttagatactgataatgaatctacaaaagatacagaaaatacttttgtcctaggagatgttcaaaaaacagatgcctttgtcccagtgtactctgacagcactattcaagaagcatcaccaaactttgagaaagcttatactttacctgtgttaccatcagaaaaggactttaatggaagtgatgcctctacccagctaaatacacattatgcatttagcaaactaacttacaagtcttccagtggccatgaagttgagaatagcacaactgatactcaggtcatttcacatgaaaaagaaaacaaactggagagtttggttttaactcatttgagtaggtgtgattctgatttatgtgaaatgaatgcagggatgccaaaaggaaacctaaatgaacaagatccaaaacattgtcctgaaagtgaaaagtgtttgctttccatagaagatgaggaatctcaacaaagcattttatcaagtctggaaaaccattcacagcagtcaactcaaccagaaatgcataaatatggtcagttagttaaagtagaattagaagaaaatgccgaagatgataaaactgaaaaccaaatccctcaaagaatgactagaaacaaagcaaatacaatggcaaatcaaagcaaacagattcttgctagctgtacactattatcagaaaaagacagtgaatcctcatctcctagaggaagaataagattaactgaagatgacgatcctcaaattcaccatccacggaaaaggaaagtgtcacgtgtacctcagcctgtgcaagtgagtccctctttactacaagcaaaagagaaaactcagcaatctctggcagccattgtagattctctaaaactagatgagattcagccatacagttcagagagagcaaatccatattttgaatacttgcacataaggaaaaaaatagaagaaaaacgcaaattactgtgtagtgtgattcctcaagcacctcagtactatgacgaatatgtaacatttaacggatcatatctcctggatggaaaccccttaagcaagatttgtattcccacaattacaccaccaccttcactgtcagatccacttaaagagctttttcgacaacaggaagttgtaaggatgaaactacgtttgcaacacagtattgaaagggaaaaactcattgtatccaacgaacaagaagttttgcgagttcattacagagctgcaagaacattggcaaatcaaacactgccatttagtgcttgtactgttttgctggatgccgaagtatacaatgtaccattggactctcagtctgatgacagtaaaacttctgtgagggatcgctttaatgcaagacaattcatgtcttggttacaagatgtggatgataaatttgacaaattaaagacctgtcttttaatgaggcaacaacatgaagctgcggctttaaatgctgtccagaggttagaatggcagctcaaactccaggaacttgatcctgccacctataaatctatcagcatttacgaaatccaggagttttatgttccccttgttgatgttaacgacgactttgaattgactcctatatagcagtcagtacttcctgatggtattgtcctaaactggtgatgctcaagcattatactgtggaatactgccttttgacaaaaatactcatgcctttacaattgttagtaaagttcgattatagttggttatgtagtaaacactgtcattttat

SEQ ID NO: 130545 - DNA, 702 bp, Homo sapiens
atgcttggcttaaacacatttccaaaggcccttttgccatataagacaacatattcacaggaaaaactcattgtatccaacgaacaagaagttttgcgagttcattacagagctgcaagaacattggcaaatcaaacactgccatttagtgcttgtactgttttgctggatgccgaagtatacaatgtaccattggactctcaggagctctgccagtgccggccgggagaaggcaattgctcctgctgtaaggagtgcatgctgtgtcttggggccctttgggacgagtgctgtgactgtgttgaatttaggtactccaaaacggactgggagtacttaatccatggacagggcatggaatgtagtttgcctcacgaaaagttgtggaagaagagacagggacctgaaggtataactaccccacagaataggcttgcctctgccactctggcacctccagctcctgagtctcctcagggttctgtggggtgcatggcctgtgtgaagactgctcagtcagaacacatgtgtactgtggtttattttgatgactgcatgtccatacatcagtgtaaaatatcctgtgagtccatgggagcatccaaatatcgctggtttcataatgcctgctgcgagtgcattggtccagaatgtattgactatggtagtaaaactgtcaaatgtatgaactgcatgttttaa

SEQ ID NO: 130546 - DNA, 5954 bp, Homo sapiens
gaaacatgtcattaagtttcttaaatgacgaagaggccaggaagatccttcaggtgctggaaaggaatgaggagttacagagggccgagaaggacaggatcagcaaacttcagaagacaaagagggatatcagatggcttcagggagtgactggtgaatggtttgaagaaattcaaagaaaaaagttttgcaatgaaacagatgttagccaaatgttaaaacaaccacttacatacaggctaagtaaggagatggcaaaaaatgatccgatagaattacctacatcaagatctaaaaatgtaactaatcaaaaaaagccgacacctttttcttcccggatgagcttcagatcgtcatttgcttccctgttctcattcaggaaatctggaaaggagacttcaaagcttccatcactgggacagaaaggatgtgatggccatgcaggacctcctatgcctgtgaggggagctgctgtgcaggcaaaaatatacaattcacctctggaaaatcatctagttgacagtacatttgtcccaaagccagcagtcatgagggaggagagtggcatgcctccaccgtgggatgcttcactgctggagaatgagtttttccaagttttagatgacttggatagcaaattggctcaggaacagtctgcaagctcagtgaataccagaacacccctcaactatggatcaagaacacagttcggtcacttttattccagtggtaacagacatggtaatatcacagaaaggcacaaaaaacactataatgaaacttccaatatgtctatctatgacatcctaagaccaggaactcctagggaaggttttaaaaccttttctcctaggacaagcacaatttatgatatgtataggacaagggagcccagagtctttaaagaagattatgtgcaaaagaatacttttggcagtacttcgctgtgttttgacagcaggcaacggtcggccttaccagccacagggcatttcacagcaagaagcttacattttccagccacaactcagagcaagagtgggtttataccaccaaggcaccagcagagtccaaagagaactcctttatcatccatcatatggaacagatcagattcctctagagacagggagaaccaggaagagttcctgagggcaccatcaccaatggaaattgatcccgctgacaagtatgtgtatcccaggggttttcaggagaataagagatatgaatcgtaccattcacagaatgtttaccaacgtgttagtttaaatgctcccatggagaatgcaatgagtcccgacacttttgagaactcagagaacatgccattctaccatcaaagcaacacatttaccagatctttcttcagcaatacctttggacgaagcggagaacagaggagatttggacaaggtcctttttggggccaagagaaaggacattctttctggtctgactttcatcgaagcaggaaatcattcagttcttctgacagagactttgaaatgatttccatggaagcaaatagtgtatcagccattcatggccataatgtttcttctgaacactgggaatcattttcttctggttatggaacagatgtttccagaggccaagaagagccacatccttggcagtttgattttcagagatccacactggatagcatggtggtatcacatggtaatgagacccagttgactcctcattttggcacaccaaatgtttgctccatgactggttcaagctatcacgtcaaatctagtgagttggtaagtcaacaggacagttctcctgtagaagtacatataaacaaagaagcttcctcatttggaattgctcagactctagcatcctcattcaaaacttccttttcccagatttctgatgacagaaggaatcctcagagtcccaacttgcagaatcccacagtcactttgcagaaaatttttccaaataagcctgcctctcatccaatgagaagccatacagaagtcactgtgaccaacagcaattcagttgactctctgcctcttgccaaaagccagcccaatatcttggtcacagaagtaaataatgagaaagacttaaatgaatctatttcagaagaagacaaacagctaagcaagatggaccagacaaacaaggcaggtgaaataccccaacctgtttcacagacagggatctcaaactctttacctgattttcaaaatcccttatcccaggactcagccaagagcaacgggtttggttttaatgcatctaccataataagttcaaaaaagtcacccagagtcttttccaggaaagatacctccaaaatgtatataccgcacacagataaatccaatgacattaaacaagataagaggtttactgaaaacagaaaacttggctcaacagcttcccttcctttcattcaggaacacagaacaccaccatctttccccaggacagaccaaggttgtcaccaggaattaactgtaaataatgaagatatttcaagaattattacaaataaccactggagctctgcactgactgatactcaaaatgcacaatactcaaaatgcaagttaactcctggccacaagacctcgtgtgattctttagatctgtcatcagctgcactaccagattcctcaccatcaaagaattcttcccttgatgctcctgtggttccatctactacagtgttctccaggagaagtccttcagacaaagatccatcgctaggagaaagagaagaaaaagacaatgctgggaagaaccaaaagaatcagtttattgtaagccactcagaaaaccaagagagaaatgatagtcctgtgcctacacatgatgaagtggttgatgtcaaatgccattcacactctccttttaggaatgaaagaggaaaaggaaaaataaggcatcatatatcctgtattgaaaagttaagcaaaacagaaagtatatcagtacccaccagtgatcacaggagcctcattgaagcaaatcaaagcaattccaaagtttctgaacttgacacaatttattgtaccttgccaagaaaatcaagcagttttctcatacatggcaggcagtcaggaagtaaaataatggctgcttcattgaggaatgggccacctcccttccaaatcaaaaataatgtggaagatgcaatggggaactatatgttaaacaaatttagtcccagttctcctgagtcagcgaatgaatgttccaaagtcctttcagactcagccctggaagcacctgaagccacagagagaatgacaaatgtaaaaagcagtggatctacttccgttagaaaaggaccacttccattcctcatcaacagggctatgtcatgtccctcaggggagccacatgcctcaactggaagagaaggaagaaaaaagccattgacctcaggcatggatgcttctgagctaacaccaagggcttgggagagaatcattagccctgtggaaagtgactcatctgttagagattgttctttaaccaaaagacaacaccaaaaggaaaacttccaagaatacactgagaaagagggtaaaatggctgcctccaggagaagtgtatttgctctttcaaatgaagaccctttacctttttgctcagacttgtcaggaaaagaacgtgggaaaacattacataaagttaagacgactagtacgttttctgtttctggtgatgaagataatgtaaaatgtctggaggtggtctcaatatattacactctaccgaggaaacccagcaaaaaattctgtaacctccttcaacagtatacacaaaatactaatttacttatagaatcacctcaagtggagactgaaacatttcctaacgctttagaaaaagacaaacagaattattctacacgagagcagtcaggaacaccttcatgtgaaaatctaaagatgtccgtcaactctgatcagacgctcaccactgaaaatatgactgccttccgattatcaaatagggggcccctagctcctacattacaggaaatggcttctgttgaggcagctgtttctcttcctgaagaggaatctaaagctagagagattttttcagataatttagctaaaacacctctaggtgattcagaaaacaagaaggaaagaggcaaaaagttgcaaagtgaaaccctgcatacttcattgatgcttcagagaaaaaatgtatccgaagaaaaatctgaaaattgtcaacaatccattaattcaagtaacagtggtccctctagtcttccagctctttcagaagttaatattggaaattcccaaactagaagaagttcttgggagtgtacagggagtggtagagccattccatttactggaagtggcaagtgtccccagaaagatcacacatccacagctgtaggtgatggctccagtggatcacagcctagggaaggcagaggggacattggaaccaactgccaaaaaatgactaataaaacactttctcactcagagagtcaagtctttgcccttactccagcattgcataaactacagcttggtgaggagactcagtcagatgaaccaaacttagagagtctgcagtctgaaccaagagaattacctcaaagaagtcaggaggcaaatatgacagagagcaggaaggctgaagatgaaatgcagaagtcagcttgggatcaaccttcacttcctgaaggaaacaaaaataaaaccaacttggatgacctagtaaagggggaaaatagatcttcagttaaacacagattggcagccatgtctaaagccagcagaaaattcccagctaaagatgtaagccccagaagacatgtagctactatcttcccccaaagtggaagcagatctggctttgaccatttatctcttggcacagtggagtgcaacccactgttccctgagcctactccaaaatctgcagagtccattggcgaaagcaggttgagtgagaacagaaagcatgtgaagaaatccgagaaccttctccccattactgtactacccaacagagaaccttctacacacgtcagcaaccagaagtctaacagcatttcacaacgacatcagaatgagtttaaaaacgtctcagaatcaccatcaaagcatgagaattctaaagacgtcacagcagctcagaatttagtaagagaatcaggagccccatcacccatcacattcaccagcctcagggaagcagaattctctgacaatcagaggaggctgagccctccttttccactggagcctgcacagaaatctagagtaagcagtccactggccagttttctgcagcaacaaaggagtgcttcatctctggagtgggaacctgagccacacctctatcgttcaaagagtttaaaaagcattaatgttcatggcgatctactacgaaaaagccatcctccaaaagtcagggagcgccatttttctgaaagcacttctattgacaatgccctgagtcgactgacccttgggaatgaattctctgtcaacaatgggtacagtcgaagattcagatctttttctgaactcccctcctgtgatggaaatgaaagttgggcttatcgcagcgggacaaaaacaggtcccaggtctgcaatatctatatacagacctatcgactatgggatctttgggaaagaacaacagttagctttcttagaaaatgtaaagaggtcacttacacaaggaagattatggaaaccaagttttcttaagaaccctggcttcctaaaagatgatttgaggaaccctcccaacccctcagagtcattaagctcaaattctcccagtagtcaggtgccagaagatggcttatctccaagtgaaccgcttaatatctatgaggatgacccagtggactcagattgtgacacagacacaaccacagatgatgaatactacctggatgaaaatgacaaagagtcagaactgtga

SEQ ID NO: 130547 - DNA, 588 bp, Homo sapiens
  misc_feature (1)...(588): n = a,t,c or g
atgcggcgggggcgcgannnggagaggatctggctgctgctcactccgcggcccgcgcgcacccacgtgctcgcacgggtccgacagagcttccaccctcgcctaacgcagttttccctcggcaccagaggcgaatctccccacccaatgcgggcagtcagcgaagcacgggagagccggcacctcacgggaggcgaaaggtccccaccccaaggcaaacttcagaagacaaagagggatatcagatggcttcagggagtgactggtgaatggtttgaagaaattcaaagaaaaaagttttgcaatgaaacagatgttagccaaatgttaaaacaaccacttacatacaggctaagtaaggagatggcaaaaaatgaccccgtggctctcaaacggcagaggatggtcagtctgaatacttcccctaggaaaaccgagagtacagaagcatcctggagcagggctctgtcctctcagagggcaaagctggatggggagcaggtgtttacagaacatccacggagtttgggccaagcccagagtgaggagctgggcactggggtggcagaagaccaggccttgccttga

SEQ ID NO: 130548 - DNA, 840 bp, Homo sapiens
atggccctgagtggctgtactccacccttcttagatgctctgcccttctccctgctggagcatgtgagctggagcatccactcaagctcgaaaaagaaccacatggttaaaaagaaactttttaaagtaggatacacagagctcaaggacccacttgaggaggcagtctgtcccttttcaaagcttgaacgctgtgctgggagatctgctgctctctttagagctgccaggcagggacgtttaagtctgctgaagctgtgcccacagccatcctttcccccagactgctgtgctagcagcgagaatttcaagccagtggatcttagcttgctgggctccatgggcatgcgacctgccaagccagactacttggatccctggcttcagccccctttccagggaagtgaatggttccatctcactggtgttccagctgctcagcttcttaagctggcccacgagtacagaccagtgacaaagcaagagaagaagcaggaattgttggcccatgctgacaggaatgctgccagcaatggagacatccccactaagagttcacctgtccttcaagcaggggttaatactgtcaccaactcaatggtgaacaagaagtctcagctggtgctgactgcacaagatatggatcccatcaagctggttgtcttcctgccagccctgtgttgtaaaatgggggtcccttactgtgttatcaaagagaaggcaaggccgggaagtttagtccacaggaggacctgcatcattgtcaccttcacacaggttaaatggaaaaaacaaggagctttagctaaactttgggagcttcaggatcaattacaatga

SEQ ID NO: 130549 - DNA, 1425 bp, Homo sapiens
atgtttgccttctgccttaagcaaaagctccctgaggcctccccagaagcagatgctgtcatgcttcctgtaaagtctgagaacgactaccgtagaccacgcgtggcatcgtgttcacttagaaggacacaggacaggaaatacagcttgacagcagatcagcatccggcaaccctcttcagtggaagtaatcccagtagcagtccacctgagctaagtgtagcagcagcaccagggcagggactgactccagcccttggactcaggacatcgcagaccttcccttgcgtgcgtgactcattcgcacatccatttctgtttatgcctggggtggggagaaaaatcccaaaccagctccaattaacagatgcagatgcagatgcagaaattgtgactcagagagaggaagtaacctgtccaaaatcacatgacggtcaggaccctctgctgcaggtctgctggagtttgctggaggtccactctagaccctatttgtctgggtattaccagtggaggctgcagaacaacaaagattgctgcctgttccttcctctggaagctttgtcccagagagacacccgccagatgccagcaagagctctcccgtatgaggtgtctgtcagcccctactgggagtttgaacttcctggaggctttgtttacactgtgagggtaaaaccacctactcaagcctcagcaatggtgggcgcccctcccccaaccaagctcaagcatctctgggcgacctcagactgctgtgctagcagcgagaatttcaagccagtggatcttagcttgctgggctccatgggcatgcgacctgccaagccagactacttggatccctggcttcagccccctttccaggaagtgaatggttccatctcactggtgttccagccacccaagatgctaaaacaaaataagaccaaggggaagaagatggctggggcccctgctgtcatgaagaagcaagaagccaagaaagtgtttacccaggccttggacctcctaacagctgctcagcttcttaagctggcccacgagtacagaccagtgacaaagcaagagaagaagcaggaattgttggcccatgctgacaggaatgctgccagcaatggagacatccccactaagagttcacctgtccttcaagcaggggttaatactgtcaccaactcaatggtgaacaagaagtctcagctggtgctgactgcacaagatatggatcccatcaagctggttgtcttcctgccagccctgtgttgtaaaatgggggtcccttactgtgttatcaaagagaaggcaaggccgggaagtttagtccacaggaggacctgcatcattgtcaccttcacacaggttaaatggaaaaaacaaggagctttagctaaactttgggagcttcaggatcaattacaatga

SEQ ID NO: 130550 - DNA, 390 bp, Homo sapiens
ctagtagcatgaaatcttatgtgcttcccacagaattcctggtggaaggaggaattcttcctcctctttctcgtctttctgggcaggtattgtgaggacggtatctgccctgtcagtatctacccaaacaatccagagcaaggacaagtagggcctggttttagctgcaaatgcaacaagtctctccgctgagccgcagctgctaccctctgccttctgctcctccgccagggcacggcccccccaggagagagaaggctctggagacctctgtaacagtcgtgcggagaagacaaagtcagctgcgtgcgtctcctccggcgccggctctgcaaggagggaggagggggcggggccccacaaccaccgcagcctcttaggtttctccat

SEQ ID NO: 130551 - DNA, 2143 bp, Homo sapiens
tcagttcttatattcaccatgcagctttttcttcccatgaggaacgtggctcagtgaaaatggtgacttgatatttaaccgatccctttcagcctcctcttcctcatcgtatctctcatcctccacttcatcttccacatcactgctctgaggactggaggcctgagaccctgaaggagaaggtggtactgaggaaggcctgggatatttaaatccttctgtcgttggtggtgatgttagttccacatggaatttatctggaaaagctctgcttaatgtcaggtgtctggcatgctggtaatatctgcctaagtatctccaatccagaagatctgagagcctctcagttctgttcctctggataaacctttggcggcgtgacatgttgcaaaatccatagagaaacttagtcagctgattgcaagaatcatctggagaacggaaccgcctgtcaacgatgtaaataccgtaagcagtaggatcagccacgtgctcctgcatgaaacagccaaacccggagagattcgtggtcacactggggatacccatcacagtgcattcagctggagtataaccccagggttcatagtatgatggaaatactccaagatgacaacctctaacaaactcttcatagtccatgggtagtaagggactggtggaggatagaaactctgggtgcaaaatcaccttgactctatctgtgcggttgttgaaaagtccaatccgtctaatggtgctgaggatggggtcggtggagtcatcaatcatgttgtgcgtggtcactggggctaatgactgtcgctgagttgaaaagatggctcttttcataattgttagatcatctcgatctaaaatatcgttcaggtcaggaatttctcctcttaataatgcatcatagagtttttttccaaacttttccttcacagaatgtgcaacatcccacagctgttttcgcactgcttgtcctttcagggtttccacgttgaaattatttgtcttggcaggcataatgaaaaacaccaccactgtgatgtcacttttatgcatcctcagcaggaaatttagcctggataaggaatctaggaagatgtcagctccttttgttttgaaaaactcatacctcccagcaatgaaaaggaacaaagtcttttcaagatcaaagtcgagatgaccatagaaatgacctcgaacaaaatcttggattctggccttgtacatggcatgtagattttgaaactcatgcactgctgaaaatttcttaacattcaagccgtttggagtaactacatcaggctttctcttcagcatatgttcagcttctattgctgttatttcagaaaccgtggtgaacacgtgagcgcaatgaacggaagctcgctccatgcagtaccggtggtaaatctgcctttccccagcctctttgtcaatgttaaacttatcaagatggttgtagaaatcaatatttgctgcacagagatacctcccaagtagtgtagcgtgggttgtaaatattgtggcaataggaagtttcctggctcgagaaaggatcagtccaattccagcctgccattcatggaattgggcaacgacatatttaccatctgcatgatctgtcacctcttttaagaaccaggcagttaaagatccaaatatcagcatatcattggcttctcggtcatgataaggaatgccgacactgcatgcttcccagaggtcacccttccacctgtccagattccaagctgaatagcctatgtcaaaaagtaccacataaggacttccttctatcagccatcttccaaaatgcacctggcagccatgcttattcattgcgtccactgctcttctgacagcatcatttacaggttcacactgttccacctgagtcttcatattatgctcaaaatatggacctatcagaaaatagttctctccccattcatctgctgttgttttggcctttgtctgaatcacagtatagatgcctccaactttattggtcacttcccaagcaacttcaaagagcagtaactcctccacaggaagttcttcgacttcccactggggaagcccacccagggatgttacagagagggatcggcctcgaagcattcttcttacagtcctccgagactccttt

SEQ ID NO: 130552 - DNA, 891 bp, Homo sapiens
atgaagactcaggtggaacagtgtgaacctgtaaatgatgctgtcagaagagcagtggacgcaatgaataagcatggctgccaggtaaaggaactgacacttcacttggcaattctcagtaaacttatgggaaaaaagactgtaactaacatgaactcacaagagaagaccattcacttacttaaggaaaactttcaggtttgtgagaaagatgatgaacttgcttttaaatggattgaatttgagacaccttgtgaaaaccgaggaggaaggataattggtttggagttcagcagaagatacagaaattcctggtggaaggaggaattcttcctcctctttctcgtctttctgggcaggtattgtgaggacggtatctgccctgtcagtatctacccaaacaatccagagctgtcaacagaaaaatcctctgattcaggacataggtatttgtgcagagaaaggcagtcatttgtgcaaaaagatttgaagaggaatcagggaaatttctcttcctcccatatccctgaacattctcctttaatgtttgtgctaaaagcacaaattgatgagatgagagctgttgagagcgtagtccccagaaggaggcttgctgcctcgccgttggatcttggactaacgtctctggctgatgaacttgctcttgtggatgttttggaagataagcttaaaggagaaatgatggatctgcagcatgggagcttatttcttcagacacctaaaattgtggcagataaagtgtctgccagagcctgcatcggctcagagatcagggattccaagccagatgcatggagtcaacctgatggccagccagctcaagctgctcatctgcctcctgcaggagaccatcagttggctgccatctag

SEQ ID NO: 130553 - DNA, 531 bp, Homo sapiens
cggacgcgtgggcggacgcgtgggcggacgcctgggcggacgcgtgggccttgcagagccggcgccggaggagacgcacgcagctgactttgtcttctccgcacgactgttacagaggtctccagagccttcttctcatcctgtgcaaaatggcaactcttaaggaaaaactcattgcaccagttgcggaagagcgaggcgaacagttccaaacaatatggatcactgtactgggtgatggacaagttgggatggcgtgtgctatcagcattctaggaaagtctctgtgctgatgaacttgctcttgtggatgttttggaagataagcttaaaggagggaatgatggttccttccagcatggggagcttatttctttcagacacctaaaaattgtgggcaggataaaggattattctggggaccgcccaattctaaaggattgtagtgggtaactggcagggagtccggtcagccagaagggggaaagtccgctccaatctggtgcagagaaatgttaatgtcttcaaatt

SEQ ID NO: 130554 - DNA, 435 bp, Homo sapiens
attcttactcctttatcttgttgcaatgcctgatccagctaagtccgctcccgccccgaagaagggctccaagaaggcggtgaccaaggcgcagaagaaggatggcaagaagcgtaaacgcagccgcaaggagagctactccgtatacgtttacaaggtgctgaagcaagtccaccccgacaccggcatctcctccaaagccatggggatcatgaattcctttgtcaacgatatcttcgagcgcatcgccggcgaggcttcccgcctggctcattacaacaagcgttcgaccatcacctccagggagatccagacagccgtgcgcctgctgctgcctggggaactggccaagcacgccgtgtccgagggcactaaggccgtcaccaagtacaccagctccaaataaatggacgcatgttcaaacccaaaggctct

SEQ ID NO: 130555 - DNA, 399 bp, Homo sapiens
gttttctgacagggggcctgagccagctaagtcagctcctgctccgaagaagggttccaagaaggctgtgaccaaggcgcagaagaaggatggcaagaagcgcaagcgcagtcgtaaggagagctactccgtgtatgtgtacaaggtgctaaaacaggttcaccccgatactggcatctcatccaaggccatgggcatcatgaattccttcgttaacgacatcttcgaacgcatcgcaggcgaggcttcccgtctggcccactacaacaagcgctcgaccattacctccagggagatccagaccgccgtgcgtctgctgcttcccggagagctggccaagcacgcagtgtccgaaggtaccaaggctgtcaccaagtatccaagctcccagtaaatgtg

SEQ ID NO: 130556 - DNA, 612 bp, Homo sapiens
ggcgggattgaatgctttaagatgcctgagccagccaagtctgctcccgccccgaagaagggctccaagaaggcagtgaccaaagcgcagaataaagatggcaagaagcgcaagcgcagccgcaaggagagttactctgtgtacgtgtacaaggtgctgaaacaggtccatcccgacactggcatctcttccaaggccatgggcatcatgaattctttcgttaacgacatatttgagcgcatcgcgggcgaggcttcccgcctggcgcattacaacaagcgctcgaccatcacctccagggagatccagacggccgtgcgcctgctgcttcccggagagctggccaagcacgccgtgtcggagggcaccaaggccgtcaccaagtacaccagctccaagtaactttgccaaatttccaagttgatcgtgatgttgatccgggactcggtgtggtgacggcccgccctgagcacgaaagtgcacgctcttgacaacttccttatgtttggagctttctccaccaccacccccgcccattttcttgtaaaatttttaccatgcagatatgtaataactgcaagtaaaggctgaagacaatgtgagctgaacacg

SEQ ID NO: 130557 - DNA, 895 bp, Homo sapiens
cgcgcccctcgagatcgtcgacattagtccgtgcggtggaattctcgatctgctgctcgtctcaggctcgtagttcgccttcaacatgccggaaccagcgaagtccgctcccgcgcccaagaagggctcgaagaaagccgtgactaaggcgcagaagaaggacggcaagaagcgcaagcgcagccgcaaggagagctactccgtatacgtgtacaaggtgctgaagcaggtccaccccgacaccggcatctcctctaaggccatgggaatcatgaactccttcgtcaacgacatcttcgaacgcatcgcgggtgaggcttcccgcctggcgcattacaacaagcgctcgaccatcacctccagggagatccagacggccgtgcgcctgctgctgcccgggggagttgggccaagcacgccgtgtccgagggcaccaaaggccgtcaccaagtaccaccagcgctaagttaaactttgccaaggagggacttttctctgggaatttccctgataatggaccaagaaaagcttcttatcaaaaagaagcaacaattgccttcggttacctcattatctactgcagaaaaagaagaacgagaatgcaaccttaccttagaatggccttttccacaagctaaagctggcctcttgatctcattcagattccaaagagaatcatttacaagttaatttctgtctccttggtccattccttctctctaataatcatttactgttcctcaaagaattgtctacattacccatctcctcttttgcctctgagaaagagtatataagcttctgtgacccactggggggttggggtaatattctgtggtcctcagccctgtaccttaataaatttgtatgccttttctcttaaaaaaaaaaaaaa

SEQ ID NO: 130558 - DNA, 852 bp, Homo sapiens
cggacgcgtgggtaagcggtaggttgacagaactaccgtcttcctgtttttttcctccaattttccggcagttactcccagtcatgcccgagccctcaaagtccgctcctgccccgaagaaaggctccaagaaggcagtgacaaaggcccaaaagaaggacggcaagaagcgcaagcgcagccgcaaggagagctactccgtgtacgtgtacaaggtgctgaagcaggtccacccctgacaccggtatctcgtccaaggccatgtgcatcatgaactccttcgtcaatgacatcttcgaggcgcatcgcaggcgaggcttcccgcctggcgcattacaacaagcgctcgaccatcacctccagggagatccagacggccgtgcgcctgctgcttccgggggagctggccaagcacgccgtgtcggagggcaccaaggccgtcaccaagtacaccagttccaagtaactttgccaagggagagacatgaagacagaggagaaatgaatgcataaaataaccgattaatatgattctatacatagaacttaggaagtctcatctgcctgaaaatgactgtgtggatcccacccaaatccaactcatcctggtttgctgcacactggttcatcaaaagaaggttaccgaggggaaggaactaaaggtgtttgcacttcatgttactttttgagtttataaacataaaaacagaatttacttctgttacagacctagttactgggaattcattacttgccatggactacctttgctaagaaaagtctgaatgagaagatgccaggacgtctgaaaaaaaaagttataataaataaaatctgcggagaattgtaaaa

SEQ ID NO: 130559 - DNA, 831 bp, Homo sapiens
gctgtttgcgcctgcgcagtgggtgctgattatgtcgaccgcggcgccgcggacgctgctggagtcgcctggcaacgatgtcgcctggcaactgaataggttggccagtggcgcgggctactggaagcagaaagggctgcggaggcagtgagtggtttctgcagagcttcatttggaaaggcctctgtagttggggaaagatggcccattcccagaactccttggagcttcccattaacatcaatgccacccagattaccactgcctatggccatcgggccctgcccaagctgaaggaggagctgcagtcagaggacctccagacgaggcagaaagccctcatggccttgtgtgacctcatgcatgaccccgagtgtatctacaaggccatgaacataggctgtatggagaacctgaaagctttgctgaaggatagcaacagtatggtgcgcataaagaccaccgaggtgctccacatcacggcaagccatagcgtgggcagtagtgacaggaagggggaatgaggatagcagccctgggcttggcatcttgtcaccttgaggagttaatttgcatgacatcccacggacaagagagcttcctggcagcctgttccctgccctcttgcttgcctctggtgaggaggcacacaggcaaacacaactgactatcaaagcatgagagacatggagtgggtgactagacacggaccaaggaagcccccgtggtcagggaagacccctgcaacttgtgtgtccaacggtgactttctttttccagacgattcaaaacacaccataagtgaaaataaataaataaataaaataaaaa

SEQ ID NO: 130560 - DNA, 807 bp, Homo sapiens
atggagggttttatgcaggtggtggctgggtctggcttgcttttgagaacagctacgctggccagcagtgtgttgggtccactgcagaggctaacctttgtcattaccaggcgcaaccctgtaaatgattgttcccgctttgcagccggccgcagccttgggctgtttgcgcctgcgcagtgggtgctgattatgtcgaccgcggcgccgcggacgctgctggagtcgcctggcaacgatgtcgcctggcaactgaataggttggccagtggcgcgggctactggaagcagaaagggctgcggaggcagattaccactgcctatggccatcgggccctgcccaagctgaaggaggagctgcagtcagaggacctccagacgaggcagaaagccctcatggccttgtgtgacctcatgcatgaccccgagtgtatctacaaggccatgaacataggctgtatggagaacctgaaagctttgctgaaggatagcaacagtatggtgcgcataaagaccaccgaggtgctccacatcacggcaagccatagcgtgggcagatacgcctttctagagcacgacatcgtccttgccctgtccttcctgctgaatgaccccagcccagtctgccgggggaacctgtacaaggcatacatgcagctggtccaggtgcctagagaatggaatcaagcatcttggcctcccatgagtgtgccccccagtgagcagtcactgaggagagctgggattatcgtgaccactgttgttgacccattgcaccaccagggtgaccacgtgggctataggtga

SEQ ID NO: 130561 - DNA, 615 bp, Homo sapiens; identical to SEQ ID NO: 118681

SEQ ID NO: 130562 - DNA, 323 bp, Homo sapiens
ctactttaactggaggaccacgtgatgttttgggtcccctggaatcaacgtcagctcagagccagtgtccagttgtccctgaaatgtctgattatttccctttccccagtgcacagttaccctggtaaaaggccagaggtctccttgccttgatgcttgagtgccaccacttggcccatgccacctcaggatccaattattaccattgtatttaaattttgtagttgaatgactgtggttcccactataatatctttcgttgcaggtcagccactcacatgataagagcttgtgtctgattttccgcaatttcagctctttct

SEQ ID NO: 130563 - DNA, 1320 bp, Homo sapiens
atgaaaaatgatggttggtggaaggaaaagcagatttattcagatagccagctaactgagaagatggtggaccatcattctaaaaaacttaaacatgctagcttgagcctaaagggagttggggagaggaagcaggagagcagtattagaaagagcacagtaccagacacagttatgcctgtcgttgaaccaggagtcaagactcaagttccagcaggctctagatgtaaggttcagagtgtgaccaatgaggaggtgcgctacactccaaaagaacagagttttctaacttataaagcagaaatctggagaacagtgccagaatgcataattggcatagacatacttagcagctggcagaatccctacattggctccctgactggtagggtgaggcctatcatggtggaaaaggccaaatggaaggcattagagctgcctctacctagaaaaataaacgagcgcacgcgcagaacgagagagcggccacccagggatcggcgctatctgcacagcggttacagtctcggaaaggcctggcttcttcgtggctttgtggagatcccttacagcggccatttgattagcacccgaagagattcaaaggaagcagttgttccgtccccaacatatttccgtttcaaaccacccacttccggtttttcagccggttccggtcccgcccttcacttccggtcgctttcggtctctcagcggccggtttctgcgtccgctgccgcaggttccaccgcgctccagaagtcaagaattgaggtttgggaacctgtgcgtagatttcagaagatatatggaaactcttggacgccctggcaaaagtttgctgcaggggtggggccctcatggggaacttctgctaggacagtgtggaagggaattgtggggtcagagcccccatacagagtccctactggggcactgcctagtggagctgagagaagagggccaccaccctccaggccccagaatggcagatctgacaacagcttgtactgtgtgcctggaaaatccacagacactcaatgccagcccgtgaaagcagctgggagggagggtttaccttgcaaagccacaggggtggagctatccaagaccataggaacccacctcttgcatcagtgtgacctggatgtgagatctggagtcaaaggagatcatttcggagctttaacatttgactgccccgctggatttcggacttgcatgggccctgtaacccctttgttttggccaatttctcccatttggaatggctatatttactcaatacctgtacccccattatacctaggaagtaaatag

SEQ ID NO: 130564 - DNA, 1560 bp, Homo sapiens
caagtgccaggatgcataattggcatagacatacttagcagctggcagaacccccacattggctccttgactggtagggtgagggctattatggtgggaaaggccaaatggaagccattagagctgcctctacctagaaaaatagtaaatcaaaaacaatatcacatccttggagggactgtggaaattagtgccaccattaaggacttgaaagacacagaggcggtgactcccaccacatccccattcaactctcccatttggcctgtgcagaagacagatggatcttggagaatgacagtggattattgtaaacttaaccaagtggtgactccaattgcagctgctgtaccagatgtggttcattgcttgagcaaatcaacacatctcctggtacctggtttgagtggagtccaaaagaaggctctgcagcaggttcaggctgctgtgcaagctgctctgccatttgggccatatgacccagcagatccaatggtgcttgaggtgtcagtggcagatagggatgctatttggagcctttggaacgccgccattggtgaatcacagcggaggcctctaggattttggagcaaggctctcctgtcttctgcagataactactctccttttgagaggcagctcttggcctcttactgggctttggtggaaactgaacgtttgacggtgggtcatcaagtcaccctgcgacctgaactgcctatcatgaattgggtgctttctgacccatctagccataaagttagtggtgcacagcagcattggaagtgtgctgtgcacacttcatcaaatggaagtggtatatacgtgattgggctcaagcaggtcttgaagggacaagttgattatattggacctcttccatcatggaaagggcagaggtttgtcctccttggaatagacacttactctggatatgggtttgcctatcctgtgtgcaatgcttctgccaagactaccatccatggactcacggaatgccttatccactgttatggtattccacacagcattgcctctgacgaaggcactcactttatggctaaagaagtgcagcagtgggcatacgctcatggaattccgcggatcctctccctatattggcccagggcttcccggtatcaacagggacaccaggatttatttattctgcgaagtgatcttccgtcacaggtatttattcgcgataagctcatggagcggcgtaaccgtcgcacaggaaggacagagaaagcgcggatctgggaagtgacggacagaacggtcaggacctggattggggaggcggttgccgccgctgctgctgacggtgtgacgttctctgttccggtcacaccacatacgttccgccattcctatgcgatgcacatgctgtatgccggtataccgctgaaagttctgcaaagcctgatgggacataagtccatcagttcaacggaagtctacacgaaggtttttgcgctggatgtggctgcccggcaccgggtgcagtttgcgatgccggagtctgatgcggttgcgatgctgaaacaattatcctga

SEQ ID NO: 130565 - DNA, 562 bp, Homo sapiens
aataataaggagggcggtcttccgttggttttggggttaaaggagttggggccttaatatgattagaccccaaaatactaaggactctaattctaattgtttggagaagactgatagcccttggtgtgaactgtttaaagagttatacaaaataaatgcctttgacactcctgattcattgctcatgagaggcaacgagtttagtgaccctatacatcatacctttgaccatatgtggagaactaaggaacataatgaagctggttggttgctcctaagttcagtggataaagtgatgaaagaaaatgatgaactcggggattctatctcccagcttcagaagcagatactgagcctcaaatctgccaagattgccctgagtgagagtctaatctcctgtagagaaagaactgaaattgtggaaaaatagacataagctcttatcatgttagtggctgacctgcaatgaaaggtgcatgcacagcctcaccatgcacagcctcgccaagtatctactgttaaagtgagggccttggattggttttgccgggaagtcagggac

SEQ ID NO: 130566 - DNA, 1026 bp, Homo sapiens
atggaccatatgtggagaaccaatgaacataatgaagctgatcagttgctcctaaggtcagtggacaaagtgatgaaagaaaatgataaactcagggattctgtctcccagcttcagaagcagatactgagcctcaaatctgctaagattgccatgagtgagagtcttatctcccacagagaaagagctgaaattgtggaaaaactgacacaagctcttatcatgggaactgtgtactggggaaagggaaatgatcagacatttcagggactactggacactggctctgagctgacgttgattccaggggacccaaaacatcattgtggtcctccaggaccaaaagtaagggcttatggagatcaggtaattaacggagttttggctcaggtccaacttatagtgggtccagtgggcccctggactcatcctgtggtcatttccccagtgccagaatgcgtaattggcatagccatacttaacagctggcagaacccccacattggctccctgactggtagggcccaccagaagcaatttgccttcagctggcaaggccagcaatatacctttactgtcctacctcaaagatatatcaactttccagctttgtgtcataaaacagcaaaaagacacacagctaggaggaaactggccagcatctgcaatgccaggatccagacaagcccctgcagacccaggaactacaactgccacaacatgaggccaaacccagactctagaccagactctgtgttctcagagtccagaagacaaagggtccaggattgccctaacagacccaggatccaggcccatcccagtagacccaaataccaggccagttccccatgcactgaggatccagtaccatccctgaagacccatgctcaaggctcatctcagtacttggccagccctttcagactcaggctcaagggccaccccaagagcaagccagcccccatggacccaggcttcaggctagctcctgtgaatacagattccaggcccaaccccacccag

SEQ ID NO: 130567 - DNA, 1886 bp, Homo sapiens
atgcggaggcttgcattgtacattttagctccagatcgactgcaagaacaaaccagcaatcctgagaggacccacagaccctctgaaggaagcggactgctactgcaggacttgggagagaccccaaatacttctacccaaatgggaaggaaccagaaaaccaatcctggtaatatgacaaaacaaggctcatcaacatgcccctcaaatcacactacttcaccagcaatgaatccaaaccaagaagaaatacctgatttacctgaaaaagaattcaggagtttagttattaagctaatcagggagagaccagagaaagctatgtttgtggccccaccatctactaatctgtgtaagacacttgagggctaccctgaacatttccttttattcccctctcctcattcaatgtactaccaaagttcagtggacaaagtgatgaaagaaaatgatgaactcagggattctttctccaagcttcagaagcagatactgagcctcaaatctgctaagattgccctgagtgagagtcttatctcctgtagagaaagagctgaaattgttgaaaagcagacacaagctcttatcatatctaatggtgggaacagcagtcactcaactacaaaatgtacgtacaatgggaataattggatcctgaggtggcatgggccaagtggcagcactcaactgtcaaaggcccacagaagcaatttgccttcagctggcaaggccagcaatatacctttacaggcctacctcagggatatatcaactctctgtctttgtgttataatcttattccgagagaccttgatcgtttttcgcttccacaagatatcacactggtccattacattgatgacattatgctgactggatccagtgagcaagaattagcatacacactggacttactggtgagacgtttgtgtgccaaaggatgggaaataaatctgactgaaattcaggaagcttctacctcagtaaaatttctacgggtccagtggtgtggggcctgtcaagatattccttctaagatgaaggataagttactgcatttgttccctcctacaaccaagaaaaaggcatccctatttggatttcgaaggcagtgcattcctcatttggagtgtggtccagaacaagagaaggctctgcaacaggcgcaggctgctgtgcaagctgctgtgccacttgagcgatatgacccagcagatccaatggttcttgaggctgacctggctatggccactgctgagtgcccaatttgccagcagcggagaccaacactgagccctccatatggcaccgttccttggggtggtcagccagctacctggtggcaagttgattatattggatatcttccatcatggaaagggcagagttttgttctcactggaatagacacttactccggatatgggtttgcctatcctgcacataatgctattgccaagactaccatctgtgaactcacaaaatgccttatccaccgtcatgccaggattcacaggtccaggaatcaaggggtggaagtggcaccactcaccgtcacccctagtgatccattagcaaaatttttgcttcctgttcccatgacattacgttctgctggcctagaggtcttagttccagaggaaggaaccctgccaccaggagacatgacaatgattccattaaactggaagttaaggttgccaactggacactttgggctcctgctacttttaagtcaacaagctaagaagggagttacagtgttggctggggtgattgacccagactatcaagatgaaatcagtctactactccataacagagaactgctggatgaagagatcccctgtcaaaagaaggaaaatcttagagctggaggaggctga

SEQ ID NO: 130568 - DNA, 405 bp, Homo sapiens; identical to SEQ ID NO: 116233

SEQ ID NO: 130569 - DNA, 396 bp, Homo sapiens
cccacgcgtccgggagagcggagcgtgcacgttgagattcctcggcgggtaggcagcggtgctgggcatgctcagtgggcaggacccgttagagtggcgagaccgcagctgaatgcacagctagaaggttggctttcacaagtacagtctacaaaaagacctgctagagccattattgccccccatgcaggatatacgtactgtgggtcttgtgctgcccatgcttataaacaagtggatccgtctattacgtcaaaggttccgttacagttactatgatgaatcccagggggagatttatagatccattgaacatctagataaaatgggtatgagtattatagaacaattagaccctgtatcttttagcaattacttgaagaaataccataatag

SEQ ID NO: 130570 - DNA, 358 bp, Homo sapiens
ggcacgaggcaccataggcggcacaggcaccaagatgtccaaccgagtggtctgccgagaagccagtcacgccgggagctggtacacagcctcaggaccgcagctgaatgcacagctagaaggttggctttcacaagtacagtctacaaaaagacctgctagagccattattgccccccggagaattttcatccttgggccttctcatcatgtgcccctctctcgatgtgcactttccagtgtggatatatataggacacctctgtatgaccttcgtattgaccaaaagatttacggagaactgtggaagacaggaatgtttgaacgcatgtctctgcagacagatgaagatgaacac

SEQ ID NO: 130571 - DNA, 769 bp, Homo sapiens
ctcctcctgggctgggcccgcggtgtctcgtcccctcgcggagccgctcctgccgccgccgccgccgcctcctcattcatcctcgtgcaccataggcggcacaggcaccaagatgtccaaccgagtggtctgccgagaagccagtcacgccgggagctggtacacagcctcaggaccgcagctgaatgcacagctagaaggttggctttcacaagtacagtctacaaaaagacctgctagagccattattgccccccatgcaggatatacgtactgtgggtcttgtgctgcccatgcttataaacaagtggatccgtctattacccggagaattttcatccttgggccttctcatcatgtgcccctctctcgatgtgcactttccagtgtggatatatataggacacctctgtatgaccttcgtattgaccaaaagatttacggagaactgtggaagacaggaatgtttgaacgcatgtctctgcagacagatgaagatgaacacagtattgaaatgcatttgccttatacagctaaagccatggaaagccataaggatgagtttaccattattcctgtactggttggagctctgagtgagtcaaaagaacaggaattcggaaaactcttcagtaaatatctagcggatcctagtaatcctcttgtgggttcttctgatttctgccattggggtcaaagggtcccgtacagttactatgatgaatcccagggggagaattatagatccattgaacatctagataaaatg

SEQ ID NO: 130572 - DNA, 1020 bp, Homo sapiens
acaagaattcgagatgcattgggtgtggggacccaaaaaggctgtcacactgactcttcactgagctgttcagcacttaagccatccgtggatgggaaagctaaaagagcattgtttgtaacacatgctttctggggctccagaggtcgcgggcaactcctagatgctgctgtgggctggctggtgttcaagtttcttttagagctatatactggaatgtctgcagatgaaatgatatgctattcaggtaaaagtactgagttaagtggaaagttggttttaaactatgttttgactgtgatggagggagagaggagcagaggagtgaggccacagcaaggaaatgactgtgatgatggatttttgagtctcagactaggaccgcagctgaatgcacagctagaaggttggctttcacaagtacagtctacaaaaagacctgctagagccattattgcccctgtgggttggacttcagcgactcacatccaaagaacagaatacggcaaaaggaagatagcaactttacaacagacaaacctggcaaacacttactaccttaaccaaacgatcaaaatgcagattctgcccaagaagcccctgcattgcagagggactggagatctgtatgatctgtttatttcgcaattgacaggccataaggatgagtttaccattattcctgtactggttggagctctgagtgagtcaaaagaacaggaattcggaaaactcttcagtaaatatctagcggatcctagtaatctctttgtggtttcttctgatttctgccattgggtttacggagaactgtggaagacaggaatgtttgaacgcatgtctctgcagacagatgaagatgaacacagtattgaaatgcatttgccttatacagctaaagccatggaaaggtgccctgttgatgtagtgagcaggggtcctcagctggtccgtggcctgttaggaactggactgtgcaacaggatgcgaacggtgggccagcgagcattacccacctga

SEQ ID NO: 130573 - DNA, 294 bp, Homo sapiens
tgaggtaggaacttttattatcacaagtccagagaggtaaagttacttggcccatgccaaacagcaaggcaattggcttgtcaaggatgtgttctaaggtttgtctgactgcagagcccccaccctcactttccagtgtgtgtgagggggtcaggaacagaggagggcttcatccaggacctgtctttggggcttgttgttctcagctggcagcagaaatcgctggcccaggacagtgcccacacgggcagagtacatgtggtccccaagcacagggcagagctgtagtaccat

SEQ ID NO: 130574 - DNA, 1590 bp, Homo sapiens
atgtcccatcaggctttgcagaactttcagcggtataccggcatacagcatgtgcatcgcataggaatggcggaacgtatgtggtgtgaccggaacagagaacgtcacaccgtcagcagcagcggcggcaaccgcctccccaatccagaacattttgaggcatttcagtcagttgctcaatgtacctataaccagaccgttcagctggatattacggcctttttaaagaccgtaaagaaaaataagcacaagttttatccggcctttattcacattcttgtccgcctgatgaatgctcatccggagttccgtatggcaatgaaggacgggtttattgagaatatgtttttcgtctcagccaatccctgggtgagtttcaccagttttgatttaaacgtggccaatatggacaacttcttcgcccccgatttcaccatgggcaaatattatacgcaaggcgacaaggtgctgatgccgctggcgattcaggttcatcatgccgtttgtgatggcttccatgtcggcagaatgcttaatgaattacaacagtactgcgatgagtggcagggcggggcaattactgctctaattcaccaaggggagtcaaagaaacggcacctctcaccagaactaacccttgtaattgaggtagattcatttactccatttcccatgtcgtactgcccccagactcttgtacttttttccccctatggtactgaaagctttagtctcatcaacaaactatacatccttaccacgtctgaggattccccagtcggtgaggtccctctgtactttcataccaaagtcactgtcaagggtctccatgacacctctatgcaggaagagctgaggttaacaagcctacccttgtcaagaacttctggaacctccttgggagtggggctgagcagggtatcccctggcctgggagcagaggacttctggctgactgctgcccgcaacgttctcaagctggtggtgaagtctgagtggaagtcataccctattcaggcagtagaggaagaggcctcaggaataacagaggcaagggactggccctcccacattcaggtgtcctgtagcccaggggtcccaatccgtgagccgcagaccagtaactgtctgtggtttgtgagaaacgaggccacacagcaggagatgaggagcctctgcctagaggagtggtccatgcatgcattctcacagaaaatgaaaggaattgaaattaagagaagggagagattgaagtgtggcgccaagattgaaaggagaaagaggttgagggatagtgtgcgactgctgcgacaagaccccatcgaatgccttttctcttttatctgttcctccaacaacaacatcgcccgcatcactggcatggtggagcggctgtgccaggcttttggacctcggctcatccagcttgatgatgtcacctaccatggcttccccagcctgcaggccctggctggaaacgccaaactgttttccataggaactacaccattttacattctcaccagcagtgtacgagggttccagtttcttcgcatcctcaccaatactcattattattattatttttaa

SEQ ID NO: 130575 - DNA, 1230 bp, Homo sapiens
atggtccgtccctgcctgagacaagcagcccaagaaacaggagaaaaaccagtgttggtgtccccagagtttgtggatgaagctctgtgtgcgtgcgaggagtaccttagcaacttggcccacatggacatcgacaaggacctggaggccccgctgtacctcacccccgagggctggtccctcttcctccagcgctactaccaagtggtccaccccaccccacaccggttccactcttttcccaggtacaacgtggactccaaaaccaacatctccaaaccggtgagcaaacgtttcctcgagggttggcggagcgcacaggaggcacttagatgtgttcaacgactctcaagtaacaccggccaagaaccgcacttgcagcagctgtcggatggattaggcagcacagacagcagcagggactggagagaacatgggaccaagcaaccctcaaactggatggtggcggagctgaacaacgcttcagaggtcacctgtccacatcccagcggctcagacctctgcctaggaggtggtgtaccaggcaagaagtgtgggaccatattgctgactgcagaagagcttagcaattgtcgggacattgccaccatgcagctgtgtgcaaacaagctggacaagaaggacttctttgggaaatcagaccccttccttgtgttctacaggagcaatgaggatggcacgttcaccatctgccacaagacagaggttgtgaaaaacacgctgaatcctgtgtggcagcccttcagcatccctgtgcgggctctgtgcaatggagactatgacagaacggtgaagattgatgtgtacgactgggaccgggatggaagccacgatttcattggtgagttcaccaccagctaccgggagctgagcaaggcccagaaccagttcacagtatatgaggttcttaaccctcggaagaaatgtaagaagaagaaatatgtcaactcaggaactgtgacgctgctctccttctctgtggactctgaattcacttttgttgattacatcaagggagggacacagctgaacttcacagtagccattgacttcacggcttccaatggtgagacacggatgagtgaaaaagtcggagccctcaaccctgtcgctgatgagagatttaacaatgtccagaaatgcactaatcagaagctgctgcagcaacaacagctaacaatgattaaaaaccactgggcttgccagtaa

SEQ ID NO: 130576 - DNA, 2700 bp, Homo sapiens
atgggggtggactttgatgtgaagactttctgccacaacttgcgggcgactaagccaccatacgagtgcccggtggagacctgccgaaaggtctacaagagttacagtggtattgagtaccacctgtaccactatgaccacgacaacccaccacccccacaacaaactccactccgcaagcacaagaaaaaggggcgccagtcacgcccagccaacaagcagtcacccagcccctcagaggtctcacagtcaccaggccgtgaggtgatgagctatgcacaggcccagcgcatggtggaggtggacttgcatggccgcgtccaccgcatcagcatctttgacaacctggatgtggtgtcagaggatgaggaagcccccgaggaggcccctgagaatggcagcaacaaggagaacactgagacaccagctgctactcccaagtcaggcaaacataagaacaaggagaagcgcaaggactccaaccatcaccaccaccacaatgtttctgcgagcaccactcccaagctgccagaggtggtctatcgggagctggaacaggacacccctgatgccccaccccggccaacttcctattaccggtacatcgagaagtctgcagaggagctggacgaggaagtagagtatgacatggacgaggaggactacatctggctggatatcatgaatgagcgtcggaagacagagggtgtaagtcccatcccgcaggagatctttgagtacctaatggaccgactggagaaggagtcgtactttgagagtcataataaaggcgaccctaatgcgctagtggacgaggatgctgtttgctgtatctgcaatgatggtgagtgccagaacagcaatgtcatcctcttctgtgacatgtgcaacctggccgtgcaccaggagtgctacggtgtcccctatatccctgagggccagtggctgtgccgccgttgcctgcagtcaccctctcgtgctgtggattgtgccctgtgccccaacaagggcggtgccttcaagcagacagatgacgggcgctgggcccatgtggtgtgtgccttgtggatccctgaggtctgcttcgccaacacggtcttcctagagcctattgacagcattgagcacatcccaccagctcgctggaagctcacctgctacatttgcaaacaacggggctcaggggcctgcatccagtgccacaaggccaactgttacacagctttccatgtgacatgcgcccagcaggctggcctttacatgaagatggagcctgtgcgggagacaggcgccaacggcacctctttcagtgtccgcaagacagcctactgcgacatccacacgcctccaggttcagcacgccgactgcctgccctgtcccacagcgagggtgaggaggatgaagatgaggaggaggatgagggtaagggctggagctcagagaaagtcaagaaggccaaggccaagtcccggatcaaaatgaagaaggcacggaagatcctggcagagaagcgggcagcagcacctgtggtgtcagtgccctgcatcccaccacacaggcttagtaaaatcaccaaccgcctgaccatccaaaggaagagccagttcatgcagaggctgcacagctactggacactgaagcggcagtcacggaatggggtcccattgctacgtcgcctgcagacacacctgcaatctcagaggaactgtgaccaagttgggagagattctgaggataagaactgggcccttaaagaacagctcaagtcctggcagcggctccggcatgacttggagcgagctcggctgctcgtggaattgatccgcaagcgggaaaaactcaaaagggagacggacattgccaccatgcagctgtgtgcaaacaagctggacaagaaggacttctttgggaaatcagaccccttccttgtgttctacaggagcaatgaggatggcacgttcaccatctgccacaagacagaggttgtgaaaaacacgctgaatcctgtgtggcagcccttcagcatccctgtgcgggctctgtgcaatggagactatgacagaacggtgaagattgatgtgtacgactgggaccgggatggaagccacgatttcattggtgagttcaccaccagctaccgggagctgagcaaggcccagaaccagttcacagtatatgaggttcttaaccctcggaagaaatgtaagaagaagaaatatgtcaactcaggaactgtgacgctgctctccttctctgtggactctgaattcacttttgttgattacatcaagggagggacacagctgaacttcacagtagccattgacttcacggcttccaatggtgagacacggatgagtgaaaaagtcggagggaatcctctgcagcctacctccctgcactacatgagtccctaccagctcagcgcctatgccatggccctcaaggcagtgggagagatcatccaggactatgacagtgataagctcttcccagcttatggctttggggccaagctgcccccagagggacggatctcccaccagttccccctgaacaacaatgatgaggaccccaactgtgcgggcatcgagggtgtgctggagagctatttccagagcctgcgcacagtgcagctctatgggcccacctactttgctcctgtcatcaaccaagtggccagccttccaagtagctaa

SEQ ID NO: 130577 - DNA, 734 bp, Homo sapiens
gcctcgagtgacaggtcctgggacagtgggagccaagggcaagtgctagagttgcagtgaatttagagcaaagcctcagtctaagtaacacatctcaaggcatgtagggtatctatctatgttcagtgcgggcctcacgttaattgaccagccttatgaacaatggcggctgtggcatgcgtcaggttacctgccttgatatgggatcgtgacaggcccctccctatgtgcaggagacaagcagcccaagaaacaggagaaaaacccagtgttggtgtccccagagtttgtggatgaagctctgtgtgcgtgcgaggagtaccttagcaacttggcccacatggacatcgacaaggacctggaggccccgctgtacctcaacccccgagggctggtccctcttcctccagcgttactaccaagtggtccagtgagtcccctgcagctgggactttgggctgtgggcaggtgcttagggatagaccctttctgtctcgtgcagcccctaccccttccccaagcctcccgctcgtttaccccgctgttttgctcaggaaccctcgaggactcccactgcctccgtgatagggtctgggccacttttcttggttcttggcatagcatagtcactaagagcatggactgtgccaccaaatggacagcacattacccaaagtgtgtgttgtgtggatgttaattctacaggaagtaaatagattttatgaaaaaaaaaa

SEQ ID NO: 130578 - DNA, 960 bp, Homo sapiens
atgcagctgtgtgcaaacaagctggacaagaaggacttctttgggaaatcagaccccttccttgtgttctacaggagcaatgaggatggcacgttcaccatctgccacaagacagaggttgtgaaaaacacgctgaatcctgtgtggcagcccttcagcatccctgtgcgggctctgtgcaatggagactatgacaggacacagctgaacttcacagtagccattgacttcacggcttccaatggtgagacacggatgagtgaaaaagtcggagggaatcctctgcagcctacctccctgcactacatgagtccctaccagctcagcgcctatgccatggccctcaaggcagtgggagagatcatccaggactatgacagtgataagctcttcccagcttatggctttggggccaagctgcccccagagggacggatctcccaccagttccccctgaacaacaatgatgaggaccccaactgtgcgggcatcgagggtgtgctggagagctatttccagagcctgcgcacagtgcagctctatgggcccacctactttgctcctgtcatcaaccaagtggccaggtgctggaggaacagtggcaagcaagacaaagcctctggattcggggagcttatgtctggagccctggctgtggtcggggggcagtgggccatgctgggggcagtggaaggccccaggtggaagcaggcggaggacattagagacatctacgacttccgagatgttctgggcaccgcgccgttcaagaggctggtcccaggcacctattcacagggcgcgtcggatacccaccccctcggccccccgcacacgccggtcctcgacccctttccgcaggatggtttcccggtcctctggcgaggatcctccaaggcgtctcacatgaaccggctcagaaacgccaaaatctacgtggagagagctgtcaaggtctaa

SEQ ID NO: 130579 - DNA, 2197 bp, Homo sapiens
atgaggacaacaagaacactaactctatggctgtggtacatcgagaagtctgcagaggagctggacgaggaagtagagtatgacatggacgaggaggactacatctggctggatatcatgaatgagcgtcggaagacagagggtgtaagtcccatcccgcaggagatctttgagtacctaatggaccgactggagaaggagtcgtactttgagagtcataataaaggcgaccctaatgcgctagtggacgaggatgctgtttgctgtatctgcaatgatggtgagtgccagaacagcaatgtcatcctcttctgtgacatgtgcaacctggccgtgcaccaggagtgctacggtgtcccctatatccctgagggccagtggctgtgccgccgttgcctgcagtcaccctctcgtgctgtggattgtgccctgtgccccaacaagggcggtgccttcaagcagacagatgacgggcgctgggcccatgtggtctgcttcgccaacacggtcttcctagagcctattgacagcattgagcacatcccaccagctcgctggaagctcacctgctacatttgcaaacaacggggctcaggggcctgcatccagtgccacaaggccaactgttacacagctttccatgtgacatgcgcccagcaggctggcctttacatgaagatggagcctgtgcgggagacaggcgccaacggcacctctttcagtgtccgcaagacagcctactgcgacatccacacgcctccaggttcagcacgccgactgcctgccctgtcccacagcgagggtgaggaggatgaagatgaggaggaggatgagggtaagggctggagctcagagaaagtcaagaaggccaaggccaagtcccggatcaaaatgaagaaggcacggaagatcctggcagagaagcgggcagcagcacctgtggtgtcagtgccctgcatcccaccacacaggcttagtaaaatcaccaaccgcctgaccatccaaaggaagagccagttcatgcagaggctgcacagctactggacactgaagcggcagtcacggaatggggtcccattgctacgtcgcctgcagacacacctgcaatctcagaggaactgtgaccaagttgggagagattctgaggataagaactgggcccttaaagaacagctcaagtcctggcagcggctccggcatgacttggagcgagctcggctgctcgtggaattgatccgcaagcgggaaaaactcaaaagggagacggggagaaatggatttctctctaacgggagaaatggatgtcagaaaataaatgaacaagttactagtggaaaaccaggagagctgacgttgttctcagtgctgccagagctgagccagtccctagggctcagggagcaggagcttcaggttgtccgagcatctgggaaagaaagctctgggcttgtactcctctccagctgtccccagacagctagtcgcctccagaagtacttcacccatgcacggagagcccaaaggcccacagccacctactgtgctgtcactgatgggatcccagctgcttctgaggggaagatccaggctgccctgaaactggaacacattgatggggtcaatctcacagttccagtgaaggccccatcccgaaaggacatcctggaaggtgtcaagaagactctcagtcactttcgtgtggtagccacaggctctggctgtgccctggtccagctgcagccactgacagtgttctccagtcaactacaggtgcacatggtactacagctctgccctgtgcttggggaccacatgtactctgcccgtgtgggcactgtcctggatgaagccctcctcagacgcctccacctgaccccctcccaggctgcccagctgcccttgcacctccacctacatcggctccttctcccaggcaccagggccagggacacccctgttgagctcctggcaccactgcccccttatttctccaggaccctacagtgcctggggctccgcttacaatagtcctccctctgttcctgaccccctcacacacactggaaagggaaggtggggggctctgcagtcagacaaacctaagatcacatcctggacaggccacttgcttgctgtgtggcattgggcaagtaactttacctctctggacttgtgataataaaagttcctacctcaa

SEQ ID NO: 130580 - DNA, 1844 bp, Homo sapiens
aagttctaaactcaggctctagagtcagaaaaggtagagtcaggttctggatccaaaatggggcaaggcatgatcaggttctggaaccagaacaggcctcaagcctaggggctgagcagggtatcccctggcctgggagcagaggacttctggctgactgctgcccgcaacgttctcaagctggtggtgaagtctgagtggaagtcataccctattcaggcagtagaggaagaggcctcaggagacaagcagcccaagaaacaggagaaaaacccagtgttggtgtccccagagtttgtggatgaagcctttctgtgcgtgcgaggagtaccttaacaacttggcccacatggacatcgacaaggacctggaggccccgctgtacctcacccccgagggctggtccctcttcctccagcgctactaccaagtggtccagcatcagaggcaaccccgcggctcctgccaacggtcggggcccctcggggaccagcccttcgcggggctgctgccaaaaaaacctcagtcgggaggagctggttgatgcgctgcgggcagccgtggtggaccggaaaggaaaaccaggagagctgacgttgttctcagtgctgccagagctgagccagtccctagggctcagggagcaggagcttcaggttgtccgagcatctgggaaagaaagctctgggcttgtactcctctccagctgtccccagacagctagtcgcctccagaagtacttcacccatgcacggagagcccaaaggcccacagccacctactgtgctgtcactgatgggatcccagctgcttctgaggggaagatccaggctgccctgaaactggaacacattgatggggtcaatctcacagttccagtgaaggccccatcccgaaaggacatcctggaaggtgtcaagaagactctcagtcactttcgtgtggtagccacaggctctggctgtgccctggtccagctgcagccactgacagtgttctccagtcaactacaggtgcacatggtactacagctctgccctgtgcttggggaccacatgtactctgcccgtgtgggcactgtcctgggccagcgatttctgctgccagctgagaacaacaagccccaaagacaggacattgccaccatgcagctgtgtgcaaacaagctggacaagaaggacttctttgggaaatcagaccccttccttgtgttctacaggagcaatgaggatggcacgttcaccatctgccacaagacagaggttgtgaaaaacacgctgaatcctgtgtggcagcccttcagcatccctgtgcgggctctgtgcaatggagactatgacagaacggtgaagattgatgtgtacgactgggaccgggatggaagccacgatttcattggtgagttcaccaccagctaccgggagctgagcaaggcccagaaccagttcacagtatatgaggttcttaaccctcggaagaaatgtaagaagaagaaatatgtcaactcaggaactgtgacgctgctctccttctctgtggactctgaattcacttttgttgattacatcaagggagggacacagctgaacttcacagtagccattgacttcacggcttccaatgggaatcctctgcagcctacctccctgcactacatgagtccctaccagctcagcgcctatgccatggccctcaaggcagtgggagagatcatccaggactatgacagtgataagctcttcccagcttatggctttggggccaagctgcccccagagggacggatctcccaccagttccccctgaacaacaatgatgaggaccccaactgtgcgggcatcgag

SEQ ID NO: 130581 - DNA, 189 bp, Homo sapiens
tgaccttctacgccaatcttggcacgagggccaaaggaatcccaaaaatgactggtaatataattctggctgcctttatggtagtcagtgcagcgtctgcagatgcctctaaggagtccgaaaccaagtccgaagtcaacaacaagcaatgatggcgatggcgattctagttaataaaaaggggggaga

SEQ ID NO: 130582 - DNA, 2037 bp, Homo sapiens
atgaacgattcacgaattgggcagcccccagaatcacagcagattcagagagactccagcacaggcacatggtgggagatttatggacagcaaaaggaaagtgagcctccctgccgtcctgcggcacaaaatcagctacagcccgctgatgttgctcagcaagcagctgatctcgcggcaaattctcgctctgtgttaatatcttgtttttctgcagtacaaaaagcagttgcagcagccggtttagttattgccccagaaaaaatccaaacttcttctccttatcactatttaggaatgcagctagaagacaaggacaggccttggtggaacgagccaataaaacactcaaagatcaacttcgaaaacaggacactaaaacagagggatgctgccactcctcatgctcagttaaatctggctccttttacactaaatttcttaaacctagcaagaaatcaaccttttacagtggcagaacaacatttcactggaagtaaatttgatccacaaaaaggaatgcggatgaaacgttcccagaaacaaaaggcaaagacccctcaaaaaccgaggaggaaatttcgcctcctgacacataaacttcatgacctcgacattgagacaaaatctcgctgtgtgacctacaacaccactcgttcaactccaccaacatggggtcaaataaaggtcttatcccatcacacagaaaatttattaaaagaaaaaggaatcccaaaaacgaccagtaatataattctggctgtctttatggtagtcagtgcagcagtaagtataccaccagttggggcaactcaaaattatacctactgggcatatgttccttttccccctttaatttggtctgtctcctggatggactcctcagtagaagtttacactaataatagtgcattcatgccggtccctaatgatgataggtttccagctcaaccggaagaagaagtctgcagatgcctccaaggagtccggaaacaagtccaaagtcaacgacaagcaatgatggtgatggcgatcctagttaataaaaagggggcagatgtgggtggcaagccaatcaggattgctacacttgtctatttaccatcaaaattgggcaagagagcaccaagaggcactaaagtagatcttctgagttcagtgcatgggtatggggtgccacctaacatcacgcttaatcagagacacacacaggagacaaaggaattggctcatggccgcaccagcaggcaagaaaaggagtcaccatcatggcttggtaatgctgatcacggatttgaccccgaccatcaggaggacgtagaaggagataggcctactgatacatatgataggggcaggaaggaatatgctggcactgccctcactctcagccatggcagggtccctgaatgtgaaggcgagcaggccagcgcacaggcacagagttcagcagtgaaggtgcagaagtggtttgtgtcaagccatagaaaagagaagcagcaaacagtggtcaacaccctattccaaagtctggttccagaaccagcaacatcaggatgctctggcctctacatagttcaagaccgaaagaaaacactccattttgcccacaaactacaggtctgctgggcattgcagggttgtgggactgagacacagttgtctcaacaaccacttctatgcacttgggagagggatggggtagcgattgtgagcctttccattgaactcagtgctgccctgtcacagtggaaagcagaacggggctgtactcagcttatgcctgcacgtggagcaaacattccgggcaggccctcgccagaggggaattgccatcccagcagtcagagcttgaattccaaaacactgaggttccaagcaaagagaaattgcaactctacacctcatgcaagcctaaacccaaaaggtactccttctgtagcaggggatgcagtcaccctgaagtgttccaaaaaggctacctgtaccagtgccagctctgatgagggtggcaggggagtgatgtacattctgtga

SEQ ID NO: 130583 - DNA, 855 bp, Homo sapiens
atggatcccttgcacatgtgccttccgtggcatgaagactgtcagcacctggcaggactggagcgactagtgaaacaccagacaccagcccctcggccaaggtctcgcccagcacctccttctgaaccctgccctgccccggaggctgctggctccagtgcaggcctgactgtcacgggcacctacagcataaccctgccagtgacctcgcagcagctgcagcaccaagctctccaggcagcgccctggcgcagcttgcagacggcctattgtgggacttcaccttttgatcccgtgggccaattttccctaataaactccttttcatatagacatgtatcttacatttctgtccctctggagaaccctgacttatactccggccaaccacagatcagtgagaaagagaagaaaatgcttgttgctgatgtttgtgtagtcatgacagcctcgcggaaagccttgggagcatggggcgtcctaatcatcctgacaactccgggtggagggtacaccgccgtgctccatgccatcgggacagagctgggatatgcaggccatggcgaacaagcacacagcacaaacctgtgccgcactgtccagggctccctgctgctgccaggagcaattcctggagtccagcatgtggaggtagcagggcctctgctggctttgggactggaccagcagcactgcagccctagtccaatcatgagaaaaatatccgacagtctcaatcgagggatacgctacgaaatgctcgaccagccctcctcaaaactgtccaggtcatcaaaacaaggaaacaaagggaactgccacagccaccaggagctaaggaggcctgacaagtaa

SEQ ID NO: 130584 - DNA, 837 bp, Homo sapiens
cgcttggaatcacaaggaggaagaagaaagagacagatggtttcaacccatgaggaaagagaaagggtcagatactttcatgatgatgataatctaagcctaaatgatttagtcaaaaatgaaaagatgggaacagcagaaaatcaaaacaagctctttatgagaatggcatctaaggtaactgcagccacaggaagtaaaaccacagatgcccagactggtaccagtcacaagtctgggcttccagaacttctgaccacccagcttcaagttggggttcacatgacccccccacttcgggtacgattaatttgctggaacagctcacagaattcagggaaacacttaaattacatttactggtttattataaaggttatcataaaggatataggtgaagagacgcgtagggcgagaattggttccttccggtgggttcttggtctcactgacttcaagaatgaagctgtggaccctcgtgatgttcagatgtgcctggagtttcttccttccagtggttttatggtcttgctgacttcaggagtgaagatgcagaccttcgcagtgagtgttacagctcttaaaggtggtgcatctggagttgtttgttcctcccggtgggttcgtggtctcgctgacttcaggaatgaagccacagaccctcgtgaaaaagaaaagcaaatgaaatgcatagtaagccgaagaaaggaaacaaagctcagagcaggaatcaatgaaacagaaaacagaaaagcaatagagaaaaccattgaaacgaaaagcatactcttggagaattctgataaaatcaatgaacttctagcctcactgagttga

SEQ ID NO: 130585 - DNA, 525 bp, Homo sapiens
cccccttttttcttcttttttggggtcagaacatttaagctgaaagggaataagagtagtctaacccagccgggcgtggtggctcacacctgtaatcccagcactttgggaagccaaggcaggcagatcacctgaggtcaggagttcaagagtagcctggccaacatggtgaaaccccgtctctactaaaaatacaaaaaattagctggacatggtggtgggcacctgtaatctcagctactcaaggaggctgaggcaggagaattgcttgaacccaggaggcggaggttgcattgagccaagatcacgccactgcactccagcctgaatgactgagtgaaactctgtcttagaaaaaaaaaaaaagtagtctaatccaacttcttattttgcagctgaaaaaactgagggtcagcaaatttaaataaaatctgaaatgaaaacttatgtttcgtgactcacaatccaatgtgatctctgctaggtattctgattctatctttgcttgactgatacaagataatg

SEQ ID NO: 130586 - DNA, 429 bp, Homo sapiens
tgtgtcctcactcaagagcaggacagctggctgcactggccaagtgtgtctgaaagttgacaggaacattcattccagcattagaaggaagtgggccaggtgtggtggctcacactagcagctgttattcctgttaatatcctggtcaagcctgttccaggcacctgagtgacacagacatgaagggacacgccctgtccctgcgctcaccctgcaagggcaaggggagagacagcaacaccagggagagctgatgcaactgacccggtgcaactaactgttgtccctggtgcttgtcacagcaccagttagtgcattgagagtatggttcatggaggagaaaatattttcccagccgggcatggtggctcccacctgtaatcccagcactttgggaggccaaggcaggtggatcacttgaggtcagga

SEQ ID NO: 130587 - DNA, 692 bp, Homo sapiens
aatatgctactttcagagaataaagtcattgacccattacttcggcttggcatactattcagaaaaggtatagaggagcagttggaaccagcagttgaaaagataagcatcatggcggaagagattggccaatcagttggcaattaataaacctgtcactgattttttccttcaacttgtggatgcaggcaaggtggatgatgccagagctctcctacagagatgtggtgcaattgctgaacaaaccccgattttgttgttgttcctccttaggaattctaggaaacaaggaaaggtactgtgctttacctgcttacaaatcaatgatactgtacgtgccttgctcagaagtattgaatttaacataaaagcctgttgtttcaggaccttatttgagaatactatagagattcaagactttgcttgtctctacttagagtcagttttgtcgtctgttagctgtactggaaatgtaaaacaagttcacgcaggaattttccacttacacaggtatgcattgagagccccaagaaaaggcccttaaaaaatgcaagattaggctgggcatggtggctcacacctgtaatcccagcactttgggaggccgaggcgggtggatcacttgaggtcaggagtttcagagtttgagaccagcctggccagcatggcgaaacctggtctttacaaaaaaa

SEQ ID NO: 130588 - DNA, 5367 bp, Homo sapiens
catggaggcagtgttaactaaaattaagcttagatttagctcctgtattattcataatatgagaaattttaggaaaggcggactttggtaaaggtgccaaggcacttacttgtatagaaaagacttcactctatgggatttatataagtaagtgctttctctatattcaaaatatttcataaggacctgtggtttttttccccttaaaaagcaactctaggccgggcacagtggctcatgcctgtaatcccagcactttgggaggccaaggcaggtggatcacttgaggtcaggagttcgagaccagcctggccaacatggtgaaaccccatctctactaaaaatacaaaaattagccaggtacggtggcgggtgcctgtaatcccagctactcgggaggctgaggcaggagaatcacttgaaccttgggggcggaggttgaagtgagccaagatggtgccactgcactccagcctaagaaattgagcaagaccctatctcgaaaaaataaaataataacataaagaaatgatcacaggcagaaactgtatgcacacaccgagtgtggaaaagccctcttgtggaagtcagttatttgtgtacatcagaaaattctggaaggagagaaaccttgtgaaggtactaaatatgacaacatcttcagtaacagaggatgtccccctgtacccagaatggtgcatgctgtggagataccctgcaagtagaccgaatgtgagaaagccacaggagtacatgggcctcgcggtgcatcagagttcctgccagagaggcccacaggcatgaacatggcagagtgtgaaagtcgtctgcgggaagccaggactctatgccagaaacttcacactggggagatatcctcagtgcaatcagtgtagaaatgcctctactaagaactgcttctgattctgaatcacagagttcacagtggagaaaaccacatgaatgtaaaactgtggaaaagttttcagctagaagccagagaattcacactgggagagacatgagaaaacagcaaatgcaggaaaactttcccttggagatcagagctcactgatctcagagttcatacaggagaagagccctatacaatcacgagggtggaaccgcctttggcaagaaaacacgccccattacccatgagagagctgcacaggagagaaaccctatggaataaataattctggaaagcattcagcaacaaatgaaacgtcctaatgtgcactatagagaagccctaggaacacaacaaatgtggagaaggagagtcagtagcgcaacagaaatgtttctcagaggagaagcttttaagttaattacttaaaacctgcagaagcacctagtcccacggtcaaaaccaactgcgcaccagagaagctgcatgggaaagtttgtatgttggataaagtgtggttcaccctcaaaactagctccagacatcacagactagagaatgtatactgatcttaaacagtggtcaatttaacaaatgtaaattctactcccagggacataaaattccataacttaaaccaagctttttgtaaaaactatcagtgaaaaacaaatgtgcgtgcatctgcagcccaagcctcttcctccccaggcctggcgctcagcttgcaaatggacttcccagtacctatgaggaatgaagggtttccatacccgtcctgagccatccacttgggattcaccctcaccacggccatgactctctgtcactgctcccaacctggagctcctaaacccatccccaacccgaacacaacacaaatgcacccctgctccttgttctcacatcactaacattacacacgtgtatctgaatttcttcaggtttgggggtttttttggtgtttttttgttttgtttttttgagacagagtttcactcttgttgcctgggctggaagtgcaatggcgtgatctcggctcaccacaacctctgtctcccggtttcaagcaagcgattctcctggtctcagcctcccgagtagctgggactacaggcgtctgccaccactatgcctggctaattttgtttttttgttttttttttagtaaagatggggtttcaccatgttgggccagggggggtctcgaactcctgacctcaagtgatccacctgcattggcctcccaaagtgctgggattacaggcatgagccaccgtgcccggcctctggttttgttttgttttttttttttaatgggggacaaaagagagggaaagacccctataaatctatatataacaatgtaaccatatacttgcatgtctaatacaaactgaagaaattagcctaactgccaatatcaagttgcagattttaatccatggaaattgtgttttgtgctgaattgtatttgctgattacctgaaattggcttctttttattgggcttctctggagaatttctcccactccccacctctgcagaagaaaattttgctcttataaaacctcatgttttcatcattcccatcttttctttttattgcctcttatatctctgctctttgacctcaaggtctagaggtctgcagtaagccaagaaacaaaggtggggtggatgaggcaaggtttgcaggagaaagaggaattgagaaatggggtatttttgctatcagctcttctgctatgaagtagtaaaaggcagtctataattaactgacagacctaactgaagcacagagaatacatcagacttatgcatccaagacatcagaacttggattttatcaaacttgatgacttctctaaaaggagctttggaaacttcaaattcagctataggatagtaccaatgaacacatccagctgatcccaaaagctgttttcaggtataaggacaaggagaggagacaagtgacgacagccattcccctttgcagctatctactgtagtgacagccatttcttggttgatgggttggaagtcatcagaggtttgaagaattacactggcctttgtttttctggaaatgccgaccatggagatgctttagagtcttctcaaatagcttagatgttgtaatgaggttagctttgcttcataaaacaggggccctcagaagttctccttaaatttttcaataaaaatttagctcttaaaaaaataacagtgtgactgagtgaatgaagataagttggattctttcagagcattcttttcctcaaaacgagctgcataattcttggaatttatgtcttaccacatggtggagggatggaggaactacaggatgcaattcttcttctaccaatgggcaatagaggttgagagagattcagcatctttctgggattagaattcaagtctctttactcctacagcagctgtgtctccaacgttgagactttgcagatggcacagactccatggataataggtaaacttggggccgggcgcagtggctcacgcctgtaatcccagtattttgggaggccgaggtggaaagatcgcttgagcccaggagttcaagaccagcctgggctacatgacgaaactccatctctatcaaaaatacaaaaaattaactaggtgtggtgctgcacgcctgtggtcccagctattcaggaggctggggcaggagaattggttgaacccaggaggcggaggttgcagtgagcccgagattgtgccactgcactccagcctgggcaacaagagttgaaactctgtctcaaaaattaattaattaattaattaaaataaactaggtaaacttggataggcagtagatatttttgcccacctgaggaggaactcagtcaagctgttgcttaacagcttgatccagggcgtgaaaggttagttgagactgaagtgttcacttccatagaagaacatcacttttaaccttgctttggcgaagggagtcggaaagctgagtctctatggacgggggggtgatcttgctttcagtgttccctcagcttttgtggatttaaaaccattctgctccccctaaaccttttgtttgatttcagcccatgttcttgacaatgcagagcaattctgagcagtcacaaagcctactctctgttcttgtccctgccaacccccaccccccataatctgactcacaacttcaccatcagttggggtcataccactagtctctgtcctataccccatgaaatgtaaatactgtatcataagtagaagaaaataatttttgttttctaaaaatgcattttgagatagtttaatgtaaatctgacaggagcattctgaagccccattaggaaaaaatttaaatggttcctcttcatcgccttaatgtctaaagatcagaaatcgctgagcaaacccgcttttgtttccttcccagaaacaatgcaaaacaacaggtggagatagtctggtctttgccctgctgtgtgtgcctctgtagctcctcctgacaaacgtctgggaaaacagcctcaccccactctcctctctcttccccatttccttgtagctttattccttgcatctttgggtctactgagcagtgggtgctgaggtgacaggggaggaaccagttgttctgtagcctaggaactgcctcagtgtctttgccagaaaaaggcaaagaggcggacagtgcagggctcctccctcctacctcaggcctgatccatcgtgcccttgactttgccgtctcaaagtttcttagctgactttggctttcacatttgttctttccagagctaactgataagagtggaggaggaatgccttctcctaagagtcagttgaaagaaagacaagagagtcacatcttagcttttgcacaaggcattcgtggtcaggaataggttagggaatggtcacttctgattttccaacagttgctccttctctgaagagatcttgattcctttgggaagacaagaatttttcttaataacaaaggtccctttatgagttattccttctttcagttcatctcactggagcacagccaagatggacatgtttatggacagtgctctagatgtgaaaacagatagaactggtttgtgggacaggggcagcttgctcaggagagggaataacgcaggtcccttttcttggaaggcttgtactatggccatgacagtgacattgccctcaccatgatccctctccaaagtggttgtctttctttaccttgtgtcttctcttgtaaaaatgaaactcaaaaataaaataaatgtgtcaaattttgaaaaaaaaagaaaactgaaaaagctaacatgaattgtgtgaaattgcataatgctgtaatgctaatctacaatatgtaatgctatcttgtatgttgaatttgttaatgcaccacacaagtgcaaaataaagactgattcacatt

SEQ ID NO: 130589 - DNA, 434 bp, Homo sapiens
tatccaagaaagccagagctggagttggggccagctgggccggtgacatggagcccctgaaccagcaaacgcacaagcaggtccatgagatacattctcacatgggacacctggagacggcagacaagcagtctgtgcacttagtagaaggtgaaatccaagcaagcacagaccagatattcagccatctagaacatcgggagattttgtccagcaaggagccccctaataaaaggcagaatgccaaacttcgggttgaccagtttaagtatgatgttcagcacctgcagactgctctcagaaacttccagcactggtgctatgcaagggagcagcaggagggacagcaagaagagcttctatctcgaaccttcaccactaacaattctcaatcacaatcctctgacaactattggagattattatctgtttaa

SEQ ID NO: 130590 - DNA, 499 bp, Homo sapiens
gcacgaggttccgaggaagccagacccggagccgtggcctgccgggccggcgacatggatcccctgttccagcaaacgcacaagcaggtccacgagatccagtcttgcatgggacgcctggagacggcagacaagcagtctgtgcacatagtagaaaacgaaatccaagcaagcatagaccagatattcagccgtctagaacgtctggagattttgtccagcaaggagccccctaacaaaaggcaaaatgccaaacttcgggttgaccagttaaagtatgatgtccagcacctgcagactgcgctcagaaacttccagcatcggcgccatgcaagggagcagcaggagagacagcgagaagagcttctgtctcgaaccttcaccactaacgtaagccaggcccgtggtgagggtcggcctgcacttgacagatcgtgggggctggagttcagatctctgagcgccatctgttttgggggtgtctgaagaagactgatga

SEQ ID NO: 130591 - DNA, 681 bp, Homo sapiens
ctatggctggagtgactgggatgcagttctgagactgcttacagcaagggcaccctggatgtagaccaggaagccatttttgttcctagtctgggcctgtgatgggaggagctgctttgaagacctctgatgtgccctggaaacatatttcttattttcttggtgattaacatttggcttctcatcacttatgcaaatttctgcagccagcttgaatttcccctcaaaaaatgggtttttctttcctattgcattgtcagactgcaaattttctgaactttcatgctctgtcacctcttgactgttttgctgcttggaaatttcttctgccagataccctaaatcatctctctcaagttcaaagttccacagatctctacagcaggggcaaaatgccagcagtctctttgctaaagcataacaagagtcacctttgctccacttcccaacaagttcctcatctgcgtctaagaccacctcagtctggactttattgtccatatcaggtgacagcaggggtacactcccttccaaggctccgggagagaatctttccttgcctcttccagcttctggtggcttctggtcttccttggcttgcagcagcctgacttcaggctctaactccctcttcacacagccttctctcctatctgtgttctcttctcttctgccatccat

SEQ ID NO: 130592 - DNA, 634 bp, Homo sapiens
caaatgcccccggtaattctatacctcttttcccaaccaggcttctttgaccggttccaacctttggtcttccggcccggcacaccggggcagaaaaacggcggaaaaacagcggcggggaacagttgagtaaaaacaacctgtacattcgaggcctcccaccaggcggcactgatcaggacctaatcaagctgtgccaaccgtatggaaaaattgtatctaacaagggcatttcttgacaaaaccacaatccggtgcaagggttatggttttgtagattttgacagtcctgcagccgcacagaaagcggtagcatctctcaaggcaaatggcgtgcaggcacagatggctaagcttcaagagcgggacccagctgtgactaagcgtctcaagtctgttacttttctatgtatgagcaggagcttgagaatatgctgaaaccctttggacatgtcatttccacaagaatactaagagacgctaatggagtcagcagaggtgttggctttgccagaatggagtctactgaaaaatgtgaagtggtaattcaacattttaatggaaaatatctgaaaacaccaccaggcatcccagcccccagtgagcctttgctgtgcaaaatcgctgatggagg

SEQ ID NO: 130593 - DNA, 762 bp, Homo sapiens
atggacaataaagtccagactgaggtggtcttagacgcagatgaggaacttgttgggaagtggagcaaaggtgactcttgttatgctttagcaaagagactgctggcattttgcccctgctgtagagatctgtggaactttgaacttgagagagatgatttagggtatctggcagaagaaatttccaagcagcaaaacagtcaagaggtgacagagcatgaaagttcagaaaataagcagtctgacaatgcaataggaaagaaaaacccattttttgaggggaaattcaagctggctgcagaaatttgcataagtgatgagaagccaaatgttaatcaccaagaaaataagaaatatgtttccagggcacatcagaggcctggaggcataggagggaaaaaatggtttcctgagctgggcccagggctcccctgctctgtgcagcctagggatatggtaccctgcatcccaagtgcttcagctccagctttggctaaaagggtccaaggttatggttttgtagattttgacagtcctgcagccgcacagaaagcggtagcatctctcaaggcaaatggcgtgcaggcacagatggctaaggtgactcagcgcaaagacagagattccatttgtttgggagaaagtaaaggaaaaggagaagagtctctgcctggtaatccagagaattcttccagatcttacccaagaccaccaaggtggtacctctatgagtctgcaaaaaccacagaaatattgggctga

SEQ ID NO: 130594 - DNA, 352 bp, Homo sapiens
ttagagtacttcttggggaagccgtctcttgggagattgacgctggacaagcaagaaggagccagaaatgtgaagagctctccgggccgtgacagctccacctgccaccgctgcccgggtcgccgcccccgcactcaccacccagctggctcccgtgcgagcagcggatcgagctcggagagcggcgccggaatcccgcacgcgcggtagcggaacacgaggggctgtttcttccttcctccccggcactctgggagtcctgagattgccttgctcggttcgtctcagacttgctagatctgagcagctgctgctcctccaccaagggtgctcacattctccaggaaactcc

SEQ ID NO: 130595 - DNA, 747 bp, Homo sapiens
ggatcagcagtatacttgtgttataaaaaatcggtggcaaagacgaacactgtatcttacaaagctggcctaatttgtagatatcctcaagaagattatgagtcattctcactaccggaatctgttcctctattttgtttaccaatgggtgcaaccattgaatgttggccatcaaatagcaaataccctctgcctgtattttctacttttgttttaactggagcctcagctgaaaaggtttatggtgctgctattcagttttatgaaccatactctgaggagaatctcacagaaaagcagagacttcttttgggtttaacatcagcagatgggaagtctgatagttccaaaacaattcatactaacaaatgcatctgtcttctttctcactggcctttttttgatggcattcaggaagtttctgacttttctgtatcgttaattccatctctggggctcatgtccttccaattgagaagcatatttctcattttatgcataaagttccttttccatctcctcagagaccacggattttagttcagttatcaccacatgataatctgattctcagtcagcctgtgtcttcacctcttccactaagtggtggcaagttttcaacactactgcagaatttaggccctgaaaatgctgtgacactactggtgtttgcagtaacagaacataaaattcttatccattccctacggccatccgtgcttactagtgtgacagaagcattagtgg

SEQ ID NO: 130596 - DNA, 972 bp, Homo sapiens
gcggccgcggagtggagggggagtcccgtctgacgtgagacggcaggcctgggcgggcgggcgggggtgccgcgaagggcggatcgtccgggcatggggatgagctaagcgggctcagagcgccgcgcgcattcagcccctcggggttccgctaccgcgcgtgcggagttccggcgccgctctccgagctcgatccgcttctcgcacgggagccagctgggtgttatttctcaaactctgaggctgcggagttcacacattgaaatctgtcatctttttcagagagaaactttcggtaatgtatgtaaccttctgtaatggaagatgattgaagacaaggggcctcgtgttgctgactactttgttgtagcaggattaactgatgtttcaaagcctctagaagaagaaattcacttcaatgatgcttgtcataaagtagctaaaccaaaagaacctattacagatgtttcagttattatcaaatctcttggggaggaagtcccacaggattatatctgtattgatgttaccccaactggattgtcagctgatcttaataatggaagtcttgtggggccacagatttacctttgctatagaagaggaagagataagcctccacttacagatctgggtggggatcagcagtatacttgtgttataaaaaatcggtggcaaagacgaacactgtatcttacaaagctggtttatggtgctgctattcagttttatgaaccatactctgaggagaatctcacagaaaagcagagacttcttttgggtttaacatcagcagatgggaagtctgatagttccaaaacaattcatactaacaaatgcatctgtcttctttctcactggcctttttttgatgcattcaggaagtttctgacttttctgtatcgttattccatctctgggcctcatgtccttccaattgagaagtattttcaggatagttacaaatgttag

SEQ ID NO: 130597 - DNA, 368 bp, Homo sapiens
ggcacgagatggaaaggactagacattgtatgtatgagactgttctcccccttttcaacttagaagaatgagaggtctgggttctgacctgtgctaaatctgtgtggcccaataaagagcacttgcttgaaattcagacatgggtctgaatctaggctctgccttgactggatgaccttgggtagctattgaattctgctgctttggcttcttccagataataatagtattttcttgtctcctggggtggctgtaagtagctcctcatcccaaccttccttcttctcctgcagaatatatggatttcagagaggcacaagaaggaactgatgtcatttattgaaaagcttcataataacctaattctg

SEQ ID NO: 130598 - DNA, 1089 bp, Homo sapiens
atggacgatatcccgcaagaggcccggcagtaccggcataaccaagcctatgcctacagcatccagggtgacggtgccgaggatgacgatgagcgcatttgggaccgtggtccagaccgatatcagaccgacacaccagtggatcggggtcccgactattatcagacgacgatcgattgggaccggggccagacttatatcgacggacacccagtgggaccggggttcgacttttatcgaccccattcaatgaaccggttaggttgcaacccgcttcgacttaaagatcccctgctttcttcttggggaaaagacgatgtcacttatgcaataaagcccacttgctggccggggcttgacattattccttcctgtctggctctgcaccgtattgaaactgagttaatgggcaaatttgatgaaggtaaactgcccaccgatccacacctgatgctccgactggccattgaaactgttgctcatgactatgatgtcatagttattgacagcgcgcctaacctgggtatcggcacgattaatgtcgtatgtgctgctgatgtgctgattgttcccacgcctgctgagttgtttgactacacctccgcactgcagtttttcgatatgcttcgtgatctgctcaagaacgttgatcttaaagggttcgagcctgatgtacgtattttgcttaccaaatacagcaatagtaatggctctcagtccccgtggatggaggagcaaattcgggatgcctggggaagcatggttctaaaaaatgttgtacgtgaaacggatgaagttggtaaagcctcccggcgccgcggcagctctgggcagggagcgccgccgccgccgccgccgccgccgcttcctcgtctgcagccgttcggccgctgcgtgacgcgtcgtttcctcccaacatggcggccggggcaggtcggcggtgatgggggccagttcgcggccgcggcggggaagaagacgaagaacatgttcctgacccgggctctggagaagatattgggcgacaaggaagtgaagaaggcgcatcactcccagctgcgcaaagcttgcaaggtggcgttagggtga

SEQ ID NO: 130599 - DNA, 762 bp, Homo sapiens
  misc_feature (1)...(762): n = a,t,c or g
atgcggctggggcggatcctcccgcgccgccctcggccccaagcctccgggggccgcggcagctatgggcagggagcgccgccgccgccgccgccgccgcggattcatggtctgcagccgttcggccgatgcgtgacgcgtcgtttcctcccaacatggcggccggggcagatcaacgtccaaaccaatagtggagtagcgagggcatttacctttaataccaatactacggtctctgctgtatccacggaattgcctaaatcagcatgtggtacaattaaagtgtttccagggctgttcgctgctcctatcgggttctgcctactcatccaacataatgaacagttactgaacaatgcatttgtaagtaagtgtgctgtatttgttacacccaagacagctctagctgtgttcaagcccagctggatgctagaactgcgagccactgtgaccttgccgtgtgaggnatatcacaggatctacaaggctagatggaatgccatggctttacttactgcagtaacatcacaacacatagaaattcatgaagggactgtactgcaagctgtgagaacatgttacaatatctacttagcaagcaaaaatctcatcaatcagacaacagccaaagctactctcactcagatgctaaatgttatctttgcacgcatggaaaaccaagcaaatatatggatttcagagaggcacaagaaggaactgatgtcatttattgaaaagcttcataataacctaattctgtga

SEQ ID NO: 130600 - DNA, 599 bp, Homo sapiens
cagctaagtaccttcttccagaggtgacggggcttgactatggaaagaaatgtgtggtcattgatttagatgaaacattggtgcacagttcgtttaggcctattagtaatgctgattttattgttccggttgaaatcgatggaactatacatcaggggctggctttgacctacagcctccgggacagggaacgtggtggtggtcgtgcacagaatggtgtggtggatgatgaggccaaagccccggacctcatgcagatcatggaggctgtgctgggccgcagggtgggcagcctgcgtgccgccacgcccagcaaggatatcaaccagctgcagaaggccaatgttcgcctgtaccaggcagaagttatggcctgtgccttcagtctcccccagtgccgggcccttgccaccccttctaaggcagacttccccaagcgactcacgggggaggatgacatagcaagggttcctcaaaaaagttcccccagccctgacacaggagatttatcgtgcaagcatccaggttactccacaactcggccacaagccctcaatgcactccttatccataagctcaacagaatgttcgtcagctga

SEQ ID NO: 130601 - DNA, 846 bp, Homo sapiens
atggaagggcatagggacaaaaacacacaaacaaaaactttcaccgatatcattggaaccacagcaaaaacaaatacaaagcacctaccgtatgcaggaaacctgctgggccctggggtacctgctccagctaatttccatgacaacccgaaagaccaggacacagatgaggagactgaaggtcaaagaggtgagatcctgtggcaggtggcagaactagggctgaacaaggtttgcttgctccaaagcccaggttgtggggtggagagcaagggccacggaaggcctgtgccctcctcagagaagagtcccgctgctacctgccctctgcagcccacctggaagcagcctctccccagccgcagcaaggccagcagggccagcacggggccatctgagtcctcaggagagggctaccagcagggacttgtgggcctcatccaggtggccaccagggtgttggccaccagaaggtgcgatacgtcctccacatccaactcattggcagtgtggccagctggtgcacgccgtggggcttccctgtggggagagtgcctcaggatgggctggccccttccccacaccgcctcacctacccagctgattgggccacagcctccatgcagtgacacagtccagtgtgcccagaacacagtccggccagcacctgcagcagcccgaagctgcacagttacacacagctgtctgggtgtggcgccccctgttccaccacctcttggaagtcttcctggatgcaccaggaatttcctgctggccagcaacgtcctcggcctttgggtgcacctagatgaagtcctggagggtgctggccacatcaggaggtag

SEQ ID NO: 130602 - DNA, 1816 bp, Homo sapiens
ctttttctggagttacttgtacaagtgtcattgatatagggtaaagccgggtctatatggtggagtgttactgcagtaatgtatgaaaatatgaaagcagcagatgtccaaattacaagggctgaaggaaggaaactgagggccttgctgaaaccaccacatttctaacaggttttctgttttacaacttcacaaaatgttagtcttcagacctgctcatacctgcaccttttgtaaatccagaggaattaattagaccgctgattttctccggaagcgcgaagcactaggccgtttgaggatctccgctccgctttgcctgggaccaggaaaagacgcgagacacggaactcggcatcaggcacttaccaaaccgactcagcgctggccgctggcgccgaagcccctatgctaaaaggagacagggctgggccacggggcgcgctcccgagcagaccggccggccccggggcgcgctcacggcaccgaggagcgcgcctgcggcgctgctcgttcaaaccttgttcccctttacggcaatcgcgaaagtgtcgtgaaacgtgctgccgccgatcagtcacccagtcggctggagtcggaggcgatatttctaggggtgtacttgttggggtcagggatgtatgacaggggtgtggctcatctgctcaactgccttgcactcaaaccccttatgagagggggagcacgcagatggcaggtgcaggaaccagggcgagcacttatgggctctgtccccatggcaacatctagggtgctggatactaaatgtggtacttactttcaacagactcaagaactggttttaattgaaaccataaccctacaaacaccagattttgagatcagcattgaacatccacaatcagatgtggtaaaacataccaagttaggtgcagcccttgtagctcctgtcaccacagggttggagttgagtgcctttagcttttccaggctcaggatgcaagctgccggtgctggatcattctcaggtctaaagggcagtgatcctcttcccacagcttcactaggcagtgccctgaaaacaaccctttttgctgcacatggttatgtgcttcacatgatcactactgcagcagaatggtctatgtcattttccttctttggttttttcctgacttacattcgtgattttcaggtgtgccaagtgtcatggccacctccagataacactatgtgttcaaaacatcatggccccctgcgtttgcatattaaaaggctaagatttcagaagatgtatgggaatgcctggatgcccaggcagaagtttgctgtaggggtggggtcctcatggagaacctctgctagagcaatgcagaagggaaatgtggggtgggaaatcccacacagagtccctactggggcaccacctagtggagctgtgagaagagggccaccatcctccagaccccagaatggcagatccactgacagcttgcactgtgtgcctggaaaagctgcagacactcaacaccagcccatgaaggcagcagggagggaggctgtaccctgcaaagccacagggctggagctgcccaagactatggaaacctacctcttgcatcagtgtgacctggatgtgagacatggagtcaaaggagatcattttggagctttaagatttgactgccctgctggatttcaaacttgcatggggcctgtagtccctttgttttggccaatttctcccatttggaatggctgtatctacccaatacctgtatccccattgtatctaaaaagcaagcaacttgcttttgattttacaggctcatag

SEQ ID NO: 130603 - DNA, 867 bp, Homo sapiens
ccccaaattagccatttttctggaagcctactggtacccaatgtccactgaatatagggtaaaaccggggtctatagggtggagtgttactgcagtaatgtatgaaaatatgaaagcaagcagatgtcccaaatttacaagggctgaaggaaggaaactgaggcccttgcctgaaaacccacccacattcctaacaggttttcctgttttacaacttccacaaaatgttagtcttcagacctgactcatacctgcacctttttgtaaatcaacaggaacgtgtactcaacaaggaacgtgtactcaattagcttttgtgggaaagggttgaagattcttggtaacttgcttcaacaaaccagaggaattaattagaccgctgattttcctccggaacgcgcgaagcactaggccgtttgaggatctccgctccgctttgcctgggaccaggaaaagacccgagagacggaactcggcatcacggcactgcttaccagaccgactagcgctggccgctggcgccgaagcccctatgctaaaaggagacagggctgggccacggggcgcgctcccgagcagaccggccggccccggggcgcgctcacggcaccgaggagcgcgcctgcggcgctgctcgttcaaaccttgttcccctttacggcaatcgcgaaagtgtcgtgaacgtgctggctgagttctttctgaaaagtatatttcagtgttgtaaatccagttattcagtggcagtaatgatggctttgaggacaaattcatagggagggatattctgcatcttttttcaaaataaccttggaatgtggaaaatacagttgtccctccatatctgtgaggaattggttccacaat

SEQ ID NO: 130604 - DNA, 1419 bp, Homo sapiens
ccatctgctgcgtgcatagagccgggtgtgaatgcggagtcgtccgacggtggcctgggcggcagccacggctcttccagtgcctccaaactctcttggactgggcatttcacagctggaacccctgtccctgaccagtctccatctatgctggcggcttccactgttggtaattatgaaaccccacccccagctgtggctgcaggtactgacagcagcacccaggcacccaacaaggctgacaagcagaatctgctgatgcccaccagaggtcaggcagacatgccacagacgctgagtgcctccgacatggtcaccccaggcagcctcagcccaccccccaccgagcccacagatggcgaacaggctgggcagcccctcctggatggagcgccatcctcagcctccctggaaacactgatccagcacctggtgcccacagccgactactaccccgagaaagcctacatcttcaccttcctgctgagctctcgcctcttcatcgagccccgggagctcctggcccgggtctgccacctgtgcatcgagcagcagcagctggacaagccggtgctggacaaggcccgggtccggaagttcggccccaaactgctgcagctgttggccgagtggaccgagaccttcccaagggacttccaggaggagtcgactatcgggcaccttaaggacgtcgtgggccgcatcgccccctgtgacgaggcataccggaagaggatgcatcagctcctacaggctctgcaccagaagctggcggctctgcgccaggggccagaaggtctggtgggtgccgacaagcccatctcctacaggaccaagccaccagcctccatccacagggagctccttggtgtctgcagcgacccctacacactggcccagcagctgacccacgtggaactggagcggctgcggcacatcgggcctgaggagtttgtccaggcctttgtgaacaaggaccctctggccagcacaaagctcgggggcgcaccacgacaaccgagtcccgagtccccggaaagcctggacgtgcgggacgtgggggtcacccacccagcgagggaggaggagtgggccaggaaccaggccgtgggccgcgctgctcgggtgactgatgggcgctaccgtcagccactccagtcctggaaagttagggcattttacgggagtacgtcacaggagatccatctccctacagggctccggagcctgaccgaccttctccgaggattccgagccagccctctctccccagcccacgtgcagtggcggtggccagggcggtggagcgtgctgagtgacctgctgcagctcagagctgcggcttctcctggcttctccacctgcctttcttgtgcttcaggtctgctgaaggttgacaggaaaatcgggaaatggctg

SEQ ID NO: 130605 - DNA, 3127 bp, Homo sapiens
cccttgtggaggcgacgggggcgccgggcgggccaaaaagtgctacgtgcgcggagccctccggcccggcctccagggacttcgcagccagaggaacctggatctctcccgagtccccctcacagctctggcagctccggaacctgcaccccggttgcccagccccaggacgcgcctgctgcccgcagggggcggtgaaagggggaaatcggcctgcccctacggaaatcccgtttctttatacacccggtcctggctgggcggtgtcttccccgtggaagagagggtccgggaggtccgtggggcggaacagtccgagggcttcgggagtcagcccgggtggatttgtttcgtggctctcgttgctggctgggacggccgtgtgcccgtgttgttccggagatcgaggccaacggatgccgtactctgtcctcgccgggtgctcagtgaggacccacagctgggcagggaccctgggaggcccctgagcaagacttggagggacgcccttgtgccccctgagcacgtggggaaggcgctgtcctgggccctgcaccgctctgtgtgttcattgcacgagtgtggaagcctcagagacgctgcatggtgttcccggggcatcctggccaaggtgggagaacgcagcctccgtgaggacccgcgggatgccctcgggggccgcctcctggttctcgtctcctctgaagtgcagacgacgctggcccacatccttgtcgggcagaggggctgccgactggcccctggccatggctcttgctgggagccgtgtggcctgggcttggacccacatccacctcttgctggctgcctgctcttgccagtggctgagcctggcttctcccatgacagtggccgcagacagaggggacccgtgccaccaggcaaggatgtgatcattggcagggatgagattgacggggacggtgtctgggggcgaggtgagagttctgccaaagccggagccagggttggacccccggagctcgttggtcggcccctggagggagagtgctggtactttagcggggtcagtcggacccaggcacagcagctgctcctctccccacccaacgaaccaggggccttcctcatccggcccagcgagagcagcctcgggggctactcactgtcagtccgggcccaggccaaggtctgccactaccgggtctccatggcagctgatggcagcctctacctgcagaagggacggctctttcccggcctggaggagctgctcacctactacaaggccaactggaagctgatccagaaccccctgctgcagccctgcatgccccagaaggccccgaggcaggacgtgtgggagcggccacactccgaattcgcccttgggaggaagctgggtgaaggctactttggggaggtgtgggaaggcctgtggctgggctccctgcccgtggcgatcaaggtcatcaagtcagccaacatgaagctcactgacctcgccaaggagatccagacactgaagggcctgcggcacgagcggctcatccggctgcacgcagtgtgctcgggcggggagcctgtgtacatcgtcacggaactcatgcgcaaggggaacctgcaggccttcctgggcacccccgagggccgggccctgcgtctgccgccactcctgggctttgcctgccaggtggctgagggcatgagctacctggaggagcagcgcgttgtgcaccgggacttggccgcccggaacgtgctcgtggacgacggcctggcctgcaaggtggctgacttcggcctggcccggctgctcaaggacgacatctactccccgagcagcagctccaagatcccggtcaagtggacagcgcctgaggcggccaattatcgtgtcttctcccagaagtcagacgtctggtccttcggcgtcctgctgcacgaggttttcacctatggccagtgtccctatgaagggatgaccaaccacgagacgctgcagcagatcatgcgagggtggttctttggctgcatctcccgctcggaagctgtgcgtcggctgcaggccgagggcaacgccacgggcgccttcctgatcagggtcagcgagaagccgagtgccgactacgtcctgtcggtgcgggacacgcaggctgtgcggcactacaagatctggcggcgtgccgggggccggctgcacctgaacgaggcggtgtccttcctcagcctgcccgagcttgtgaactaccacagggcccagagcctgtcccacggcctgcggctggccgcgccctgccggaagcacgagcctgagcccctgccccattgggatgactgggagaggccgagggaggagttcacgctctgcaggaagctggggtccggctactttggggaggtcttcgaggggctctggaaagaccgggtccaggtggccattaaggtgatttctcgagacaacctcctgcaccagcagatgctgcagtcggagatccaggccatgaagaagctgcggcacaaacacatcctggcgctgtacgccgtggtgtccgtgggggaccccgtgtacatcatcacggagctcatggccaagggcagcctgctggagctgctccgcgactctgatgagaaagtcctgcccgtttcggagctgctggacatcgcctggcaggtggctgagggcatgtgttacctggagtcgcagaattacatccaccgggacctggccgccaggaacatcctcgtcggggaaaacaccctctgcaaagttggggacttcgggttagccaggcttatcaaggaggacgtctacctctcccatgaccacaatatcccctacaagtggacggcccctgaagcgctctcccgaggccattactccaccaaatccgacgtctggtcctttgggattctcctgcatgagatgttcagcaggggtcaggtgccctacccaggcatgtccaaccatgaggccttcctgagggtggacgccggctaccgcatgccctgccctctggagtgcccgcccagcgtgcacaagctgatgctgacatgctggtgcagggaccccgagcagagaccctgcttcaaggccctgcgggagaggctctccagcttcaccagctacgagaacccgacctga

SEQ ID NO: 130606 - DNA, 993 bp, Homo sapiens
atggaagactctaaggccattaaaaatgagcacacggccaacacgctcacacgggctgagtgtgacaccacgggacagagttccacgtacacacagcacacggccaacaacacgctcacacgggctgagtgtgagaccacgggacagagttccacgtacacacagcacacggccaacaacacgctcacacgggctgagtgtgagaccacgggagagagttccacgtcctcctcacccagcgtccctgccagtgggttccatggccccccagtgccagcctgccgtctgctgccctctgccgtctgccatcacctgaaccctgcaggaaaacgtacacactgtccccagcgtcacgaagcagaccctatcacctcctccactcaaggtgtgagcttttggctgagacacccgccggttcacagcagccccattcccagcagccccagactgaaaacagctccaatgcgtatcaccaggcggctgaataaacaaaccgtggaacgtctgtacgacacaacactactcagacaaaaccaaaaccgaacacgtccgacccacacagaagcatggaggaatctcagaaacagttcagtgaaagaggccaaacacagacgagtattaaatgtgcggttccgtttctatgaagctcaggaacagacgaattctaaaaaccagaaggccccgaggcaggacgtgtgggagcggccacactccgaattcgcccttgggaggaagctgggtgaaggctactttggggaggtgtgggaaggcctgtggctgggctccctgcccgtggcgatcaaggtcatcaagtcagccaacatgaagctcactgacctcgccaaggagatccagacactgaagggcctgcggcacgagcggctcatccggctgcacgcagtgtgctcgggcggggagcctgtgtacatcgtcacggaactcatgcgcaaggggaacctgcaggccttcctgggcaccttctataaagtgtga

SEQ ID NO: 130607 - DNA, 2850 bp, Homo sapiens
atgacagcaagagagcacagccctcgccatggtgccagggcccgtgcaatgcagcgggcttccaccatcgacgtggcggccgacatgctgggcctctctctggcaggtgagcctcacagggcctgcaccgggctccagactacagggtaccctggtttggcatccttctggttgaaccaggaaatagggaagggggatgtcagccctcttcctgtgaaccgcttctgctggagcctgactacattagttttccagtttggtggcaggggcaccaccagggtagtgtgggaatgtccaagtgttttgctggcccatgcccaggccatgggaaccaacaatcctatatttctaagcagtattgccttctttcaagactctcttatcaatcagatgacacaagtcaaactctccgtgtatgatgtcaaagatagatctcagggaacagttaagtctgcagagagtgaccgtgtaggtaacatcaccgtgattggctggcagatggaggagaagtcagaccaacggccccctgtgacccggtctgtggacactgtcaatgggaggctacaccctcctgcacccactgtcatgcatagtctctcacacagacactcaaagaaaaattctaatttcagagccctagcgctgatggttcttcctgtcgatgagagcttgacggaggcgttaggaatccgatccaaatacgcttcattgcgaaaggacactttgctgaaatcggtgttcggtggtgccatctgccgcatgtaccggtttccaaccactgatggtaaccatttgcggatcctggagcagatggcagagagcgtgctctccctgcacgtgccccggcagttcgtgaagctcctactagaggaagatgcagccagagtgtgtgagctggaggagctgggagagctgtccccttgctgggagagcctccggcgccaaattgtcacccagtaccagaccatcatcctcacataccaggagaacctgaccgacctccatcagtacagagggccctcgtttaaagcaagcagtttgaaagcagataaaaagttagaatttgttcccacaaacttgcacatacaaaggatgagagttcaagacgatggaggatcagatcagaactacgacatcgtcaccattggggcgccagcagcacactgccaaggttttaagtcaggaggtctccgcaaaaagctgcacaaatttgaagagaccaagaaacaagtgactgttgctcagcagttaccagcagttcctggccagggccacaagactccacccttacgctctcatggcatcttcagtttagcccatgaccccagctctggtacatcatctggctgccagtccataatctacataccccaggatgttgtcagagccaaggagatcatcgcccagatcaacaccctgaaaacccaaacacggcagctggtcacggtctgcgactgcaagctcctggccaactccatccatgggctgaacgctgcacggcctgactacattgcctccaaggcctctcccacttcgactgaggaggagcaggtgatgcttagaaatgaccaggacaccctcatggcccggtggacagggagaaacagccgatcttccctgcaggtggactggcacgaggaggagtgggagaaagtgtggctgaacgtggacaagagcctagagtgcatcattcagcgtgtggacaagctgctgcagaaggagcggctgcatggcgagggctgtgaggatgtcttcccctgtgcaggcagctgcaccagcaagaaaggtgaatggagtgaggccctttacccgctgctgaccactctcaccgactgcgtggccatgatgagtgacaaggccaagaaggccatggtattcctgctcatgcaggacagcgcgcccaccatagccacctacctgagcctgcagtaccgccgtgacgtggtcttctgccagacgctgaccgccctcatctgcggcttcatcattaagctgaggaactgcctgcatgacgacggcttcctgcgccagctctacaccatcgggctgctggcccagttcgagagcctgctgagcacctacggggaggagctggcaatgctggaggacatgagccttgggatcatggacttgaggaacgtgaccttcaaagtcactcaggccacttccagcgcctccgcagacatgctgcccgtcatcacaggaaatcgcgacgggtttaacgtgcgggtccctctgccgggcccgctgtttgacgccttgccccgggagatccagagtggcatgctgctgcgagtgcagcccgtcctcttcaacgtgggcatcaatgagcagcagacactggccgagaggtttggcgatacgtctttacaagaagtcatcaacgtggagagtttggtgcggttaaattcctactttgagcagtttaaggaagttttgcctgaggattgcctgcctcggtctcgcagtcagacgtgcctgccagagctgctgcggtttctgggtcagaacgtgcatgcccggaagaataagaacgtcgacattctctggcaagctgctgagatctgccgccgccttaatggggtccggttcaccagctgcaagagcgctaaggaccgtacagccatgtcggtgacactggagcagtgcctgatcctgcaacacgagcatggcatggccccgcaggtcttcacccaggccctggagtgcatgcgcagtgagggttgtcgaagagaaaatacaatgaagaatgttggaagtcgcaaatatgcatttaattccctgcagctgaaggctttccccaagcattacaggcctcccgaagggacttacggaaaagttgaaacgtga

SEQ ID NO: 130608 - DNA, 327 bp, Homo sapiens
atgacagcaagagagcacagccctcgccatggtgccagggcccgtgcaatgcagcgggcttccaccatcgacgtggcggccgacatgctgggcctctctctggcaggtgagcctcacagggcctgcaccgggctccagactacagggtaccctggtttggcatccttctggttgaaccaggaaatagggaagggggatgtcagccctcttcctgtgaaccgcttctgctggagcctgactacattagttttccagtttggtggcaggggcaccaccagggtagtgtgggaatgtccaagtgttttgctggcccatgcccaggccatg

SEQ ID NO: 130609 - DNA, 3217 bp, Homo sapiens
cgaggaccagcacctgaggccgggccgcaggccgacttcacagccaggcgcgcgcgtcgctgctgctgctgcggggctctggcgcgccagccggcgggacagcgggggctggcgggggccggggagcgccagatgatggatttggacatgcttctatgaagaaatgccacatggtccgagagcaaacatgtccaggctactcactttagtgactagggctcggtgccagcacttcccgggtaatcagacgtggtctgaccgaggatcaagaagcacatcatcaccaatgacatcatgacagcaagagagcacagccctcgccatggtgccagggcccgtgcaatgcagcgggcttccaccatcgacgtggcggccgacatgctgggcctctctctggcaggaaatatacaagacccagatgagcccattttagaatttagcttagcttgcagtgagctgcatactccatcgctagatcgaaagccaaatagttttgttgcggtgagtgtcaccacccctcctcaggcattctggacgaagcatgcacagacggagatcattgagggaaccaacaatcctatatttctaagcagtattgccttctttcaagactctcttatcaatcagatgacacaagtcaaactctccgtgtatgatgtcaaagatagatctcagggaacaatgtatttactgggctctggaacgttcattgtcaaagatctgctccaggacaggcatcataggttgcatttaacactaaggtctgcagagagtgaccgtgtaggtaacatcaccgtgattggctggcagatggaggagaagtcagaccaacggccccctgtgacccggtctgtggacactgtcaatgggaggatggttcttcctgtcgatgagagcttgacggaggcgttaggaatccgatccaaatacgcttcattgcgaaaggacactttgctgaaatcggtgttcggtggtgccatctgccgcatgtaccggtttccaaccactgatggtaaccatttgcggatcctggagcagatggcagagagcgtgctctccctgcacgtgccccggcagttcgtgaagctcctactagaggaagatgcagccagagtgtgtgagctggaggagctgggagagctgtccccttgctgggagagcctccggcgccaaattgtcacccagtaccagaccatcatcctcacataccaggagaacctgaccgacctccatcagtacagagggccctcgtttaaagcaagcagtttgaaagcagataaaaagttagaatttgttcccacaaacttgcacatacaaaggatgagagttcaagacgatggaggatcagatcagaactacgacatcgtcaccattggggcgccagcagcacactgccaaggttttaagtcaggaggtctccgcaaaaagctgcacaaatttgaagagaccaagaaacattttgaggagtgttgtacatcatctggctgccagtccataatctacataccccaggatgttgtcagagccaaggagatcatcgcccagatcaacaccctgaaaacccaagtgagttactacgcagagcggctgtcaagggcagccaaggacaggtctgccactggccttgagaggacactcgccatcttggcagacaagacacggcagctggtcacggtctgcgactgcaagctcctggccaactccatccatgggctgaacgctgcacggcctgactacattgcctccaaggcctctcccacttcgactgaggaggagcaggtgatgcttagaaatgaccaggacaccctcatggcccggtggacagggagaaacagccgatcttccctgcaggtggactggcacgaggaggagtgggagaaagtgtggctgaacgtggacaagagcctagagtgcatcattcagcgtgtggacaagctgctgcagaaggagcggctgcatggcgagggctgtgaggatgtcttcccctgtgcaggcagctgcaccagcaagaaagattgcagtccccctcctgaagagtccagcccaggtgaatggagtgaggccctttacccgctgctgaccactctcaccgactgcgtggccatgatgagtgacaaggccaagaaggccatggtattcctgctcatgcaggacagcgcgcccaccatagccacctacctgagcctgcagtaccgccgtgacgtggtcttctgccagacgctgaccgccctcatctgcggcttcatcattaagctgaggaactgcctgcatgacgacggcttcctgcgccagctctacaccatcgggctgctggcccagttcgagagcctgctgagcacctacggggaggagctggcaatgctggaggacatgagccttgggatcatggacttgaggaacgtgaccttcaaagtcactcaggccacttccagcgcctccgcagacatgctgcccgtcatcacaggaaatcgcgacgggtttaacgtgcgggtccctctgccgggcccgctgtttgacgccttgccccgggagatccagagtggcatgctgctgcgagtgcagcccgtcctcttcaacgtgggcatcaatgagcagcagacactggccgagaggtttggcgatacgtctttacaagaagtcatcaacgtggagagtttggtgcggttaaattcctactttgagcagtttaaggaagttttgcctgaggattgcctgcctcggtctcgcagtcagacgtgcctgccagagctgctgcggtttctgggtcagaacgtgcatgcccggaagaataagaacgtcgacattctctggcaagctgctgagatctgccgccgccttaatggggtccggttcaccagctgcaagagcgctaaggaccgtacagccatgtcggtgacactggagcagtgcctgatcctgcaacacgagcatggcatggccccgcaggtcttcacccaggccctggagtgcatgcgcagtgagggttgtcgaagagaaaatacaatgaagaatgttggaagtcgcaaatatgcatttaattccctgcagctgaaggctttccccaagcattacaggcctcccgaagggacttacggaaaagttgaaacgtgaacacacggtttcctctaattagctgttacataataaatgtgggtacctctagtgtcatatatgaattcttcaggagactgaaggattggtttattttgtgttcttt

SEQ ID NO: 130610 - DNA, 3159 bp, Homo sapiens
cgaggaccagcacctgaggccgggccgcaggccgacttcacagccaggcgcgcgcgtcgctgctgctgctgcggggctctggcgcgccagccggcgggacagcgggggctggcgggggccggggagcgccagatgatggatttggacatgcttctatgaagaaatgccacatggtccgagagcaaacatgtccaggctactgccactttagtggactagggctcggtgccagcacttcccgggtaatcaggcgtggtctgaccgaggatcaagaagcacatcatcaccaatgacatcatgacagcaagagagcacagccctcgccatggtgccagggcccgtgcaatgcagcgggcttccaccatcgacgtggcggccgacatgctgggcctctctctggcaggaaatatacaagacccagatgagcccattttagaatttagcttagcttgcagtgagctgcatactccatcgctagatcgaaagccaaatagttttgttgcggtgagtgtcaccacccctcctcaggcattctggacgaagcatgcacagacggagatcattgagggaaccaacaatcctatatttctaagcagtattgccttctttcaagactctcttatcaatcagatgacacaagtcaaactctccgtgtatgatgtcaaagatagatctcagggaacaatgtatttactgggctctggaacgttcattgtcaaagatctgctccaggacaggcatcataggttgcatttaacactaaggtctgcagagagtgaccgtgtaggtaacatcaccgtgattggctggcagatggaggagaagtcagaccaacggccccctgtgacccggtctgtggacactgtcaatgggaggatggttcttcctgtcgatgagagcttgacggaggcgttaggaatccgatccaaatacgcttcattgcgaaaggacactttgctgaaatcggtgttcggtggtgccatctgccgcatgtaccggtttccaaccactgatggtaaccatttgcggatcctggagcagatggcagagagcgtgctctccctgcacgtgccccggcagttcgtgaagctcctactagaggaagatgcagccagagtgtgtgagctggaggagctgggagagctgtccccttgctgggagagcctccggcgccaaattgtcacccagtaccagaccatcatcctcacataccaggagaacctgaccgacctccatcagtacagagggccctcgtttaaagcaagcagtttgaaagcagataaaaagttagaatttgttcccacaaacttgcacatacaaaggatgagagttcaagacgatggaggatcagatcagaactacgacatcgtcaccattggggcgccagcagcacactgccaaggttttaagtcaggaggtctccgcaaaaagctgcacaaatttgaagagaccaagaaacattttgaggagtgttgtacatcatctggctgccagtccataatctacataccccaggatgttgtcagagccaaggagatcatcgcccagatcaacaccctgaaaacccaagtgagttactacgcagagcggctgtcaagggcagccaaggacaggtctgccactggccttgagaggacactcgccatcttggcagacaagacacggcagctggtcacggtctgcgactgcaagctcctggccaactccatccatgggctgaacgctgcacggcctgactacattgcctccaaggcctctcccacttcgactgaggaggagcaggtgatgcttagaaatgaccaggacaccctcatggcccggtggacagggagaaacagccgatcttccctgcaggtggactggcacgaggaggagtgggagaaagtgtggctgaacgtggacaagagcctagagtgcatcattcagcgtgtggacaagctgctgcagaaggagcggctgcatggcgagggctgtgaggatgtcttcccctgtgcaggcagctgcaccagcaagaaagattgcagtccccctcctgaagagtccagcccaggtgaatggagtgaggccctttacccgctgctgaccactctcaccgactgcgtggccatgatgagtgacaaggccaagaaggccatggtattcctgctcatgcaggacagcgcgcccaccatagccacctacctgagcctgcagtaccgccgtgacgtggtcttctgccagacgctgaccgccctcatctgcggcttcatcattaagctgaggaactgcctgcatgacgacggcttcctgcgccagctctacaccatcgggctgctggcccagttcgagagcctgctgagcacctacggggaggagctggcaatgctggaggacatgagccttgggatcatggacttgaggaacgtgaccttcaaagtcactcaggccacttccagcgcctccgcagacatgctgcccgtcatcacaggaaatcgcgacgggtttaacgtgcgggtccctctgccgggcccgctgtttgacgccttgccccgggagatccagagtggcatgctgctgcgagtgcagcccgtcctcttcaacgtgggcatcaatgagcagcagacactggccgagaggtttggcgatacgtctttacaagaagtcatcaacgtggagagtttggtgcggttaaattcctactttgagcagtttaaggaagttttgcctgaggattgcctgcctcggtctcgcagtcagacgtgcctgccagagctgctgcggtttctgggtcagaacgtgcatgcccggaagaataagaacgtcgacattctctggcaagctgctgagatctgccgccgccttaatggggtccggttcaccagctgcaagagcgctaaggaccgtacagccatgtcggtgacactggagcagtgcctgatcctgcaacacgagcatggcatggccccgcaggtcttcacccaggccctggagtgcatgcgcagcattggaacacgggaggtagtcacccagaaaaacttgagcggcctggtgcccatccgagacttaaggctagaccccagcctcctctgttccatccctttattagctctgagccccaatttactgattgtgtggctctttctgagcatagcatacctggtgaccaaattgcgttgcaaa

SEQ ID NO: 130611 - DNA, 1401 bp, Homo sapiens
atgacccagagaaaggaagatttaagaaaaagcctagacgttgttcatggagaagaagagagtcagcaaatggcaaaagtcacacaggcctgcatgtgcagacatgaatcagttttccacatccctggtgccatgctgcgtgctcgctgtgtgcctcttctgacggtttcactggcccacaaggagttttgtgttccattgtccatttgtatgctggccttttgtcaggctgtgctgcagattcttcaaccagtgctctctggttgcctgttagcttctttccagcctgtgcttcacactaatacgcgaggtgatgcaaagttaccaactgggagcacacctgccccttctcattcactcacgcagcaggtagttttcaggcacaaaggaattgacttgtggagctggccctggggtctgtctgtaggagagcaggaagtagtagccacctgcggagggctcacaggcatgtgcctgcgagactgcttacaagcccctgtgcgggatttagggcagaccagagccatgagcgtccatggtcaagtgaaggggcagagttctcagttcccatgtcagaactcggcaccagcttctctgttgacagttgcaaggcctgtggctgagagaagtacttgtgctgtgtttctgcaagatgatggatttggacatgcttctatgaagaaatgccacatggtccgagagcaaacatgtccagttctaagagacttgccaacagaagagcataataaagagaacaagaaaatctcgaaagccatattttataattatatgaaaaccatcattcactgtggcatatctctgctgaagaggacaggacatcctcaagggatcccatggacaccctgtgttggggagtggggaggaagaagtgaccagaaggggcagggagcagtggacagtccaccccggttcctcacatgctggggaaccctgtcactgtacctcgcccccgcaagagagcacagccctcgccatggtgccagggcccgtgcaatgcagcgggcttccaccatcgacgtggcggccgacatgctgggcctctctctggcaggtgagcctcacagggcctgcaccgggctccaggcttgcacagccactgcaaatgaggagaaaatcatgggacagtcacactcagacaccgacaccacttctgctcacctcatcagcctaacttcaacggtggctgggggagataatgggtgggaagatgtgcacagctcagcccaacccttcccttatgctggaaaaccactccaggcactggcaaaaatgttcttggaattctcttccctgattattagcctgtctttgtatacaacagtcacacgcacaagatttctctcctctgattcagttaggaaagatatggactgtgcttaa

SEQ ID NO: 130612 - DNA, 393 bp, Homo sapiens
agagcctttcatcctcaaactggattgcctcttctttcaagccctgttcctcaaagaaaaacacaatcaggttgctttgatctggattcttcattactacatctgaaaagcttctcatctagaaggaatctgtcttgaactatcgtttcgatcctctcggcattgttgatggttttactgccgaggtaggggcaagtggtgctttctgccccacacatttgactcttccagttgaagtgtcattctacagtgtttcagatgacaatgctccctctccttatatgggtgtgattactttagagtcccttggtaaaaggggttatcgagtacctccttcaggaacaatacaagtgaccttatttaatcctaataagactgtggtgaagatgtttg

SEQ ID NO: 130613 - DNA, 459 bp, Homo sapiens
ctggtagttactgggtaacaagactgtgctggagggcaatgaaagctttctgttcgaccttttacagaacattcaggtgttcgtccttctgttatcagcaaggccaaagagaccaagaactcctctgcatcatattcaaaatattcatccagagtatctcggtcaggcttcattttcacatgcaattttcgcccagagtgctgtgaaatgcacctgtgggttctttcaacaggctcgccgatgattatacggcttctgcttcgctttcaaaatgcccttcgtacaaaaacgcctgtggaaacagaggcacctccgcagggttggtatggaaattcttccacctggtgcctgggcgcagccaactcttccagtcgcctgcgcctcccgagccctccggccgcgccgtcgggcctcacctgagtaaataccctctggctagccttcctgcggcaaccgcga

SEQ ID NO: 130614 - DNA, 531 bp, Homo sapiens
cgaaaacataattttcattccttggatggaacttcaaccagagcctttcatcctcaaactggattgcctcttctttcaagccctgttcctcaaagaaaaacacaatcaggttgctttgatctggattcttcattactacatctgaaaagcttctcatctagaagtcctcgaccatgtttaaacattgaagatgatccagatattcatgaaaaaccatttttgagttctagtgctccacctataacaagtcttagtctcctaggaaattttgaggaatctgtcttgaactatcgtttcgatcctctcggcattgttgatggttttactgccgaggtaggggcaagtggtgctttctgccccacacatttgactcttccagttgaagtgtcattctacagtgtttcagatgacaatgctccctctccttatatgggtgtgattactttagagtcccttggtaaaaggggttatcggagtacctccttcaggaacaatacaagtggtatgtgttttatagcctacaattgcaat

SEQ ID NO: 130615 - DNA, 2775 bp, Homo sapiens
  misc_feature (1)...(2775): n = a,t,c or g
atggcttctgtaaattctggggaagagaacaaaaacaggtggggaattttaagaagctgctacactccagaaccagaagagcatgcaaaagcagtcagtctgatcatagctcctagacaacctggtgcaagcacaatcctcattgaggtcttagatactctggatgaatattttgaatatgatgcagaggagttcttggtctctttggccttgctgataacagaaggacgaacacctgaatgttctgtaaaaggtcgaacagaaagctttcattgccctccagcacagtcttgttacccagtaactaccaaacatgaatgtagtgacaagctggcccagcactttgtgaggccaaggaatggtgaccgatttattgaagagaagacgcttctgttggctgtccgctcatttgtgtttttttctcagttaagtgcatggctgagtgtttctcatggtgctattccacgaaatattctctacagaatcagtgctgctgatgtagacctacagtggaatttttcacagactccaattgagcatgtgtttcctgttcccaatgtttctcacaatgttgccttgaaagtcagtgttcagtccttgcccagacaatctaattatccagttttgacgtgcagtattcacactaatattggcctttatgagaaaagaattcaacaacataaacttaaaactcatcagcaccataacccaaatgaagcagaacaatgtggtacaaacagttcacagcgtctgtgtagcaaacaaacttggaccatggcacctgaaagtgtgttacatgcaaaaagtggcccaagtccagaatatactgcagctgtcaaaaatatcaaactatatccaggcactggcagtaaatctgaccatgggacatctcaagccaatattctaggctttagtggtataggtgatataaaatcacaagaaacatcagtgagaactttaaaatcattttcaatggttgattccagtatctctaaccgccagagtttctggcagtcagctggtgagactaaccctttaataggctctttaattcaggagcggcaagaaatcattgcaagaattgcccaacatttgattcattgtgatccaagcacttcacatgtttctggaccgtccatttaatactcaagagtctaagttcactccattcaaaacttttccgggtttcacaagaaaatgagaacgtggggaaaaggtaaaagaagcttttctccatgactttttgggtagtccagagtttagttccccagaagacaccaatgagggggaaaattcgactaaaaccagaaactcctcgaagtgaaacttgtatttctaatgacttttattctcatatgcctgttggagagactaatcctttgataggctctttactccaggagcggcaagatgttattgcaaggattgctcagcacttggagcacattgatccaacagcatcacatatcccccggcagtcattcaacatgcatgactccagttcggttgcatctaaagtgtttaggagttcatatgaagacaaaaatttgttgaagaaaaataaggatgagtcctcagtttccatttctcacacaaaatgttccttgttaggagacatcagtgatgggaaaaacttagtacctaataaatgttttacttcttttaaaaataatagtaaagaaaagtgttctttgaaacatcaaacaagaaatcagtgtcagaacaatcctagtgaaatcatccaaagtacgtatcaggagacacagaacaaaagttctagtttatcaacttcctcaattttgtctcagcacaaagaaaataacttagatttgacaagcagattcaaggagcaagaaatgagcaatggaattgataaacagtattcaaattgcaccactattgacaaacagatttgtacaaataagtataaggaaaaaataataaatgagaactataatccaaaattctttggcaatcttcagtctgatgattccaaaaaaaatgactcaaaaataaaagttactgtgttggaaatgtctgaatatttgaacaaatatgaaagcatgtcctcaaataaagactcaaaaaggcctaagacatgtgagcaaaatactcaacttaatagcatagagaattatctcaataaagataatgaaggtttcaaatgtaaaaagtcagaccaattaaaaaatgaacaagataagcaagaagatccaactaatgaaaaatcccaaaactattctcagagaagaagtataaaagactgtttgtctacaatgtgagcaaccaaaaaattcagaggtattgaggacctacacctgaaacattcaaaatgtgtgggggcngaaaacataattttcattccttggatggaacttcaaccagagcctttcatcctcaaactggattgcctcttctttcaagccctgaatctgtcttgaactatcgtttcgatcctctcggcattgttgatggttttactgccgagaccttatttaatcctaataagactgtggtgaagatgtttgttgtgatatatgatttacgagatatgccagccaatcatcagacattcctacgacaaagaactttttctgtacctgttaaacaagaagtgaagagaagtgttaataaagagaacatccgacacacagaagaggggttattacgctacctcatacatctgaggttccagagttctaaatctggaaagatctacctccatagagacgtacggctcctgttctctagaaagtcaatggaggttgatagcgg

SEQ ID NO: 130616 - DNA, 555 bp, Homo sapiens
gcgaccgcgtggtatctcccgagggctgcttggaccctggtgggctcgagtgctccaccccgctgtgggcctcagataaccctgtacaaaggggaatggagattgcctgtatccacctagattcataagctgccctgaggcgatcttggcatcaagaaagacagcattgaggcacatctcaccatcagcttcagaggatgtcagcctttgatatgtcccatgggttttttcccagggaaccaatctgtcctttttgaaggaaaaggaccaaagattaggaaccgatggtaggaggaccacccggtcaaaattcttacccagtgaatattggtgggaagtgttcattggctcaaaccagcatgtgtttgatgacttaggattcaggtgacgtttgatgatgtggctgtggagttcaccccagaggagtgggctttactggacacaactcagaaatacctctacagagatgtgatgctgggagaactacatgaacctggcctctgtgggtaagagtaacatcactttgcttggcatggtggcctgcacctgtagtcc

SEQ ID NO: 130617 - DNA, 458 bp, Homo sapiens
tgtggctcagcatggtcagtgccgtttaacctttattgtggtggagtccacccctgttgtgggctttagataaccctgtacaaaggggaatggagattgcctgtatccacctagattcataagctgccctgaggcgatcttggcatcaagaaagacagcattgaggcacatctcaccatcagcttcagaggatgtcagcctttgatatgtcccatgggttttttcccagggaaccaatctgtccttttgaagaaaagacaaagataggaacgatggtagaggaccaccggtcaaattcttaccaggattcaatgacgtttgatgatgtggctgtggagttcaccccagaggagtgggctttactggacacaactcagaaatacctctacagagatgtgatgctggagaactacatgaacctggcctctgtggtcaagagacacactgagtttgaatag

SEQ ID NO: 130618 - DNA, 349 bp, Homo sapiens
tttaaagctgtgatttaaaaactataaaataaacaatgaaatgagaaatgggcaaattcaaataattttattttaccttgagcaagaagactatgccaatgctaatgctttgctttcccctgcccctgcccttcccaaagagaagagaacagacagcaatggcagagtatatttcgtcaaccacaacacacgaattacacaatgggaagaccccagaagtcaaggtcaattaaatgaaaagcccttacctgaaggttgggaaatgagattcacagtggatggaattccatattttgtggaccacaatagaagaactaccacctatatagatccctggtcgacgcggccg

SEQ ID NO: 130619 - DNA, 2217 bp, Homo sapiens
ggtgacaaagagccaacagagacaataggagacttgtcaatttgtcttgatgggctacagttagagtctgaagttgttaccaatggtgaaactacatgttcagaaagtgcttctcagaatgatgatggctccagatccaaggatgaaacaagagtgagcacaaatggatcagatgaccctgaagatgcaggagctggtgaaaataggagagtcagtgggaataattctccatcactctcaaatggtggttttaaaccttctagacctccaagaccttcacgaccaccaccacccaccccacgtagaccagcatctgtcaatggttcaccatctgccacttctgaaagtgatgggtctagtacaggctctctgccgccgacaaatacaaatacaaatacatctgaaggagcaacatctggattaataattcctcttactatatctggaggctcaggccctaggccattaaatcctgtaactcaagctcccttgccacctggttgggagcagagagtggaccagcacgggcgagtttactatgtagatcatgttgagaaaagaacaacatgggatagaccagaacctctacctcctggctgggaacggcgggttgacaacatgggacgtatttattatgttgaccatttcacaagaacaacaacgtggcagaggccaacactggaatccgtccggaactatgaacaatggcagctacagcgtagtcagcttcaaggagcaatgcagcagtttaaccagagattcatttatgggaatcaagatttatttgctacatcacaaagtaaagaatttgatcctcttggtccattgccacctggatgggagaagagaacagacagcaatggcagagtatatttcgtcaaccacaacacacgaattacacaatgggaagaccccagaagtcaaggtcaattaaatgaaaagcccttacctgaaggttgggaaatgagattcacagtggatggaattccatattttgtggaccacaatagaagaactaccacctatatagatccccgcacaggaaaatctgccctagacaatggacctcagatagcctatgttcgggacttcaaagcaaaggttcagtatttccggttctggtgtcagcaactggccatgccacagcacataaagattacagtgacaagaaaaacattgtttgaggattcctttcaacagataatgagcttcagtccccaagatctgcgaagacgtttgtgggtgatttttccaggagaagaaggtttagattatggaggtgtagcaagagaatggttctttcttttgtcacatgaagtgttgaacccaatgtattgcctgtttgaatatgcagggaaggataactactgcttgcagataaaccccgcttcttacatcaatccagatcacctgaaatattttcgttttattggcagatttattgccatggctctgttccatgggaaattcatagacacgggtttttctttaccattctataagcgtatcttgaacaaaccagttggactcaaggatttagaatctattgatccagaattttacaattctctcatctgggttaaggaaaacaatattgaggaatgtgatttggaaatgtacttctccgttgacaaagaaattctaggtgaaattaagagtcatgatctgaaacctaatggtggcaatattcttgtaacagaagaaaataaagaggaatacatcagaatggtagctgagtggaggttgtctcgaggtgttgaagaacagacacaagctttctttgaaggctttaatgaaattcttccccagcaatatttgcaatactttgatgcaaaggaattagaggtccttttatgtggaatgcaagagattgatttgaatgactggcaaagacatgccatctaccgtcattatgcaaggaccagcaaacaaatcatgtggttttggcagtttgttaaagaaattgataatgagaagagaatgagacttctgcagtttgttactggaacctgccgattgccagtaggaggatttgctgatctcatggggagcaatggaccacagaaattctgcattgaaaaagttgggaaagaaaattggctacccagaagtcatacctgttttaatcgcctggacctgccaccatacaagagctatgagcaactgaaggaaaagctgttgtttgccatagaagaaacagaaggatttggacaagag

SEQ ID NO: 130620 - DNA, 1863 bp, Homo sapiens
atggcagtggcggctgtctggagtggccactgccatgacaccagctgcagtgggggaggcttgaccagggttgcatgctccatggagcctgtgggaaccaggaacaggtgggagcccctcctccttctgaattggaggggtgacagcctcgccttcccaggtgcagttgcaggggcccagctgggactgctgccccaggtatcctgtgctcttggggatccaggaagccctcctgccccagcaggcttgaaagagcctgcacctgctgcttggcctctcagctctccagctgcccactccaattttggagcaaagttgaggccaagcctgggcactgtggcaacctggactcaggacccaccaaatggcagggctgaaagagctgtaacacaaacagggctgaaacaccacccccccccaccccaacttgccacgttgggggtgatgaggatagaagagagcataagagaagagctgtgccctttggggagcctggacctaggagctccctgagccagggctgtgacaccctttttggggctctgtgggtcctggcatctccaagattccaggtgccaccatgttccctggtgcccaattcacttgcagtacagttggttcagctgcagccttgcagggatccagtgcccacgctggcacctgcagctgcccacctcaccacagccagtgtacctggttatgcgcagtggccggaacttgtgcttgctcactcacacacccctctcctccctgcatttgacttgcctttggcaggcatgggatccgggctggtagtgagacctgagtgcagcctgccaagccgagtgggtggaataagccctgtgggcccgagcaaaactcgagcaaaggcaccatcggccacagaggattctgtctgtcccagcggcgtgtcacatttcacctgccagaaggctctcaggaaagcagcagtgatggtggactgggagaccatgatgcaggcagccttaccagcacatcccatggcctgccccttggctatcctcaggaggagtactttgatcgtgctacacccagcaatcgcactgaaggggatggcaactccgatcctgaatctaagaaaagaagagagagagaagaagaagaaaaagaagaagaagaagagggaagaggagtgggaggaggaggagtgggaggaggaggagtgggaggaggagggggtaggaggaggaagaagaagaagaagaagaagaagaagaagcaacagcagcagcagcacaagcaacagcagcagcagcggaggaggaggaggaggaggaggaggaggaagaaaaaggagagagagagatttccccgttgccaaaataaggattttgctttaccttcaactgcttaagctaaaggggttggaacagtttgtaggactcagaagaagacaggaagatgtgggaaagtttggaacttcctagagacttgttgaatggctttgaccaaaagcctgatagcaatatggacaataaagtccaggctgaggtgttctcagatggaaatgagaaactttttgggaaatgcagcaaaggtgactcttttcaattaaatgaaaagcccttacctgaaggttgggaaatgagattcacagtggatggaattccatattttgtggaccacaatagaagaactaccacctatatagatccccgcacaggaaaatctgccctaatcaagatttatttgctacatcacaaagtaaagaatttgatcctcttggtccattgccacctggatgggccagatgtggaagtgattattttcaagcaccagtggtattgtagcaactacagcttcaagaagtacggaattgaatgcaaagggaaaagaggttga

SEQ ID NO: 130621 - DNA, 696 bp, Homo sapiens
tcagcccttgagtggtagatgagactgggcgccgtggagcagggggtggcgctcatcggggaagcttgggcggcacaggagcccacggaggcagggggtaggcttaggcatggagggctgcaggtcccgagccttctgtgggttccaaatgtggatctcagaatcaagaaaacctcctaggttctgtaaacgagaatgattcacatcaccagtgtttactcgcaccctcaccaggcacaactccggggctgtgaggttctcaggcacaaggcacaccttgtcctgcctgcctgtccacgtcatgctcagggatcccaaggggccagcaaacagctcagcagggctacagcaggtgcttcctcgcttggtctttggaggcctgagaccctcgtcctgggccagggcctcccaagtctcccgctccttccagcgcctcagctgctcctcccgcattttgtagaagaggatgtgcttctgcacatcgctgagctcggcaaggagctcggggtcgatgtacatgtcgtgcaggatctgctgcagcatgatgccacccttctccagtgttttcaggtctatatcctccaggtactccagggccgctttctggggcttggacagaaacacgtctgtgttggcaagcagcaatgccaaggcagcagcccccagggctcctgcaccaatggaccacatccccat

SEQ ID NO: 130622 - DNA, 601 bp, Homo sapiens
cttcctcggccgagccgggccgcgccgtcgctgtcgccgccgcgcgcggattctgcttctcagaagatgcgctatgatagatactctaacgccaaggtcagctgctggtacaagtacctccttttcagctacaacatcatcttctggttggctggagttgtcttccttggagtcgggctgtgggcatggagcgaaaagggtgtgctgtccgacctcaccaaagtgacccggatgcatggaatcgaccctgtggtgctggtcctgatggtgggcgtggtgatgttcaccctggggttcgccggctgcgtgggggctctgcgggagaatatctgcttgctcaactttttctgtggcaccatcgtgctcatcttcttcctggagctggctgtggccgagctggccttcctgttccaggactgggtgagggaccggttccgggagttcttcgagagcaacatcaagtcctaccgggacgatatcgatctgcaaaacctcatcgactcccttcagaaagctaaccagtgctgtggcgcatatggccctgaagactgggacctcaacgtctacttcaattgcagcggtgccagctacagccgagaga

SEQ ID NO: 130623 - DNA, 1214 bp, Homo sapiens
tgggaccctccgggccggacggtttggtctattatttcccgggcgccggcgcggcaaaaggggggaagaggggaggcacttgagaaatgtctttcctccaggacccagagtttcttcaccatggggatgtggtccattggtgtaggagccctgggggctgctgccttggcattgctgcttgccaacacagacgtgtttctgtccaagccccagaaagcggccctgggagtacctgggaggatatagacctgaaaacactggagaaggaaccaaggactttcaaagcaaaggagctatggggaaaaaaatggagctgttgattattggccgtgcggaggccagggcttgttttcctcttgttcgagagggaagcatgcggatcttgtcctccctgaaaagcatgtttggaccagctgggcgtccccctctatgcagtgggaaaaggagcacatcaggactgaagttgaaggatttccagccttatttcaaaggagaaatcttcctggatgaaaagaaaaagttctatggtccacaaaggcgggaggatgatgtttatgggatttatccgtctgggaagtgtggtacaacttcttcccgagcctggaaccggaggcttctctgggaaacctggaaggaagaaaggcttcatccttgggggagttttcgtggtgggatcaggaaagcagacaaggaacttagaactgaaaagggatgagcagctgcacaaggagcacagctcatcggtggctctgctaggcctgaactcagattctgcttctcagaagatgcactattatagatactctaacgccaaggtcagctgctggtacaagtacctccttttcagctacaacatcatcttctggggtgtgctgtccgacctcaccaaagtgacccggatgcatggaatcgaccctgtggtgctggtcctgatggtgggcgtggtgatgttcaccctggggttcgccggctgcgtgggggctctgcgggagaatatctgcttgctcaactttttctgtggcaccatcgtgctcatcttcttcctggagctggctgtggccgtgctggccttcctgttccaggactgggtgagggaccggttccgggagttcttcgagagcaacatcaagtcctaccgggacgatatcgatctgcaaaacctcatcgactcccttcagaaagctgtaagcacctccccagcgggcccccgatag

SEQ ID NO: 130624 - DNA, 406 bp, Homo sapiens; identical to SEQ ID NO: 127104
  misc_feature (1)...(406): n = a,t,c or g

SEQ ID NO: 130625 - DNA, 443 bp, Homo sapiens
tttgagctttggatatgttttatttaatgtggtggcaattcatccaaggggtgatgttctcccagcatttggacacacagggctccaaaagtgaaaggccaagagaggactacaaggactgcctgggctggatggggttggactcaggctcctgggagtgagatccaaggtcagccccggaatctgtagcctttcccgctgggctttcatggttgttatatgttagcacactctattgtaaccatgacacacactccctgccagcgtcccggtgatgacagagagccaaaccgaacctctctaaaggactggactaacactctctcgagggggagggggaggctgcaagtttgggtccttccacctctagccgtaatcaagagatgtcagctgctttcctcaggttaacggcagtgcacactgcactgattttgttaaaggaa

SEQ ID NO: 130626 - DNA, 1569 bp, Homo sapiens
ctaagtcaaatcagtggcgttgatagcaagcggagtattgagtttaaaacgctgaccatcgtgctgaagctcgataccaaaaccgggtacatcagtttcaattgctgcatcattaaaactggtttgtgtaccagtccaggtgagggtcatctcccaatctggatgacgggtcgtcgagtcacaagtgagttcatatggcacctctttacgaccatagttgccgttgatgtcgtcgataatgagatcgcgaaattcgacttcaatggttttaccaccgctgatgctacaggttggcggtgacaataatgtcccgtgaaaggtgatgtcttcatcagcagcatgagctatggcgctactgacacaaagcagggttaagaaagtcatggtcaaactggcgttaaactcgcccgcagcaagttgcgccccgcttgccttcacaggtacagccttcaactgtggctggttattgatattaaatggcgtccagctattttcaccgacggcaaacaatgagttatcggcgctattttctatccgaatgcccagcccggtgatattggtactgagtaccgtttcgccgttaatcgttgaggtattgcccttaagttgcatccgcaagtcgttagcaagactgtttgtgcagttcaacgtgtatttcgcatcttgccgataattggtgccatcaacgttatcagcaatcatattggcgaactctaactggctggccttgattgaaccaggtggcggagcatcgaccaaaaggcccgaattaatccacgggttcttacaccaagagattaataagaccttcattgttgtatcagactcaggcaatgtagcaatcattacagcatgatgtaaccctctgagtcccagtattactgagctatcccgaacccgcaccaagtggtcatggcctactaaggggctcggcacagatagccttatagaccatacctgcagatccagcggggacttatctaaagacccgggagccaacacttggttgtcaaacagttcctttgcctgctccgcatctgtctgtcgacaccgtatgccgatgcttgagttcttctgtgtggccacagtgacactacaggtagcgcatctcatcatcctgagaatctgaaaatctcggatagctgtgacactgggatctctttccctttttcttttcctctccccatttctcatgctttcttttcttccctctgcaccctttcttcttcttcctttttccttctcccacctcctcagctgccacacgtcaggcctctggtgtctggttgggttcagccccatggggagatcgtgggccgctttgaacgatggcatctggggtgcaatgaggtgatcagtgctttgagaggctacctgcgctgtgcaagcaatcgagtgcttaagatttagtatacacatcgggtctgtgttgctctgaaaatagcagcggattgaggcacagtctagagtcagggcgtgaatgtaggtccgcttgtattgatttctctcctgactctgcccctcctcctcctcctcactgcctcttccttgttcctggccctcagccat

SEQ ID NO: 130627 - DNA, 1359 bp, Homo sapiens; identical to SEQ ID NO: 127106

SEQ ID NO: 130628 - DNA, 1260 bp, Homo sapiens
  misc_feature (1)...(1260): n = a,t,c or g
atggtcgtctgtctggcagctctcctctggctgctgctcttaatacaacagaaggtcacaggtcctgtctcacgtcttcgcgtctccgggttctataactgttccctctctcacccctttaggcctagaggtggtaatggctccctgtcacttctagctcctgacttcttccctatagccagtcagagtcttcaaatgaatatagacagagtaatactcccatgtaatgatcctactattgaatttcagaactgctcagaacagagtgagcagccttgccctgagtcatttcacctaaaaggaaagagaattaaggagttgccttcaatggatctccccatggggctgaacccaaccagacaccagaggcctgacgtgtggcagctgaggagggctgtcagatatgcctatgccatattcagcacatccgtggagcacgcgtatcatgtgtggcctgagacccgctgctttccatacgtgttggctggaaggtctgaagtaatccggcaattaagtgttggaggcccagtttctcttaagatgcttgaagccccctttgcagagcaaaagcttgaccacatattatcccctccacccatgccgtttcggaaatgcagcaacccagatgtggcttctggccctggaaaatcactgaagtataaaagacagctgagtgaggatggaagacagctaaggcgagggagcctgggaggagccctgactgggaagtaccttcttccaaacccggtggcgggacaggcctggccggcctctgcagagacgtccaacctcgtgcgcatgcgcagccaggccctgggccagtcggcgccctcgctcaccgccagcctgaaggagctgagtctccccagaagaggaagtttgatagattcccagaagtggaattgcttggtcaaacgtctcactcccaggagcctgagtccaaccccatccagcccaggcagtccttgtagtcctctcttggcctttcacttttggagggaatgatctgcactgaattctccctgtgtgtccaaatgctgggagaacatcaccccttggatgaattgccaccacattaaataaaacatatccaaagctcnnnnnnnnnnnnnggggggggccgttttaaaggacccttgggggggccaaagttaacgggggcgggcagaggaatagttttttccttatagggagccgaattaaaacctacctgggaattttgggaaaggaccctttttttgggggggggacatattggcc

SEQ ID NO: 130629 - DNA, 581 bp, Homo sapiens
  misc_feature (1)...(581): n = a,t,c or g
ccagccccggggaaaaaaattttcaaaaaacaaacccaggaaacaaaactttccaacccccaagcatatgcgagttgttttacccccctttcccctttaaaattttttattttccctaaaggccttaaatttctggagggaggttgtcccaatatttcccccccccaaaaaaaaggttcccttccaaaaatccccaggtaggttttaatacggccccccataaggaaaaaactatttccttgcacagcccgcgtaaaacttgggcccccccaaggatcctttaaaacggccgcccccnnnnnnnnnnnnnngtaaagcgctgatcctgtttatttggcaggaaaacgagacaatccagcagcccaggagggacaggtggacttaatcctcctcctcgtcgtctccagccccagccccaccctggcccttcttggcattcttcctcttcacgcggcccgggcggccacccccgtagggagagcgcagagagaagtcgatgtgcttctgggaatccaggcggacaatgaaggacgggatgttcaccacctgcttgcggaccctgatatggcgctggcggatca

SEQ ID NO: 130630 - DNA, 513 bp, Homo sapiens
atggaagaagcagaagacagaattattaagcttgaagacagctatttgaaaacacacagtcagatgagacaaaacaagaacaaaacaaacaaaataaaaaatgaagcaccgctacagaatctagaaaagtgcctcaaacaggcaaatctaagagttattggccttaaagtggagatagagaaaaagcccaaacgacgacaacaaaaatgtatcctactaacgtacacaactgtgaaaccgagcaccataattcacccacagctatgggtgacaggattagccatgtacaggatcaccggacatggggagattttttctctccccaaaagagaacacttgagagccgatggggctgccagaaaagatcctttcatgacccacaagcagctgcctgaacttttgattcagcatcactgcaatggaccagaaagacatatttattcactggtgtcctacacagacctacaacccatgacagctctgtctgtcctcaggctagaagacaaaaaatga

SEQ ID NO: 130631 - DNA, 567 bp, Homo sapiens
tcattttttgtcttctagcctgaggacagacagagctgtcatgggttgtaggtctgtgtaggacaccagtgaataaatgtctttctggtctaccgtgtgtgtgtgtccttgttgtgcatcattacaatgcatacactgtactttatataatgattttatagaaattgtagaagtgtagaagagcctctctctctctcgttcctcctcctcttcctcctcctcctcttcctcctgctcctcctcttcctcctcctcctcccctacatctggggcatcctggcgctggcagcgggtaccacccaggcgggtatggagggactcctggagggcctgcatttcccagaaaaactcaggatccactatatgattactttgctgctgtagctggacatgatgggcaaatagatgctgatgaattgcagagatgtctgacacagtctggcattgcaaattatccttataaaccccatcctgagtttttcgggagactgacatcagtaataataaaattttggtctccagtatagccagttctgcacgaattaaactctttattgcaattcccat

SEQ ID NO: 130632 - DNA, 594 bp, Homo sapiens
  misc_feature (1)...(594): n = a,t,c or g
atggcgtacccggggcatcctggcgccggcggcgggtactacccaggcgggccctcagtggtgaaagaagaaaacttgattcggcagaatgacgtgtatgtgtttcctgtttcacagtatggaggggctcccggagggcctgcgtttcccggacaaactcaggatccgctgtatggttactttgctgctgtagctggacaggatgggcagatagatgctgatgaattgcagagatgtctgacacagtctggcattgctggaggatacaaaccttttaacctggagacttgccggcttatggtttcaatgctggatagagatatgtctggcacaatgggtttcaatgaatttaaagaactctgggctgtactgaatggctggagacaacactttatcagtcttgacactgacaggagtggaaccagtagacccacaagaattgcagaaggccctgacaacaatgggatttaggttgagtccccagggctgtgaattcaattgcaaaacgatacagcaccaatgggaaagatcaccttcgacgactacatcgctgccttgcgtcaactgagggctcttacagacagcttncgagac

SEQ ID NO: 130633 - DNA, 297 bp, Homo sapiens
atgatgctgagggcttcagtatttaaagggaaaaagtgggctaaaggtgaaaagaggaaagagcagagcttctctagggaacttggatgcgaaacaactatggtaaaggacatcctggctgaagagggactgcactttgatgagttgaacaagctgtgggtgttggactcagaggttacccagcagaccacagagctcaaagaagagtgcaagaactttgcggacaaaactggccagtttcagaaaacagttggtggtttaattgagcttgttgataaacttgcaaaaaaagcgtaa

SEQ ID NO: 130634 - DNA, 484 bp, Homo sapiens
tttttttttttttttttaaatcttgggggaaagtgaccacatactgtacaccaaaaattatctgacacaggtctaaaacaatttagaagttaattttgccaaggttaaggacatgcctggaagaactaaatagggaatcccagaaacagtctggtctgtgccttttctccagagatgatgctgagggcttcagtatttaaagggaaaaagtgggctaaaggtgaaaagaggaaaggtatggtaatccgcatgttgcaagaaaaaaggagcagcactgggcacagtggcctcacccctataatcctaggcactttgtaaggccgaggtgtgtcttatactccaaatcctgaagatcccttaatctgctaagcagtctaggtaccacatataaatggaatcatacattattagtctttttgtgactggcttatttcacttagcataacatcctcaaggtcatcgtgttgtatatgtgtcagaatgt

SEQ ID NO: 130635 - DNA, 414 bp, Homo sapiens
gcctgaatgtctctgaccccagtgacttcatccggaccaaccctgactgccacagtgatggggggtacctggactacctggaaggcatcttctgccacttccctcccagcctcctccctctggctgtcactctctacgtttcctggctgctctacctgtttctgattctgggagtcaccgcagccaagtttttctgccccaacttgtcggccatttctaccacactgaagctctcccacaacgtggcaggcgtcaccttcctggcatttgggaatggtgcacctgacatcttcagtgccctggtggccttctctgacccgcacacagccggcctggcccttgggcgactgtttggttacctgggcttgtatgtgttctatgtggtcactggtgattctctgcacctggatctac

SEQ ID NO: 130636 - DNA, 928 bp, Homo sapiens
cttaaggccacacagatagtaagtggccgagacgaatttgaaaccaggggtgtcctgtttgaacttggtgccaaatagagtaactcggactccagttggaggggttcgggagaacatagaagaggaagggccgtgtcttccgtggacaggccaccggagccgccagctgtttggaactgagctactgcagaaagggaagtggagagtaagggccaggccccgtggggcgagatggccggcagaaggctgaatctgcgctgggcactgagtgtgctttgtgtgctgctaatggcggagacagtgtctgggactaggggctcgtctacaggagctcacattagcccccagtttccagcttcaggtgtgaaccagacccccgtggtagactgccgcaaggtgtgtggcctgaatgtctctgaccgctgtgacttcatccggaccaaccctgactgccacagtgatggggggtacctggactacctggaaggcatcttctgccacttccttcccagcctcctccctcttggctgtcaattctctacgtttcctgggctgctctaacctgttttctgaattctggggagtcaaccgcagccaagtttttctgccccaacttgtcggccatttcttaccacactgaagctattcccacaacgtggcagggcgttcacctttcctgggcatttgggaatggtgcacctgacatcttcagtggccctggtggccttctctgacccgcacacagccggcctggcccttggggcactgtttggcgctggcgtgctggttaccacagtggtggccggaggcattaccaccctactcctatttattcagcaccacactacccaggaaatacactagcaaattgtgcaatggataaaaaccacactttagattcttgcaactgtatcatatgtaataggat

SEQ ID NO: 130637 - DNA, 1107 bp, Homo sapiens
atggtgtgccgcaaggtgtgtggcctgaatgtctctgaccgctgtgacttcatccggaccaaccctgactgccacagtgatggggggtacctggactacctggaaggcatcttctgccacttccctcccagcctcctccctctggctgtcactctctacgtgaggccctgccctggggggctggtttcctggctgctctacctgtttctgattctgggagtcaccgcagccaagtttgccctggtggccttctctgacccgcacacagccggcctggcccttggggcactgtttggtgagagcagccccagcgctggcgtgctggttaccacagtggtggccggaggcattaccatcctacaccccttcatggctgcctccaggcccttcttcagggacatcgttttctacatggtggctgtgttcctgaccttcctcatgctcttccgtggcagggtcaccctggcatgggctctgggttacctgggcttgtatgtgttctatgtggtcactgtgattctctgcacctggatctaccaacggcaacggagaggatctctgttctgccccatgccagttactccagagatcctctcagactccgaggaggaccgggtatcttctaaataccaaacagctaaggactacggtgaatgagtaccggccgctgttcttctacccaggagaccacggctcagatcctggtccgggcccctcaaatcccctggattacatgaagtggagaaggaaatcagcatactggaaagccctcaaggtgttcaagctgccctgtggagttcctgctgctcctcacagtccccgtcgtggacccggacaaggatgaccagaactggaaacggcccctcaactgtctgcatctggttatcagccccctggttgtggtcctgaccctgcagtcggggacctatggtgtctatgagataggcggcctcattcccgtctgggtcgtggtggtgatcaggcaggcacagccttggacatcagtgaccttttatgccacatataacagccagccacccagaaaacactgagctctttgctttcctaggcatatctgaccagcgccctgtggatcaacgcggccgc

SEQ ID NO: 130638 - DNA, 406 bp, Homo sapiens
agctgagtttgctgaatatgcctcggtggacagaaacaaaaaatgtcgtcaaagtgttaatgtagagagtatccttggaaattcatgtgatccagaagaggaggccccaccacctgtccctgttaagcttctggacgagaatgaaaaccttcaggagaaggaagggggagaggcggaagagagtgccacagacacgaccagtgaaactaacaaggtgggcactggcgtttttgttttgtctttgtgggttcctgttctggttaggaatctagctggccctggagttgttctgggaaatatctgcaaacactttccagtttgttgaatgatgagagctgttttcatgtaagctgtgtttggctttttccccctccaagtaataaaataccaaaaacttgtatttatc

SEQ ID NO: 130639 - DNA, 1776 bp, Homo sapiens
atggggcccgcggggagcctgctgggcagcggacagatgcagatcaccctgtggggaagtctggctgctgtcgccattttcttcgtcatcaccttcctcatcttcctgtgctctagttgtgacagggaaaagaagccgcgacagcatagtggggaccatgagaacctgatgaacgtgagcaggggttcttctgcagtgtggcctggacctccacccacagcagcagcagcacctgggagctccttagaaatgcgaattttcctgggggtgaggcccagtaaaaggctcgcaagcaccccaggtgatccagttgtatgctcgagtgtgagagccactggcctagagcttgggttcccgctgttctactcaaggtcagcagcagccctgggcgagataggaagagagtggcagccttcagacaaggagatgttcagccgttcagttactagcctggcaacagatgctcctgccagcagtgagcagaatggggcactcaccaatggggacattctttcagaggacagtactctgacctgcatgcagcattacgaggaagtccagacatcggcctcggatctgctggattcccaggacagcacagggaaaccaaaatgtcatcagagtcgggagctgcccagaatccctcccgagagcgcagtggataccatgctcacggcgagaagtgtggacggggaccaggggctggggatggaagggccctatgaagtgctcaaggacagctcctcccaagaaaacatggtggaggactgcttgtatgaaactgtgaaagagatcaaggaggtggctgcagctgcacacctggagaaaggccacagtggcaaggcaaaatctacttctgcctcgaaagagctcccagggccccagactgaaggcaaagctgagtttgctgaatatgcctcggtggacagaaacaaaaaatgtcgtcaaagtgttaatgtagagagtatccttggaaattcatgtgatccagaagaggaggccccaccacctgtccctgttaagcttctggacgagaatgaaaaccttcaggagaaggaagggggagaggcggaagagagtgccacagacacgaccagtgaaactaacaagagatttagctcattgtcatacaagtctcgggaagaagaccccactctcacagaagaagagatctcagctatgtactcatcagtaaataaacctggacagttagtgaataaatcggggcagtcgcttacagttccggagtccacctacacctccattcaaggggacccacagaggtcaccctcctcctgtaatgatctctatgctactgttaaagacttcgaaaaaactccaaacagcacacttccaccagcagggaggcccagcgaggagccagagcctgattatgaagcgatacagactctcaacagagaggaagaaaaggccaccctggggaccaatggccaccacggtctcgtcccaaaggagaacgactacgagagcataagtgacttgcagcaaggcagagatattaccaggctctagcaacccagaagacaaccctgggtagcctgtgatcagtgtctggagacgtttcttctgtggaagagaagaagtgacacamaccctatacttcatatgctgctttagtcacctgaagatgggtggagaggccctgtcgactgttctcccagttgttcagtttctgagacagagaggtacggactaagctgcacctgagtgtgcccctgcctgccagatggacaggtacacccaagcacatctccc

SEQ ID NO: 130640 - DNA, 873 bp, Homo sapiens
tcacaatagagcttgctgctgctcactctttgggtctgcaccacctttaagagctgtaactctcactgtgtaggtctgcggcttcactcctgaagtcagcgagaccacgaacccaccagaaggaagaaactctggacacatctgaacattgagcttgcctttcacaggcaaacaaaatccattttcttcatctctttgtcctgtgaaaaacaaggagatccaagtcagtgcaccaaaggagacaattttgcccttcaggcttctgatcaaacaaggcttggagcagctctggtcactgcttctcatctttgctgttgacctcagttctttcctttcaggttcttcacttatgagatgtggtatggaacggattccaggaggattccaggctctctggtagaattcagctgtgaatccatctgctcctggactttttttggttggtaagctattaactgttgcctcaatttcagatcctgttattggtctattcagagattcaatttcttcctggtttagtcttgggagggtgtatgtgtcgaggaatttatccatttcttctagattttctagtttatttgtgtagaggtgtttatagtattctctgatgatagtttgtatttctttggtccttgatgatggtgatgtacagatggggttttggtgtggctgtcctttctgtttgttagttttccttctaacagtcaggaccgtcagctgcaggtctgttggagtttgctggaggtccattccagaccccgtttgcctgggtatcagtagtggaggctgcagaacagcgaataatgctgaacagcaaacgttgctgtgtgatcgttcctctggtggtttcctctcagaggggtacccggccat

SEQ ID NO: 130641 - DNA, 1737 bp, Homo sapiens
ctattcagtcactcctacataatagggtacactcaggttttctgcaacaattttcaatagttttaggtgggtaataagtatgtagtgctctatccatgatttatgttccttttccatggagtaaagttgttggttggcaatggcttccatgatgtgactacatttcccatccacttttgcttcaacaattataaattctatactgattatgtcatatagaactgtaaaagaatcaagatcttcatcagacatcaataatttttcagcaacagttgaagagtctgaccctgtaaactctttccctgctgcaacacctgctattctcagtgtataggactttttcagggtagcaggcaagaggagcctggttgaacaattacacatcttgggtaaatacctcaatgttggttccccgtgttgcttttgcttgtgggtttccgctccagcaagctgcagttctctgcgttcacctgttgggctctccaatattaggagcagcagatagctctgtgactccacctttttgttggatggcaaatgctcacatttgtggacttcagttgcaaaatactctgagttttgctgagcccatctatttaggccaagagcatgctcaactctcttgatgcttaataactcagacctcttagtcaataaccagtattcaggatcctgcaaccgccaaggctctgtgctcatcccatggctggtacgggatatgccgcgataggcttccacctccggcgtcagtgtctggactatagggagcctgcaatgcctgaaaacttggagatggcagaaactgtgaggctgagtccagggtttatatgtgctcagaatggaggagtgcatgctgattggtccttgggcaggtctggaaaaagcaccatttgattggctaaaaggcatccaggaagtaaagaagttcttactccggtgacgggctccacccaaaacggcactgcgctcgatttctcgccgggccttagctgccttcccgcggggcacggctgaggatccgcagcccgccatgcctgagcctcccaccccctccgtgggctcttgtgcggcccgagcctccccgacgagcgccgccccctgctccagggcgcccagtcccatccaccatccaaaggggctgaggagtgccagcacatggcgcgggactggcaggtagctccactctgatgtttgccacacattcacccttgcttgcttcagaaatattcgtgggccttggagatgctgggcatgaaggtctgcggcttcactcctgaagtcagcgagaccacgaacccaccagaaggaagaaactctggacacatctgaacatctgaaggaacaaactcctgacacaccatctttaagagctgtaacactcaccgtgaaggtccatggcttccttttgaagtcattgagaccaagaactgggcacatcttggtgaccactaagggactatcacctgtcagccagttaaaagcgactagtacggccactggactaaagacacgggtgtcaggcttactgggaaagggctctctaacaacccccgactctttggagttgggaccattggtttgcctagaaccagcttccgcttttcctgtacttcttccttggtcctccttgtggtctaggaggaaaactagagtttctgctgctgcatcagtgagtgcaactattccgatcaacagggtccagggaatgctgcaggttcttgggcaagaggtgttcat

SEQ ID NO: 130642 - DNA, 651 bp, Homo sapiens
ctaggagtcaaactgccgggttacaggatatagatgcttggctaagctcttgggggtgactacgggatgaccacagaatggaccacccccaagggcagcactaccagtgaggccaccactggggctactcagaccacagacctgctgctcccgccatgactgcctcttgatacccagggagttggacacttggtatagtaatgccaaactctcacatttccatgaccttacttgtcggtaatatttttctttgactatggcataaatgaggaacaatgccagagacccatccagggcgacggtcagaatttccacagacacaatggttggatcaaaataaacccatcttgcatcagctttgccatattctttcccttcggtgctgagaagaacatgtggtccactcccgtaactgaggcttttaatcttctttccacataagccttctagctttttgggtacaagtgtactctggttatctccagttcctagacagttactatagttcagtccaaatacaaagacctcatcattgtcagtaacgtacagtgcttcactggctgaggtgccgaagacacacgccttccgaatagacgcgatctcttgaggggagagtagagtgaagatgggccactttccgacatccaccat

SEQ ID NO: 130643 - DNA, 1347 bp, Homo sapiens
atggggaagctggtttcagtggaactgacagtaaagggagggtctgcagcttcattcctgaagtcagcgagaccacgaacccaccagaaggaagaaacaacatcagatgcaccacctttaagagctgtaacactgactgtgaagatctgcagcttctctcctgaagtcagcgagaccacgaacccaccagaaggaagaaactctggacacatctcaacatctgaaggaacaaactccagacacaccatctttaagagctgtaacactcaccgcgaaggtctaagtcatcagaaaagaacattagaacattctcacagagccttacaatctgaaaacccactgcctttcgaaaggatcaggcaagtaggaaacgttgcaaattccgatggcttgattgcttctttatggaaagaatatggcaaagctgatgcaagatgggtttattttgatccaaccattgtgtctgtggaaattctggccgtcgccctagatgtgtctctggcattgttcctcatttatgccatagtcaaggaaaaatattaccggcatttcctgcagatcaccctgtgcgtgtgcgagatgtatggctgctggatgaccttcctcccagagtggctcaccagaagccccaacctcaacaccagcaactggctggctgtactgttggctttacctgttttttttttaacgtgtttcctgggagatccaatgaacacggaacgtccaaaattgcctgccattaaaggtgatataatgggagtaacctcgggaaaaggtgtgaaatatccgcagtacgtcttgcccgtgtgttgccagtatgttatattgaaaagccaatctgacgtcaagggggtgtacatggggtctgcaagtgatgctcgggaattacaaggtagtgtgggaaattttgacgttgtaggagttagaagattgaaggttggggtgaacgcacacgggtttttcaccagtgcacagacagttgtaaatacagacaggccaagtgcacaagcattgcatgcactgcaggtgtggcgcaaaaagaacgtcctcaacaatctgtgggcggccccgctgctggtgctgtatcgcattatcaccgaatgctttttcggttatgaaatccaggctgccgcgaccattggccgccgctttactatccatcacggttacgccgtcgtgatcaataaaaatagtgtaaagggattattggacttagaacagcaattagcacgggtccaggctcatcatcgatgccccttgcaacccggcacacaactcggaaccacccccgcaatccaacggccgaccacaccccggacaacccccaagcgggatcggcgccaatag

SEQ ID NO: 130644 - DNA, 824 bp, Homo sapiens
cggaagcctgaagcatgggcgctgagtgggagctgggggccgaggctggcggttcgctgctgctgtgcgccgcgctgctggcggcgggctgcgccctgggcctgcgcctgggccgcgggcagggggcggcggaccgcggggcgctcatctggctctgctacgacgcgcatggtgcacttcgcgctgggaaagaatatggcaaagctgatgcaagatgggtttattttgatccaaccattgtgtctgtggaaattctgaccgtcgccctggatgggtctctggcattgttcctcatttatgccatagtcaaagaaaaatattaccggcatttcctgcagatcaccctgtgcgtgtgcgagctgtatggctgctggatgaccttcctcccagagtggctcaccagaagccccaacctcaacaccagcaactggctgtactgttggctttacctgtttttttttaacggtgtgtgggttctgatcccagggactgctactgtggcagtcatggctagaactcaagaaaatgcatccagaaagaaaccagttcagtgaagaagtttcaagtgaactttcaaaaccataaacacccttattcttaactttcatggaaccagaatgaattcaaatctttttgtttggccaaaatgtaatacattccagcctacactttggttttgtattgtagctcccgaacaacctgtttcaaaatgggttttaaggcgaccagttttcgttgtattgttgttcaattaaatggtgatatagggaaaagagaccaaatttgaatttgtaataataaaatgtttaattatacattttaaa

SEQ ID NO: 130645 - DNA, 463 bp, Homo sapiens
cccacgcgtccggaaacctctgttttcttagatttggagcaggatggtcacactgaccttgcagagttctgagaatcagagacagaacataaaaggcctggaaaacattctccaaaaagaagctgcaacatgtgtggacaatgggcttttcatgcctctcttactgtctcttactgtctattgacctggtgcaacgaaacatgctctggtgatggctgtgagggaggaatgaggatagacatagaccctcctgtgtctcaaacacgcttctttattactctgctatgactctgccttccctggggcaggaccccagcctgcctacttttgcacacagacacagtgccatgtggagacaccacgtgtgtcccaatgatttttcctttacccccttcactgtacgacatatcttcgctgtcatgggtgaccattaatatctacctggcccacttgcctatttttc

SEQ ID NO: 130646 - DNA, 669 bp, Homo sapiens
atggaggattcggcctcggcctcgctgtcttctgcagccgctactggaacctccacctcgactccagcggccccgacagcacggaagcagctggataaagaacaggtatatttgcgtgctctcgtgagaaatctttttaatgaaggaaatgacgtttatcgggaacatgattggaacaactcgataagccagtacacggaagccttgaatatagctgattatgcaaaatctgaagaaattttaatccccaaagaaataattgaaaaactatatataaatcgtattgcctgctattctaatatgatccccccttctgcaagaaaggctctttgcaactggatttggagcagggtggtcacactgaccttgcagagttctgagaatcagagacagaacataaaaggcctggaaaacattctccaaaaagaagctgcaacatgtgtggaccatgggcttttcatgcctctcttactgtctgttgacctggtggcagaacatgctctgatcatcatggaggaacagggcttcaaacagaaggaagacgtggctgaagtgttgctaacgccggtatcccaatatctagggagccatagctggggatatgaggagttcgagaccagcgtggccaacatggcgaaaccccatgtctacggaaaacacaagaattag

SEQ ID NO: 130647 - DNA, 1840 bp, Homo sapiens
gcggccgccgccgccgctgcggacgggttgggggagtgagttgggagtttagcgcagtcgccggagtgcgaggacaacgaccatccggccctagcctggccgtgcgggtgccgggagcttccctttctcagcgcggcgcgaaggtggctcgccgtcagcgcctgcttccctcgacctcgtcctcctccccgctccggaggagctgcgagatgtggcgcctctgactccacttctccccgcccctgtcaccgagagggggaaccgagctctcgcccactcgccggaggagacggcccctggactcccaaccccgcgcggcgaaaccatgagctccgtccagcagcagccgccgccgccgcgtaggatcaccaacgtggagtctctgttgctcaccccgcaggagaacgagtccctcttcactttcctcggcaagaaatgtgtgactatgtcttcagcagtgctgcagttatatgcagcagatcggaactgtatgtggtcaaagaagtgcagtggtgttgcttgtcttgttaaggacaatccacagagatcttattctttaagaatatttgacattaaggatgggaaactattgtgggaacaagagctatacaataactttgtatataatagtcctagaggatattttcatacctttgctggagatacttgtcaagttgctcttaattttgccaatgaagaagaagcaaaaaaatttcgaaaagcagttacagaccttttgggccgtcgacaaaggaaatctgagaaaagacgagatcccccaaatggtcctaatctacccatggctacagttgatataaaaaatccagaaatcacaacaaatagattttatggtccacaagtcaacaacatctcccataccaaagaaaagaagaagggaaaagctaaaaagaagagattaaccaagggagatataggaacaccaagcaatttccagcacattggacatgttggttgggatccaaatacaggctctgatctgaataatttggatccagaattgaagaatctttttgatatgtgtggaatcttagaggcacaacttaaagaaagagaaacattaaaagttatatatgactttattgaaaaaacaggaggtgttgaagctgttaaaaatgaactgcggaggcaagcaccaccacctccaccaccatcaaggggagggccacctcctcctcctccccctccacatagctcgggtcctcctcctcctcctgctaggggaagaggcgctcctcccccaccaccttcaagagctcccacagctgcacctccaccaccgcctccttccaggccaagtgtagaagtccctccaccaccgccaaataggatgtaccctcctccacctccagcccttccctcctcagcaccttcagggcctccaccaccacctccatctgtgttgggggtagggccagtggcaccacccccaccgcctccacctccacctcctcctgggccaccgcccccgcctggcctgccttctgatggggaccatcaggttccaactactgcaggaaacaaagcagctcttttagatcaaattagagagggtgctcagctaaaaaaagtggagcagaacagtcggccagtgtcctgctctggacgagatgcactgttagaccagatacgacagggtatccaactaaaatctgtggctgatggccaagagtctacaccaccaacacctgcacccacttcaggaattgtgggtgcattaatggaagtgatgcagaaaaggagcaaagccattcattcttcagatgaagatgaagatgaagatgatgaagaagattttgaggatgatgatgagtgggaagac

SEQ ID NO: 130648 - DNA, 2027 bp, Homo sapiens
agcggccgccctttttttttttttttacatgtgatacctttttttaatggcttataattttagtttaaaaaaattttaatacacaataactgtacatatttatgggggtacatagtgatgttgcaatacatataacatatagtgattagggtaattagcatatctatcatctcaaaaacttatgtctttgttttgggaacatgcaatatccttcttctagctatttgaaactatacaatattgttaactatagtcattctacagtgctacagaacactaggaacttatacctcctatctagttgtaattgtgtattttacaactttgaagtaggtgtaattatccctatttagactatacctgtatgaaacagaaattattttcattttacagatgaggaaacagacgcagagaagtaatttgtccaaagtccatagggttgtaagactcataacaagaactacaacttgggcctatctgaatcttatacttctggtactatacttgttcacaggtttgaaaagagctttaatttctattatttctcaagaatttgtaatgctttctcttgtcactgtgctttcaacttagaggagttgcagttttgataaaagacaaactgatttagcttctaggtttgttaaatatgtaattcacaggtcttctccttgcttatatttctacgactgctttctaaatctaattattttataaatagtcctgttgctttaattcactttttaccctaacataattaatcaagtttaactttgaaatctccatattttatgtgagaactcccaaggctatccacttttattttcctttgtaaatttattgctgctcagcctatttcattaatggcagctttaattataatattttattatattttcaaagtgcatgataatggtttaccagtctggttaatacatcagagatttctattgtgagctatcagagatgttaccatccaacacatttaccaaagtgtaattgttatagacgtcttaccatgaatttacgccccaaacatatgtttaatggggacgaacagtgacatgcctatctgataattccctgcacgctgcattatcatctctatattccaaaatttcgtcttaagccgtttagtatttaacttacagaagaaagggggttatcttagataacttttaatatcctaagggtattttccaattcacgatacagggagaaaagaaatgtgtccaggcccttagaagaaaatactttgaatttaaatgtgacacatacattaaacccgcgtgacacgccaggcaggcggtggaagtcaagtgcatttgtttttgtttcatccaccagggcgatctctttcacaattctgggagaggcctgtttgttcctccactcccacagctgaagtttgggacaaaagtttgaaaaaatcccaggcacctgcggctcctatcgaagccggcgaggagcacagggtagagcgtctcttcccagttttcagtcttcagatcgcaggcctctcggacccgcagagcgagcttcacgctgcagcgcttgagaaataagagctattccaaggaggggccctgggtcctcactgacgcttcgcaaaggtgtacgtccgcccagggaaggccggcggcgcagcgacggcgaggagtccccaaccatcttctcttcaagcagcagtagctgggttcgggtacccaccccccgagccgagacgccagaggccagagtaagaaaatggaagcctgcgccccaagccaaccgggattccacttagctccgcgcgggggaacgagctctcgcccactcgccggaggagacggccctggactcccaaccccgccggcgaaaccatgagctccgtccagcagcagccgccgccgccgcggagggtcaccaacgtggggtccctgttgctcaccccgcaggagaacgagtccctcttcactttcctcggcaagaaatgtgtgggtgcgggccgtggcggtcgggcgccgccttcccgagctgctggagaataa

SEQ ID NO: 130649 - DNA, 487 bp, Homo sapiens
  misc_feature (1)...(487): n = a,t,c or g
aggggnattgatnaccnttgcaggatcgagnnccgtagtcccggctcgacccacgcgtccggttgcttttccggcagttttgtgaaaccaggcctgggctggagtgttacattcagttcctggactccgtggcagaatatgaagttactccagatgaaaaactgggagagaaagggaaggaaattatgaccaagtacctcaccccaaagtcccctgttttcatagcccaagttggccaagacctggtctcccagacggaggagaagctcctacagaagccgtgcaaagaactcttttctgcctgtgcacagtctgtccacgagtacctgaggggagaaccattccacgaatatctggacagcatgttttttgaccgctttctccagtggaagtggttggaaaggtctgtgcctgccaggttcgggccacgggtaaaaatgtatgcttgcagccgcttggagaagaagaggatccaaaagaggaaagg

SEQ ID NO: 130650 - DNA, 594 bp, Homo sapiens
atggagagcacactagaatatgggaatgagcagacaatgcaggcagggggagaagctgagtccaggacagggctcacacttgccaagttgtcagccaacagagggtacgtcaaccaacagagggcacagcaagccaaggggcccctgtcctcaccaccttcacctgacagagattactgcagtttatgtgacaagcagccaatcgggaggctgcttttccggcagttttgtgaaaccaggcctgggctggagtgttacattcagttcctggactccgtggcagggcagcagaatcccacaaagcagctccatctggaaaagaccccatcaaagcccccttttaatgcaacctgtgatgaccacaacccccgacaccaccagcctcagaacaggtctatcaatgcgagaacaagtgacacagacaactgtgaatatctgacagataggctgtggcaacggccaccaagagctccaagtttccctccaccagcttggcaaccccagcagcagaagagcagcccttttggaaccaagaatcccatccccatccctgaggccaagcagagaatcaaggctctgcacagccagggctga

SEQ ID NO: 130651 - DNA, 1996 bp, Homo sapiens
cagagggaggaagaagcggcggcgcggcggcggcggctcctctttgcagagggggaaactcttgggctgagagcaggaacaacgcggtaggcaaggcgggctgctggctcccccggctccggcagcagcggcggcagcccgagcagcggcagcagcagcggcagcaccccaggcgctgacagccccgccggccggctccgttgctgaccgccgactgtcaatggagctggaaaacatcgtggccaacacggtcttgctgaaagccagggaagggggcggaggaaagcgcaaagggaaaagcaagaagtggaaagaaatcctgaagttccctcacattagccagtgtgaatactctccgaaggaccatagacagagattactgcagggtatgtgacaagcagccaatcggggaggctgcttttccggcaattttgtgaaaccagggcctgggctggagtgttacattcagttcctggactccgtggcagaatatgaagttactccagatgaaaaactgggagagaaagggaaggaaattatgaccaagtacctcaccccaaagtcccctgttttcatagcccaagttggccaagacctggtctcccagacggaggagaagctcctacagaagccgtgcaaagaactcttttctgcctgtgcacagtctgtccacgagtacctgaggggagaaccattccacgaatatctggacagcatgttttttgaccgctttctccagtggaagtggttggaaaggcaaccggtgaccaaaaacactttcaggcagtatcgagtgctaggaaaagggggcttcggggaggtctgtgcctgccaggttcgggccacgggtaaaatgtatgcctgcaagcgcttggagaagaagaggatcaaaaagaggaaaggggagtccatggccctcaatgagaagcagatcctcgagaaggtcaacagtcagtttgtggtcaacctggcctatgcctacgagaccaaggatgcactgtgcttggtcctgaccatcatgaatgggggtgacctgaagttccacatctacaacatgggcaaccctggcttcgaggaggagcgggccttgttttatgcggcagagatcctctgcggcttagaagacctccaccgtgagaacaccgtctaccgagatctgaaacctgaaaacatcctgttagatgattatggccacattaggatctcagacctgggcttggctgtgaagatccccgagggagacctgatccgcggccgggtgggcactgttggctacatggcccccgaagtcctgaacaaccagaggtacggcctgagccccgactactggggccttggctgcctcatctatgagatgatcgagggccagtcgccgttccgcggccgtaaggagaaggtgaagcgggaggaggtggaccgccgggtcctggagacggaggaggtgtactcccacaagttctccgaggaggccaagtccatctgcaagatgctgctcacgaaagatgcgaagcagaggctgggctgccaggaggagggggctgcagaggtcaagagacaccccttcttcaggaacatgaacttcaagcgcttagaagccgggatgttggaccctcccttcgttccagacccccgcgctgtgtactgtaaggacgtgctggacatcgagcagttctccactgtgaagggcgtcaatctggaccacacagacgacgacttctactccaagttctccacgggctctgtgtccatcccatggcaaaacgagatgatagaaacagaatgctttaaggagctgaacgtgtttggacctaatggtaccctcccgccagatctgaacagaaaccaccctccggaaccgcccaagaaagggctgctccagagactcttcaagcggcagcatcagaacaattccaagagttcgcccagctccaagaccagttttaaccaccacataaactcaaaccatgtcagctcgaactccaccggaagcagctag

SEQ ID NO: 130652 - DNA, 966 bp, Homo sapiens
atgaaagaacaaatgtggcaaaaggttaacaatggatcaatctacgtaaagagtacattacagatcagcagctccaagagggcagaaactgtgctcctgtttgctagccctgacctcatacctggtattcagtatgcaggaagaaggtttaggtcacatggagaaaaggaaatcgcccacaccagccgccaacatactacaagtgacattgggcacaatcgagctaactaccccgaaataggagcaacagggcgcacgcaagcacaactcgccatatccattatccaagacaccaacaacaccccctcccaatcttcccgacctccgaccgactcccacgaaacgggaagccaccaaacagacgacatctcaaacccctcgcgtgaaacccaggcaccgccccccccagttccaacctccctccgaaccgaaccccccacaccccacaccactccaaaccgcgcgcgcacaccaggacaaacctcagccccgcgaacaccctcgtgcgtcgccaacggcacacaagcggaggccaaccaggaaaataggacgcgcggtgcccgttgcacgctcacccgcctgcccatactaaacgtcttcataaataaacaaaatgacaggaagatctgcctgcactgcaagtgtccccaggaggagcacatggtgacagtgatgccgctggagatggagaagaccatcagcaaactcatgtttgactttcagaggaactcgacctcagatgatgactcaggctgtgctttggaagagtatgcctgggtcccgccgggtctgaagcctgaacaggccttctgctgtgggattgttataaagatacaagttcgtcccagtggagttctctggctctgtggagcctgtggaagttattcagggccccagatggagcctcttgattctgaatcctctaatgccccaagcaggctttgggattatctgctgaagtactga

SEQ ID NO: 130653 - DNA, 609 bp, Homo sapiens
atgtgcagtgcacatgcactgacacctgccctgaggaccgggggcctattgtctttcttagagtccaggaggaaaaggaggaagaaaaggcacaagaggaaggcccaggtagtaggcttgggggtcccgggcgctcccccactattgactgccccagagggtgactcaggagggggcctgcttcctcgtagaggcccaagggtgcccgagagctgcgtcttcatccagggcctaggtatgggagaaccagcccccaaaactgcccatgggccagacctggatgtcttcatgaggccctctagggataggaagatctgcctgcactgcaagtgtccccaggaggagcacatggtgacagtgatgccgctggagatggagaagaccatcagcaaactcatgtttgactttcagaggaactcgacctcagatgatgactcaggctgtgctttggaagagtatgcctgggtcccgccgggtctgaagcctgaacaggtacaccagtactatagctgtctcccagaagagaaagtcccttatgtcaacagtcctggagagaaactgcgaatcaagcagctactacaccagctgccgccacatgacaatgaggtt

SEQ ID NO: 130654 - DNA, 918 bp, Homo sapiens
atgctcactcagaacagcagagtgaacctacaggaggaagcaatagtcgggggttctctgatagctcccttcttcctggtgctagtgtttgagctgctgtatgtgtttgagctgctgtatctccacgaaggcaggcatgttgtctgtcttaatgactgtcgtgtgcccagcatcttagtgcagtgcctaacacacagtagctgctcagtcaatgttggtgggaagatctgcctgcactgcaagtgtccccaggaggagcacatggtgacagtgatgccgctggagatggagaagaccatcagcaaactcatgtttgactttcagaggaactcgacctcagatgatgactcaggctgtgctttggaagagtatgcctgggtcccgccgggtctgaagcctgaacagtgcccgtgtgggcttttcctcctccaccccttcctcatgcacagtgaagagcatgcacattgctccactcagggaatcagatccaagaaagcagacttggtctgccccagctgtgatgagttgagcagagaggacgctgccagccccccgccccccagcagggctctgtgtgctccatttaagggaagaggaatgtggtgcctgacggatgagtcagaggctgctacctcgccctgtggtacccctgccacatactgcccctcccccaactacacacacacaacgcagatcagtgtgatggaaactccactctggaattcgcctttggcacaatttcctcataccatgcacttgctgtcaccctattttaaaggtacagcctttgtcaatgcagagttcaaagatctaagccttgatgataatgaggggaaatgtttggtgcttttctcctatcctttggatttcacctttgtgtgtcgacaacaatttcttgctgttagtgataaagaatga

SEQ ID NO: 130655 - DNA, 1597 bp, Homo sapiens
gcacgaggtggcgcccgagtgcactgaagatggcggctgctgtaagacgtgttgctccgagcgtcggctgccccgacattgtgagtgccattccttggggcatttctgccactgcagccctcaggcccgctgcatgtggaagaacgagcttgacaaatttattgtgttctggttccagtcaagcaaaattattcagcaccagttcctcatgccatgcacctgctgtcacccagcatgcaccctattttaagggtacagccgttgtcaatggagagttcaaagacctaagccttggatgactttaagggggaaatatttggtgcttttcttctatcctttgggatttcacctttgtgtgtcctacagaaattgttgcttttagtggacaaagcttaacgaattttcacgatgtggaactgtggaagttgtcgcagtcttcagtgggatttcccactttagcccatcttgcctggataaatacacccaaagaaaagaatggtgggtttgggccacattgaacatcgcactccttgtcagacttaactaaggcaggttttcccgaggattacggtgttgctgtttaggaagggttttggtcttggcactaaggaggtctcttcataatttgaccccaatgggagtcatcaagcatttgagcgtcaacgatctcccagtgggccgaagcgtggaagaaaccctccgcttggtgaaggcgttccagtatgtagaaacacatggagaagtctgcccagcgaactggacaccggattctcctacgatcaagccaagtccagctgcttccaaagagtactttcagaaggtaaatcagtagatcacccatgtgtatctgcaccttctcaactgagagaagaaccacagttgaaacctgcttttatcattttcaagatggttatttgtagaaggcaaggaaccaattatgcttgtattcataagtattactctaaatgttttgtttttgtaattctggctaggaccttttaaacatggttagttgctagtacaggaatcgtttattggtaacatcttggtggctggctagctagtttctacagaacataatttgcctctatagaaggctattcttagatcatgtctcaatggaaacactcttctttcttagccttacttgaatcttgcctataataaagtagagcaacacacattgaaagcttctgatcaacggtcctgaaattttcatcttgaatgtctttgtattaaactgaattttcttttaagctaacaaagatcataattttcaatgattagccgtgtaactcctgcaatgaatgtttatgtgattgaagcaaatgtgaatcgtattattttaaaaagtggcagagtgacttaactgatcatgcatgatccctcatccctgaaattgagtttatgtagtcattttacttattttattcattagctaactttgtctatgtatatttctagatattgattagtgtaatcgattataaaggatatttatcaaatccagggattgcattttgaaattataattattttctttgctgaagtattcattgtaaaacatacaaataacatatttaaacaaaaaaaaaaa

SEQ ID NO: 130656 - DNA, 282 bp, Homo sapiens
  misc_feature (1)...(282): n = a,t,c or g
aggtttttcgtcagtactgggatatccccgatggcaccgattgccaccgcaaagcctacagcaccaccagtattgccagcgtcgctgtangggactgaaggttggagaagcatattaactgctccagggtcatttgaagctgggctgcaagtccaggcctgaccgccgctgcctacagagtcacactcaatcctccgggcaccttccttgaaggagtggctaaggttggacaatacacgttcactgnagcccgtgtccacagtnctggccatccggagaaag

SEQ ID NO: 130657 - DNA, 717 bp, Homo sapiens
atggctgatgggcgcccagcaggtgctctgcaggagccagtactggtcaggcttgagaaagtggccaaggaaggcctggcggggagtggggaaggaagcctgaccgccgctgcctacagagtcacactcaatcctccgggcaccttccttgaaggagtggctaaggttggacaatacacgttcactgcagtgctggccatccggagaaagtggggtgttcctttatcaggaatacatgtagggtggggaggcccaggagaacagctccaggactggggccaggaggctgccatgcacagcgagcagccgactcgtggcatctctctccatccagacactggcactgctgtcggggccgtgtttggcctcaccacctgcatcagcgcccatgtccgcgagaagcccgacgaccccctgaactacttcctcggtggctgcgccggaggcctgactctgggagcacgcaccacacgggcctcctcactgctcctcccacatgccaggctgaggatgcagcgctggaaggcggcggccttggcctcagtgctctgcagctccgtgctgtccatctggatgtgtcgagagggcctgcttctcagccaccgcctcggacctgcgctggtccccctgcaccgcctgcctcgaaccctggacgcccggattgcccgcctggcccagtgtaagctcctcctctgtgtggggtcagatacccccaac

SEQ ID NO: 130658 - DNA, 713 bp, Homo sapiens
  misc_feature (1)...(713): n = a,t,c or g
ttcccgagctggcggggtccgtggtgcgggatcgagattgcgggctatggcgccgaagtttttcgtcagtactgggatatccccgatggcaccgattgccaccgcaaagcctacagcaccaccagtattgccagcgtcgctgttagnggactgaaggttggagaagcatattaactgctccagggtcatttgaagctgggctgcaagtccaggtcggctgacctgcgtcctaggggtctctgaagcaaggaatgttcccatcaggcctgaaccgccgcttgcctacagagtcaccacttcaaatcctccgggcaactttcctttgaaaggaagtggcctaaggttgggacaattacacgttcaattgcaagcttgctgtcggggcccgtgtttggccttcaccaccttgcattcagcgcccatgttccgcgagaaggcccgacgaccccctggaactacttccctcgggtggctgcgccggacgctggactcctggggagcacgcacgcacaactacgggattgggcgccgcgccttgcgtgttactttgggcatagcgggccttcctgggttcaagatggggccggttggaagggctgggaaggtgttttgcaaaacccaaggtgttaagccctggtgcctgccgggaaccttccaagcctgcagaatgcgtccagaaataaattctgtgtctgtgtgtgtgtcaaaaaaaa

SEQ ID NO: 130659 - DNA, 507 bp, Homo sapiens
  misc_feature (1)...(507): n = a,t,c or g
tttcctgcttttgctcaaatacaatgccgctgctcatgccctgagtgcatctgtcagcatatggcagtttttgagcaaaagcaggaaaaaaaccaaacaggaaaacaaatttggaaagcccaggccataaaattatgtatatcaaaataaaaccaagaagctttgggattattcacaatcttccttctaaacctggccctcttttcctgcctcattcactcattgggtggtttgacttcactgctagtttcctctaccccatgaactgctctgccatgcatcatanggtaaggaaaagcagcagtgccacagccataaccaagatcggcaagacgggatagagctttaatgctacctggaggtctgcctgggctgactttgtatcccgcagctttagttgtccccaaaggtctgcctggacttggtggttcccgaaggccggccacgcttaccagatcggttgagattcttctttttctttagttcatcttttatttctatgcttct

SEQ ID NO: 130660 - DNA, 450 bp, Homo sapiens
  misc_feature (1)...(450): n = a,t,c or g
ctggtgccgctcactgagaggatgacaagagggccagcttgctttgggagagcactgggaatatctgccgcatcatcacctctggaagaatttcctttgccctgatgaatacaccgctgtctaaattaatccatcgacatcacacttaccccacagtggggctcctgagccatggacaatgatccatccctttgagctttttttggttttaaagtgcgtagtggnnnnnnnnnnnnnnnnnnnnnnnnnnnnnnnnnnnnnnnnnnnnnnnnnnnnnnnnnnnnnnnnnnnnnnnnnnnnnnnnnnnnnnnnnnnnnnnnnnnnnnnnnnnnnnnnnnnnnnnnnnnnnnnnnnnnnnnnnnnnnnnnnnnnnnnnnnnnnnnnnnnnnnnnnnnnnnnnnnnnnnnnnnnnnnnnnnnnnnnnnnnnnnnnnnnnnnntccccgaccga

SEQ ID NO: 130661 - DNA, 547 bp, Homo sapiens
cagctgctttggtggttccccaggggtctgcctgtgctggtccggtatcctgctgatttggtggttcccgaaggccggccacgcttaccagatcggttgagattcttctttttctttagttcatcttttatttctatgcttctgccacttgtagtctgcaagtgtgtttcaatttaatgggtcttgcctctgacaaaccattggtttgtggttgactgtgtggctgtattttgctttgctgggaggaatatatgtcaaactgatcagcagctctcatggcatcttcattgaggcaggaaggcttgccaggcccacagaaagctggattactgctggcaacaggatgcatcattttctcgagccgctcgtagcccggcccctcggcgcgtctaggggcttcccagcggctgggaacctcgtgctggcgccgctccctccccagcccgccgcctctgcacggtgcggagaacgggccaagacggagtggcaggccagcgagggcggcggcgaggcaggcgctggctcccacgcactccgccgcggccgc

SEQ ID NO: 130662 - DNA, 2338 bp, Homo sapiens
  misc_feature (1)...(2338): n = a,t,c or g
gtcagctctctggagctaaagacagctacgtttcccttaccagaggcggcgggctggggagggagcggcgccagcacgaggttcccagccgctgggaagcccctagacgcgccgaggggccgggctacgagcggctgagggtggcgtgcatcttctgcaaacttgttattgccaatacgctaatagtcgctttcagcacacaacagaaaatgatgcatcctgttgccagcagtaatccagctttctgtgggcctggcaagccttcctgcctcaatgaagatgccatgagagctgctgatcagtttgacatatattcctcccagcaaagcaaatacagccacacagtcaaccacaaaccaatggtttgtcagaggcaagacccattaaatgaaacacacttgcagactacaagtggcagaagcatagaaataaaagatgaactaaagaaaaagaagaatctcaaccgatctggtaagcgtggccggccttcgggaaccaccaaatcagcaggataccggaccagcacaggcagacccctgggaaccaccaaagcaagctggatttaagacaagtccaggcagaccttgggggacaactaaagctgcgggatacaaagtcagcccaggcagacctcagggtagcattaaagctctatcccgtcttgccgatcttggttatggctgtggcactgctgcttttccttaccctatgatgcatggcagagcagttcatggggtagaggaaactagcagtgaagtcaaaccacccaattgagtgaatgaggcaggaaaagagggccaggtttagaaggaagattgtgaataatcccaaagcttcttgggtttattttgatatacataattttatggcctgggcttttccaaatttgttttcctgtttggtttttttcctgcttttgctcaaaaactgccatatgctgacagatgcactcagggcatgagcagcggcattgtatttgtacataggttcaagtgtaacacctaactaaactcatttttccttttcctttagagttatggtcatgtctcatgtttcattactactttggggctgttctaaatagatgctttatgtgataaacaactgaaaccattatacctattagtttgtgaagtaagcctacagtataataaagacactaacgtatttttaactgatggagcaaaaaagcaaactaatgaatcaggattacttgaggtaatggctgtgtgaatttttgtaacatttattttcacaagatgggacacatatttgtatgctttggcatttacatccacttcaaatgttaaaaaacttatttttaatgttttaggtttaagcagcttgtaatttattgatctacatggcattaattgatttaaccattatacctgaaataattcttcagtgtttgcctttgagcagtgataggttgtgtattttttaattgcctaagagcatatataccaaacaccacgcccagccaccactacgcactttaaaaccaaaaaaaagctcaaagggatggatcattgtccatggctcaggagccccactgtggggtaaagtgtgatgtcgatggattaatttagacagtggtgtattcatcagggcaaaggaaattcttccagaggtgatgatgcggcagatattcccaagtgctctcccaaagcaagctgaccctcttgtcatcctctcagttgggcggcaccaagctgcccctccttccacaagtactcaagcctgtttgtaaaatactgaaggaattgatggggttgaggaaaggacggtgcatgtgaccagggtcccaaggccacagcttttcagactcctaggaagcaagtggcatttgcttgagttgtggcctcgaaaggagaatgtttatctgttttctaactttgctgacgaccaggattctccctgtcattgagaagaaagcattatctaattaccttcaggtggtttacttattctgtaaagaatatgtgtaaatattttgtacagagccctgtatcaaataaacagccatatgtggttactaatcacctcttctgtcattccgtccttgggncaccgctcagtgggaatggtctctgatctggatgctcccaccttccatgttcaggcccagaactgttgcaatggtctgtggactcctggtcagccttgactggctaggagaccttgggcagtacctacagtcttgctgtttctgtttcatctgcaagaattatgacccacacactccagctgcagcccagggcactgtgatattctatacgtgtgtagatgtttttgtccacagttcctggttcatcactcccataaccctttgttt

SEQ ID NO: 130663 - DNA, 1818 bp, Homo sapiens
ttagtctgggtcaatcaccccagccaacactgtaactcccttcttagcctgttgagttaaaggtagaaggagcccaaagtgtccaggtagcaaccttaacttccagtttaatggaatcattgttgtgtctcctggtggcagcattcctgtctctggaactaagacctctaggtcaacagaacgtaatgttgcaggaacaggaagcaaaaattttgctagtggatcactagggatgatggtgagtggagccacttctacatccaacccttgatgcctggacccatgaattctggctatgggagaaagagtaccatatattgcatgctgattcagagcattcacggccgtctggagaactttgccccagccctgcaaactattgttaccttgtttacgttgtaattgtgacttcaaaaggccattcccccataagtgctggcaaattgggcacttagcagtggccatagccaggtcagccttggtgagtggaagtccatgttgctgagcccatccataacctccatctgtgccactatggcccctttgttcgtgggcccactgggcgatgacaggggtggctggggaaagaggctgaatggtgtccacagaacaggtcatcctatccacttgattattaaaatcctcctctgctgaggtcacccattggtgagcactcacatggaatacaaatatcttcacagttgttgaccactcagagagtttcatccatacacctcttccccaaatttctttgtcaccaattttccagtcatgcttcttccaagtccctgaccatccagccaaaccattgggtataatcaaacgttcaatttccaccaaagcccagtaacaggccaagagctgtctctcaaaaggagagtagttatctgcagaagatggcagggccttgttccaaaatcctagaggcctctgatgtgattcacctatgggggcctgccaaaggctccaaacagcatgcctatctgccactgacacctcaatcaccattggatatggggggtcgtatggccaggtgtcaggagatgtgttaatttgcttaagcaatgaagccacatctggtatagcagctgcaattggagttgccacttgattaatctgacgataatccactgtcattctccaagatccatctgtcttctgcacaggccaaatgggagagtcgaacagggatgtggtaggaatcaccacccctgcgtctttcaggtccttgatggtggcactaatctcctcaatccctccagctatgcgatattgtttttgatttaatatttttctaggtagaggcagctctaatggcttccgtttggcctttcccaccataatagccctcaccctaccagtcagggagccaatgtgggggttctgtccgctgctaagtatgtctatgccaattatgcattctggccctctaggggcctgccaggactttagtctagttgtaggtctagaagcaaacaggggtgttgggggtggctcctgaggagaatcaacattatcttgcctggcaactgcctcaggggaggccatcactgttgcctcaggcagtgcagggtttatctcctcagacaaaggtggaaaggctgatggcagcatgggttggggagtggatgttgtcactactggggatggggaagctttttcttctggcaaaaaagattcatcagagtttacaaactcagtgtccccagcttcatcagggtccccccacacgtctgcattccaagttgcagggtcccattcttttccaatcaatgccctcactttaacagtagacacctggtgaggctgtgcatgcat

SEQ ID NO: 130664 - DNA, 2094 bp, Homo sapiens
atgacctccaattccatccatgttgttgaaaatgataagattttggagatggggatgtttggtgaagatcgtctactagaagcagctagggtgtgcctctctcatggagaggaaagggaggggtctgggcctccaaccaccccctactggggctatggagccaataacagctctgcaactccctggacagagctcccagtgggaggtgtcctggttgcgtgggtccgcaagtgggatcttccaatctgtgggttgcaaagttacgtggaaaaagcacagttttcccagcagggtggctggggggtggtatttcctcttccccgtgtggctctcagggcaaggaaaacaacaccagcccacacagacacttgccagcaaagtgagttgtcatgggccatggggaagctgcaatttgtggaggaagtgtactggctggaccctgcaacttggaatggtgacgtgtgggagcaccctgatgaagctggggacactgagtttttaaactctgatgaacctttcttgccagaagaaaaaactttcccatccccagtagtggcaacatcacctccccaacccatgctgccatcagcctttcaacctttgtctgaggagataaaccctacgctgcctgaggcaacaatgatggcctcccttgtggcagttgccaggcaagataatgttgattctcctcaggcgccacccccaacatctctgtttgcttctagacctataactagactaagtcctcaccgagagaaaaatagtaaatcaaagcaatatcacatccgtggaggaattgcggagattagtgccaccatcaaggactcgaaagacacaggggtggtgattcccaccacatccccattcaactctcccatttggcctgtttggaagacagatggatcttggacaataacagtggattatcataagcttgaccaagtggtgactccaattgcagctgctgtaccagatgtggtttcattgcttgagcaaattaacacatctcctggtacctgttatgcagccattaacttggaaaatgcctttttctccattcctgtccataaggccaaccagagcaatttgccttcagctggcaaggccagcaatataccattgctgtcctaccacagggtaaaatttctagggatccattgttttgtggcctgtcaagatattccttctaagataaaggataagttgctacatttggcccctcctacaaacaagaaagaggcacaatgcctggtcggcctatttggattctggaggcaacacattcctcatttgcgtgtgttactccagcccatttatcaagtgaccctaaaggctgccatttttgagtggggtccagaacaggagaaggctctgcaacaggtccaggctgctgtgcaagctgctctgccacttggaccatatgacccaacagatccaatggtgcttgaggtgaccttagcagaagaggattttaataatcaagtggataggatgacccattctgtggacagcactcagcctctttccccatccacccctgtcatcacccaatggacccttgaagaaagtggccatggtggcagggatggaggttatgcatgggctcagcaacatggacttccactcaccaaggctgacctctctacagccactgctgagtgcccaattttccagctgcagagactaacaccgagcactagatatggcaccattccttggggtgatcacccagctacctggtggcaggctaagaatggagttacagtgttggctggggtgattgacccagactatcaagatgaaatcagtctactacttcacaacggaggtaaggaagagtatgcatggaatacaagagatccattagggcatcgcttagtattaccatgccctgtgattaaggtcaatgggaaactacaacagcccaatccagacaggactacaaatggcccagacccttcaggaatgaaggcttgggtcactctacccagaataaaaccaggacctgttgaggtgtttgctgaatgcaaagggaatacagaatgggtagtagaagaaggtggtcatcaataccagctacaaccacgtgactag

SEQ ID NO: 130665 - DNA, 1126 bp, Homo sapiens
tttgtggtgataactgtgtgtttgaaagctggattggagacatcatattggacatggacaatgagtttagtgactctatacataatacctttggccatatgtggagaaccaaggaacataatgaagctggttggttgctcctaagttcagtggacaaagtaatgaaagaaaatgatgaactcagggattctatctcctggcttcagaagcagatactgagtctcaaatctgctaagattgccctgagtgagagtcttatctcctgcagggaaagagctgaaattgtggaaaaacagacacaagctgttatcatgcgaatggctgacccgcaaggaaaggtgcatgcgcagcctcaacaggtgtctactgttaaagggaggacattgattggaaaagaatgggaccccgcaacttggaatggggacgtgtgggaggaccctgatgaagctggggacactgagtttgtaaactctgatgaaccttttttgccagaagtaacagcttccccatccccagtagtgacaacatccactccccaacccatgctgccatcagcctttccacctttgtctgaggagataaaccctgcactgcctgaggcaacagtgatggcctcccctgaggcagttgccaggcaagataatgttgattctcctcaggagccacccccaacacccctgtttgcttctagacctacaactagactaaagtcctggcaggcccctagagggccagaatgcataattggcatagacatacttagcagcggacagaacccccacattggctccctgactggtagggtgagggctattatggtgggaaaggccaaacggaagccattagagctgcctctacctagaaaaatattaaatcaaaaacaatatcgcatagctggagggattgaggagattagtgccaccatcaaggacctgaaagacgcaggggtggtgattcctaccacatccctgttcgactctcccatttggcctgtgcagaagacagatggatcttggagaatgacagtggattatcgtcagattaatcaagtggcaactccaattgcagctgctataccagatgtggcttcattgcttaagcaaattaacacatctcctgacacctg

SEQ ID NO: 130666 - DNA, 931 bp, Homo sapiens
gtcctggttgcgtgggtccgcaagtgggatcttccaatctgtgggttgcaaagttacgtggaaaaagcacagttttcccagcagggtggctggggggtggtatttcctcttccccgtgtggctctcagggcaaggaaaacaacaccagcccacacagacacttgccagcaaagtgagttgtcatgggccatggggaagctgcaatttgtggaggaagtgtactggctggaccctgcaacttggaatggtgacgtgtgggagcaccctgatgaagctggggacactgagtttttaaactctgatgaacctttcttgccagaagaaaaaactttcccatccccagtagtggcaacatcacctccccaacccatgctgccatcagcctttcaacctttgtctgaggagataaaccctacgctgcctgaggcaacaatgatggcctcccttgtggcagttgccaggcaagataatgttgattctcctcaggcgccacccccaacatctctgtttgcttctagacctataactagactaagtcctcaccgagagaaaaatagtaaatcaaagcaatatcacatccgtggaggaattgcggagattagtgccaccatcaaggactcgaaagacacaggggtggtgattcccaccacatccccattcaactctcccatttggcctgtttggaagacagatggatcttggacaataacagtggattatcataagcttgaccaagtggtgactccaattgcagctgctgtaccagatgtggtttcattgcttgagcaaattaacacatctcctggtacctgttatgcagccattaacttggaaaatgcctttttctccattcctgtccataaggccaaccagagcaatttgccttcagctggcaaggccagcaatataccattgctgtcctaccacaggg

SEQ ID NO: 130667 - DNA, 2877 bp, Homo sapiens
atggtgatggcctcccctgaggcagttgccaggcaagataatgttgattctcctcaggagccacccccagcacccctgtttgcttctagacctacaactagactaaagtcccggtgggcccctagaggggaggttgagtgtgtaacccacgaggaggagacctctggccttttacctggtactttgcactggggaaagggaaatgatcagatatttgggggattactggacagtggctctgagctgatgttgattccaggggacccaaaatgtcactgtggtcctccagttaaagtcggaacttatgaaggctcaccagaagcaatttgccttcagctggcaaagccagcaattatctttactgtcctacctcaagggtatatgaactctctgactttgtgtcataatcttatttggagagaacttgattgctttttgtttctgcaagatatcacactggtccattacattgatgacattatgctaattggattcagtgaacaaaaagtagcaaatatgctggacttattgcctgcactgatggcctcatggggaattccctatgataagttgacagaggaagagaagactaggccctggttcacagagggttctgcacgatatgcaggcaccacccgaaagtggacagctgcagtactacagcccttttctaggacacccctgaaggacagctgtgaaggaaaatctccccaccaccccgtcatcgcccaatgggcccatgaacaaagtggccatggtggcagggatggaggttacttgtgggctcagcaacatggatttccactcaccaaggctgacctggctatggccactgctgagtgcccaatttgccagcagcagaaacgaacattgaaccctcaatatggcatcattctttggggtgatcagccagttatctggtggcaggttgattatatcggacttcttccatcatggaaacggcagagatttgtcctcactgaaataaacacttactccagatatgggttttcctatcctgcacccaatgcttctgccaagactaccatccgtgggctcacagaatgccttattcaccatcatggtattccacacagcactgcctctgaccgaggcactcactttacggctaaagaagtgcagcagtgggctcatgctcatggaattcactggccttaccatgttcctcatcatcctgaagcagctggattgatggaatggtggaatggccttttgaagtcacaattacaatgccaactagccaggattcatgggtccaggaatcaagtggtggaagcagaagtggcaccacttaccatgacacctagtaatccactagcaaaattttttcttcctgttcccacgacattacattctgctggtctagaggtcttagctccagagggaggaacaatgccaccaggagacacaacattaaatccattcaactggaagttaagattgccacctggacactttgggctcctcctatctttaagtcaacaggataagaagggagttacagtgttggttggggtgacagacccggactatcaagatgaaatcagtcttttactccacaacggagacgcaataaaaaatgataaaggggatatcaccaccaatcccacagaaatacaaactaccatcagagaatactacaaacacctctatgcaaataaactagaaaatctagaagaaatggataaattcctcgacacatgcactttcccaagactaaaccaggaagaagttgaatatctgaaaagaccaataacaggatccgaaattgtggcaataatcagtagcttaccaaccaaaaaaagtccaggaccagatggattcacagccgaattctaccagaggtacaaggaggaactggtaccattccttctgaaactattccaatcaatagaaaaagagggaatcctccctaattcattttatgaggccagcatcatcctgataccaaagccgggcagagacacaaccaaaaaagagaattttagaccaatatccttgatgaacattgatgcaaaaatcctcaacaaaatactggcaaaccgaatccagcagcacatcaaaaagcttatccaccatgaacaagtgggcttcaaccctgggatgcaaggctggttcaatatacgcaaatcaacaaatgtaatccagcatataaacagaaccaaagacaaaaaccacatgattatctcaatagatgcagaagaggcctttgacaaaattcaacaacccttcatgctaaaaactctcaataaattaggtattgatgggacatatttcaaaataataagagctatctatgacaaacccacagccaatatcatactgaatgggcaaaaactggaagcattccctttgaaaactggcacaaggcagggatgccctctctcaccactcctattcaacatagtgttggaagttctggccagggcaattaggcaagagaaggaaataaagggtattcaattaggaaaagaggaagtcaaactgtccctgtttgcagatgacatgactgtatatctagaaaatcccattgtctcagcccaaaatctccttaagctgataagcaacttcagcaaagtctcaggatacaaaatcaatgtacaaaaatcacaagcattcttatacaccaacaacagacaaacagagagccaaatcatgagtgaactcccattcacaattgcttcaaagagaataaaatacctaggaatccaacttacaagggatgtgaaggacctcttcaaggagaactacaaaccactgctcgaggaaataaaagaggatccaaacaaatgtaagaacattccatgctcatgggtaggaagaatctatatcgtgaaaatggccatactgcccaag

SEQ ID NO: 130668 - DNA, 402 bp, Homo sapiens
aggttgctgcttcaggaacggagggagtgagagccttttctgacgatgccgaagaaggctcatccctcaccccagacgcctgtcgcccgttgtaataaggcgcatccaggtaccacaggacagcctggggcaggccctagcaggccaggccacaccagagatcccattggggctgcagctgcacactgtccttgtccaggagattcaggagctcattgaggcacagtcacgtggtgaggtggcctgcagcctggaagactttgcaggggcggtgcttttgggctggaattcccttaaattcagtgaggtcgtttctgtgtttggaaattccagtggaaagtgactgatgctggtgcaccctttctcctttctcagctcctggtccatgtgcagactcgtgcc

SEQ ID NO: 130669 - DNA, 1107 bp, Homo sapiens
atgacagaagagcccctgcaggctctggtgctgtcagcagttttactctatcaggaagcctatgtgagaaggtccctcacagctcttggcctggacacatttgccaactttgcacacttttctgaaatgcaaccactttcagatgctccctgtggcctcgtcacaggggtcaccaggcccctggtggcttacagtgtggaagttggaggcttcaccataatctgtggcctgagcttggcctcagggaatatttccgggtggtgtcagctgtatctcctccttactcagtgtcgtaggggagcagcgactctctgggacagtgggatgggtggaggacgtcagtcctccaggcagacgtcagtccccaggtggaccctggactcaaagtgtataccaggccccaagttgacaaccaggccccagatggacaccaaggccctaggtggacagcaggcccatgttgaacaccagactcatgaggacatcaggccgcaggtggacacccaggccccaggtggacacaaggccttaggtgaacaacaagacccagtaggccatcaggcctcagttggatacagtccccaggtaccacaggacagcctggggcaggccctagcaggccaggccacaccagagatcccattggggctgcagctgcacactgtccttgtccaggagattcaggagctcattgaggcacagacacgtgctcctggtccatgtgcagaagtaagagcactgccagcaccagcggcggagccagagccagcatgggaagaggcccctccagagagagcactggagctggagggagctccagccaaggaccagaccaatgaggagctgcctgaaatcacggcacgtactgtagccactggccctaaccctggaactgaaagcgtggctggagagaaaagtgggagggagggggtgaccagcacagccccagccagcagctcccatgctgcccctagtcctgggcacggtggcaaacatgcaggcagagagcagggcatttggcctggcctcctgtacctcgctgcagagaggcttctctcattcactagaaccacagtcctgctgctgcaggtccgtttattctcctga

SEQ ID NO: 130670 - DNA, 795 bp, Homo sapiens
atgactctacagatcacgaactggacccatgatcagtcctcgcacagatcactgtggtcaagaggatgctgtcctcccactgatcaagcctacgtgacatgtcacctacggaatggagggagtgagagccttttccgacgatgccgaagaaggctcatccctcaccccagacgcctgtcgcccgttgtaataaggcgcatccaggtaccacaggacagcctggggcaggccctagcaggccaggccacaccagagatcccattggggctgcagctgcacactgtccttgtccaggagattcaggagctcattgaggcacagacacttgctcctggtccatgtgcagaagtaagagcactgccagcaccagcggcggagccagagccagcatgggaagaggcccctccagagagagcactggagctggagggagctccagccaaggaccagaccaacgaggagctgcctgaaatcacggcaccacctggagcagctagcacactgtgggccctgcgtaagtacaccgtggtgatcaagatgtgccattttgagcctgaacaagtgttcactactgtgaggctgtccccttatagagtcagggcctatggccagaccagccctgtgacagagatggagcccggaacgaaggaccctgagagccagatcaagggacacaagagccaggatcatggagaagcggatgttgagaagcccccagccaggctgcacaaaggcagccccgagtcaggtgcctgtggagacagcagtgagaaacagacatttctgccctactga

SEQ ID NO: 130671 - DNA, 966 bp, Homo sapiens
atgtccaccaccacatgccaagtggtggcgttcctcctgtccatcctggggctggccggctgcatcgcggccaccgggatggacatgtggagcacccaggacctgtacgacaaccccgtcacctccgtgttccagtacgaagggctctggaggagctgcgtgaggcagagttcaggcttcaccgaatgcaggccctatttcaccatcctgggacttccaggaactccaataactccagccagaggctcagggacagacccggatctccctggtactgagcccctatgggggaagggtggccacaacctctgcagaccagcagacttagcctttcctcctggcagttctgaggaatccgagcagcccagacgagtgggtttcccttcaaaaaacaaacaagcagaaagcaacaacaacagcatcatcaacaacaacaaaaaggcccccacaaaaaccccatccaagtttcagcagcctcaaagacagaaactagacaaactcatgaagatgagaaagaatcaatggaaaaatgctgaaaacccaaaaggccagagtgcctcttctcctcagaatgatcacaatgtctctccatcaagggcacagaacagcatggaggatcagatggacaaattgacagaagtaggcttcaaaagatgggtaataaaaaaacccattgagctaaaggagcatgttctaaaccaatgcaaagaagctgagaactttgataaaaggttagaggaattgctaactagaaaaaccagtttagagaggaacataactgacctgatggacctgaaaaacacagcacaagaactctgtgaagcatatacaagtatcaatagccaaattgaccaagtggaagaaagaatatcagagtttgaagaccaccttgctgaaataaggcatgaagacaagaccagagaaaatagaatgaaaaggaatgagcaaagcctccaagaaatatag

SEQ ID NO: 130672 - DNA, 381 bp, Homo sapiens
atggtgtgtccggagttcattccttcagatgttcagatgtgtccagagtttattccttctggtgggttcgtggtctcgctggcttcaggaatgaagctgcagaccttcctggtgagtgtcacagctcttaaaggcggcgcatctggagttgttccttcctcccgtccagagttgttcatccctcctggtgggtttgtggtctcgctggcttcaggagtgaagctgcagaccttcacagtgagtgttacagctcataaaggcggtgcagacccaaagcagacccaaagcttccacaaagaacaaggcttccacagcctggaaggaaaccccaacacgttgccaccgctggctcgggcagcctccttttattcccttatctga

SEQ ID NO: 130673 - DNA, 585 bp, Homo sapiens
atgaagccgcggacccttgcggtgagtgttacagttcttaaaggcggcgtgtccagagtttgttccttctggtgttcggatgtgttcagggtttcttccttctggtgggttcgtggtctcgccgactcaggagtgaagctgcggaccttcgcggtgagtgttacacctcttaaggcggcgcgtctggagttgttcgttcctcctggtgggttcgtggtctcgctggcttcaggagtgaagctgcagcccttcgaagtgagtgttacagctcataaaggcagtgtggacccaaagagtgagaagcagcaagatttattgcaaagagggaaagaacaaagctaccacactggagaagggcacccgagcaggttgccactgctggctcaggcagcctgcttttattctcttatctggccccacccacatcctgctgattggtacagccgagtggtctgttttgacagggcgctgattggtgcatttacaatccctgagctagacacaaaggttgtccacctccccaccagattagctagatacagagtgtccacacaaaggtggttctccaagtccccaccagagtag

SEQ ID NO: 130674 - DNA, 372 bp, Homo sapiens
atggccctgtgttctctgccctgttgtatgctccccactgaggatggagagccctgctctgagactgtgtccggaattggtgggttcttggtctcgctgacttcaaagaatgaagccacggacccccatggagtgaagctgcagaccttcacggtcagtgctacagctcagaaaggcagtgcggacccaaagagtgagcagcagcaagatttattgcaaagagcaaaagaacaaagctcccacaacgtggaaggggacataaaggggttgctgctgctgactcaggcagcctgcttttattcctttatctggccccacccacatcctgctgattggcccattttacagagagctgattggtccattttatag

SEQ ID NO: 130675 - DNA, 2788 bp, Homo sapiens
gaagtatcgctgcgagaagccacccagcgaaaattgcggaggttttccgagctaagaggcaaacttgtagcacgtggagaattctgggacatagttgcaataacagcggctgatgaaaaacaggaacttgcttacaaccaacagctgtcagaaaagctgaaaagaaaggagttaccccttggagttcaatatcacgtttttgtggatcctgctggagccaaaattggaaatggaggatcaacactttgtgcccttcaatgtttggaaaagctatatggagataaatggaattcttttaccatcttattaattcactctgatgaatggaagaaaaaagtcagtgaatcatatgttatcacaatagaaagattagaagatgacctgccgatcaaggaaaaagaactgacagaactaaggaatatatttggctctgatgaagccttcagtaaagtcaatttaaattaccgcactgaaaatgggctgtctctacttcatttatgttgcatttgtggaggcaagaaatcacatattcgaactcttatgttgaaaggggctccgcccatctcgactgacaagaaatggatttacagccttgcatttagcagtttacaaggataatgcagaattgatcacttctctgcttcacagtggagctgatatacagcaggttggatacggtggcctcactgccctccatattgctacaatagctggccacctagaggctgctgatgtgctgttgcaacatggagctaatgtcaatattcaagatgcagtttttttcactccattgcatattgcagcgtactatggacatgaacaggtaactcgccttcttttgaaatttggtgctgatgtaaatgtaagtggtgaagttggagatagacccctccacctagcatctgcaaaaggattcttgaatattgcaaaactcttgatggaagaaggcagcaaagcagatgtgaatgctcaagataatgaagaccatgtcccactccatttctgttctcgatttggacaccatgatatagttaagtatctgctgcaaagtgatttggaagttcaacctcatgttgttaatatctatggagatacccccttacacctggcatgctacaatggcaaatttgaagttgccaaggaaatcatccaaatatcaggaacagaaagtctgactaaggaaaacatcttcagtgaaacagcttttcatagtgcttgtacctatggcaagagcattgacctagtcaaatttcttcttgatcagaatgtcataaacatcaaccaccaaggaagggatgggcacactggattacactctgcttgctaccacggtcacattcgcctggttcagttcttactggataatggagctgatatgaatctagtggcttgtgatcccagcaggtctagtggtgaaaaagatgagcagacatgtttgatgtgggcttatgaaaaagggcatgatgccattgtcacactcctgaagcattataagagaccacaagatgaattgccctgtaatgaatattctcagcctggaggagatggctcctatgtgtctgttccatcacccttggggaagattaaaagcatgacaaaagagaaggcagatattctcctcctaagagctggattgccttcacatttccatcttcagctctcagaaattgagttccatgagattattggctcaggttcttttgggaaagtatataaaggacgatgcagaaataaaatagtggctataaaacgttatcgagccaatacctactgctccaagtcagatgtggatatgttttgccgagaggtgtccattctctgccagctcaatcatccctgcgtaattcagtttgtgggtgcttgcttgaatgatcccagccagtttgccattgtcactcaatacatatcagggggttctctgttctccctccttcatgagcagaagaggattcttgatttgcagtctaaattaattattgcagtagatgttgccaaaggcatggagtaccttcacaacctgacacagccaattatacatcgtgacttgaacagtcacaatattcttctctatgaggatgggcatgctgtggtggcagattttggagaatcaagatttctacagtctctggatgaagacaacatgacaaaacaacctgggaacctccgttggatggctcctgaggtgttcacgcagtgcactcggtacaccatcaaagcagatgtcttcagctatgctctgtgtctgtgggaaattctcactggcgaaattccattcgctcatctcaagccagcggctgcggcagcagacatggcttaccaccacatcagacctcccattggctattccattcccaagcccatatcatctctgctgatacgagggtggaacgcatgtcctgaaggaagacccgaattttctgaagttgtcatgaagttagaagagtgtctctgcaacattgagctgatgtctcctgcatcaagtaacagcagtgggtctctctcaccttcttcttcttctgattgcctggtgaaccggggaggacctggccggagtcatgtggcagcattaagaagtcgtttcgaattggaatatgctctaaatgcaaggtcctatgctgctttgtcccaaagtgctggacaatattcctctcaaggtctgtctttggaggagatgaaaagaagtcttcaatacacacccattgacaaatatggctatgtatccgatcccatgagctcaatgcattttcattcttgccgaaatagtagcagctttgaggacagcagctga

SEQ ID NO: 130676 - DNA, 1224 bp, Homo sapiens
actagggcctccagctttgtcctaaggccagcgggctggacgctattgcctctcaaaatccaccgacaaatccagccgtggagaaacagccccacggcatcaaactcttccagcagtgcgcttcccgaataagctgtggctgttttagttgtagttgtttggttttgttttgagaggtgacagcgtgctggcagcccttgcagccatcgcttgctctcggtgcctcctcggcctcggcgcccactctggccgcgcttgagaagcccttcagcccgccgctgcactgtgggagccccttcctgggatggccgaggctggagccggctccctcagcctgcagggatgtgtggagggagagggacgggcaggaaccgggggtaagcgcggcgcttgcgggccagccagagttccgggtgggcgtgggcttggcgggcccgcactcggagcggccggccggccccgcaggccccggcagtgaatggcttagcacccgggccagcagcgcggagggtgcgccgggtcccccagcagtgccggcccacctggcgctgggctcgatttctcgccgggccttagctgcctccctgtggagtagggctcgggacctgcagcccgccatgcctgagcctctcccctcttccaccaatcggctctctgtaaaacagaccaatcggctctctgtaaaatggaccaatcagcaggatgtgggtggggccagataagagaagaaaagcaggctgcctgagccagcagtggcaacccgcttgggtccccttccacactgtggaagctttgttcttttgctcttcgcaataaatcttgctgctgctcactctttgggtccacactgcctttatgagctgtaacactcactgtgaagatctgcagcttcactcctgaagccagcgagaccacaaacccaccaggagcaacaaacaactccagatgcgccgccttaacagctgtaacactcaccgcgaaggtctgcagcttcactcttgagccagcaagaccacaaacccaccagaaggaagaaactcaggaaaacagccgaacatcagaaggaataaactctggacacaccacctttaagaactgtgacactcgctgcgagcgtctgtggcttcattcttgaagtcagtgagaccaagaacccaccaattttggacacaattgcactctagcctgggcaacaagagtgaaactccatctcgaaaaaaaaaa

SEQ ID NO: 130677 - DNA, 1557 bp, Homo sapiens
aaagctatccagtatggtcttcaagataaggaagaagagattaagcaggaaggtccctggacaaaacaaagactttccaaactgagaaaatgggggtcacagaagtgcttagagaaagctggtggaactgaagatgtctggttttcaaacaaggagaatgtagagtgtatggaccaagatgaatggaagaaaaaagtcagtgaatcatatgttatcacaatagaaagattagaagatgacctgcagatcaaggaaaaagaactgacagaactaaggaatatatttggtgggtttgtgatcttgctggcttcaggagtgaagctgcaggccttcatggtgagtgttacagctcataaaggcagtgcggacccaaagagtgagaagcagcaagatttattgcaaaaagcgaaagaacaaagctcccacggcaagaaatcacatattcgaactcttatgttgaaagggctccgcccatctcgactgacaagaaatggatttacagccttgcatttagcagtttacaaggccgagggagccagctccagcctcggccatcccaggaaggggctcccacagtgcagcagcgggctgaagggctcctcaagtgcggccagagtgggcgccaaggccgagaaggcaccaagagcgagcgagggctgcaagagctgccagcacgctgtcacctctcaccatgtcctgtccgctgccgaccggccgcctcctgaaccccttgctgtctgtgatgacgcagaaccactatgggaaaccaaggatgaaggagaggagaatgccttgcccaagacctcagtgctaaaattctcggcagctgtggtttgtattcacctggggctggcagcatcgggaccaccaggagacccggtggaaatgcacacctctggggcgcactccagacttgctgcatcggaagccatggcacaaccaactctccaggtgactgaggctaacacaagtttgagaactactgccctggcccttgctttctcggctgggactgacgttctgcacaggcgtcaccgaaccctctgtggggccgtggatcccggcaccttcccaggcgtcaccgaaccctctgtggggccgtggaacccggcaccttcccaggcgtcaccgaaccctctgtggggccgtggaaccacacagttgagggagcgtgggccagccgagaagcctttccgagaagcagagcagcagctcccagccagagaaagagccgggctgggactctgggagcctccaaaggacagggtgggcctcggggcctcagagcagttccagacggctgcaggagtgggagaagcagcagtttctcaagaagagcgagaaggcttggaccacagcctccgcttcctcttctggagaaaagccacagctcagcgatgctggctgataattctgcagcctctgtccctggagcctgcagcagaggctgggagtttcgaacagccctgggagctcctggaggcacagcctgcgaccctgagggataagctccatctccagaaggaacgagtggatgaggtcagagcccagcagtga

SEQ ID NO: 130678 - DNA, 846 bp, Homo sapiens
atggcggtggggcctcgacgtgggcgtcgtcagcgggatcaagggcttccacaggacacctccatggtgtggttgacctggcccagcccctcgctgctctctgagtgggtgcaggcctgtgggcggctgccatccaccgagctggcactggtgagggatgcagtgcgggagcgtgccaggcgggtcatgctggctgagggcactgtggacagagacaggatgggcctgaggactggcgggcagggccaggtgcctctggtgggaaaagtaggctgcaagcaaagcggccagcgaaccgttcctcgaaggcacaaagggctcctcctgagtcaggaggctggcgacagctgtcgggctgggggcatgcagggccggcgacatgtgatatgtgaaagtgggacactggtctttttgcaagtaggaaggcagttgtttctgcgcattggcactcgagcaatatgttccaaaacggttcagagtcagagctctaaaatgggcgattcgggctctgaaatgctcatcttccccgacctgctggaggggctggtgctggtgaacatcgaccccaatggcaaaggctggatagactgggctgccaccaagctctccggcctaactagcactttacccgacacggtgctctcccacctcttcagccaggaggagctggtgaacaacacagagttggtgcagagctaccggcagcagattgggaacgtggtgaaccaggccaacctgcagctcttctggaacatgtacaacagccgcagagacctggacattaaccggcctggaacggtgcccaatgccaagacgctccgcttgctccgaaccctggatggctga

SEQ ID NO: 130679 - DNA, 745 bp, Homo sapiens
ggagtgctgggatggggaacatgacatcgagacaccctacggccttctgcatgtagtgatccggggctcccccaaggggaaccgcccagccatcctcacctaccatgatgtgggcctcaaccacaaactatgcttcaacaccttcttcaacttcgaggacatgcaggagatcaccaagcactttgtggtgtgtcacgtggatgcccctggacaacaggtgggggcgtcgcagtttcctcaggggtaccagttcccctccatggagcagctggctgccatgctccccagcgtggtgcagcatttcgggttcaaagtatgtgattggcatcggagtgggcgccggagcctatgtgctggccaagtttgcactcatcttccccgacctggtggaggggctggtgctggtgaacatcgaccccaatggcaaaggctggatagactgggctgccaccaagctctccggcctaactagcactttacccgacacggtgctctcccacctcttcagccaggaggagctggtgaacaacacagagttggtgcagagctaccggcagcagattgggaacgtggtgaaccaggccaacctgcagctcttctggaacatgtacaacagccgcagagacctggacattaaccggcctggaacggtgcccaatgccaagacgctccgctgccccgtgatgctggtggttggggataatgcacccgctgaggacggggtggtggagtgcaactccaaacc

SEQ ID NO: 130680 - DNA, 950 bp, Homo sapiens
aaatgtcaagaccacgattgtgcaagtcaagtgtcagcacactaatcaatcgagctcggtaccgagccttaggttcttcaaaaaccagggctaagctacaagtgcacatcggggatcagggggcaagagcccagatacaaatgggaccatcagggaaccaaaaggagctgtccaacctcaagagaagtgagacgataactagacgtaaaacgcgcagtctcgccgcctcatgtgccgacgctggtaacactgctgtggaccaccgcagaactgccggccacgagcagagagaaagaggcatcaacacgacagagaaaaccacaaatagaaaacagatgtcgataccttcttttgttccgtttctcttcctctgctcgtacaggaaggatgaggtggctcggcagcgccacgtcgcgcgaaccttcggtcaggctgacgtagttttgcaggaagatggacataccgattgcagagatgagtgcaatcaggcgcttagagttacgcaccgggcggtcctagaagcttatggcatgattcagggcattggcctcaacatttaccaccgctactcaccctggtgggaggcacgtggctaccagtggcattacactgctgacatgagcaaccttttccgaagataccagttcaacgtggccacctggctcatcttccccgacctggtggaggggctggtgctggtgaacatcgaccccaatggcaaaggctggatagactgggctgccaccaagctctccggcctaactagcactttacccgacacggtgctctcccacctcttcagccaggttcctggtccaaccactgaccctccaggagatggaactagtcacatccccagcaagaccctctttctccacgttgggccttcagaagagacctcactgagtgtgcagggtgcaactgtagttagtgggatgtcagtgaaatga

SEQ ID NO: 130681 - DNA, 636 bp, Homo sapiens
atgggatcaactgtaccccaaacttcagcatcacacaatatacccagagtgaagcaacatggatgcagtcagccaagtccccatggaagtcgtgcttcccaagcacatcctggatttctgggtattgtcctcattatctgggcacattgtcatcatgacctcgtggtgctgtgcccagcatgcagaatcatctttgcatgtgactcatcctccttatgggctgttgagagcttccaaaggccgcacggtgatgacaacacaggaaggcatatttcacaagaggccagaaaaagagccaatcagtcagttgctaaacacattaatcagatcttcagtgctccagctcaggctgaggtgatgctggtgtgggagagcccagcccgtttggaatggggccaaggactctccacagtagcttctccccttgctgtgaagatgaacaaattgattgaatattaccagcagcttgctcagaaagagaaggttgagcgagatcgcaagaaactggcacgacgtagaaactatatgcctctggctttttcgagcaggtgctggtatccacaactgagagacctgaagacggactgcatcactggactctttgcagacactccccagtaccagctcggagactga

SEQ ID NO: 130682 - DNA, 1324 bp, Homo sapiens
tttgtgccatgtaagatgttcctacttccacttccgccatgactgtaagtttcctgaggactccccagaagcagaagttgctatgcttcctgtacagcctgcagaactggagttcctcgtaggtctggttggacctttgtatggtaatgaagatttagatcccctgttaggaaacctgctggatctgtctatggcagtgcagaaattttcccagtcattgcaagatttccagtttgaatgtattggtgatgctgaaacagatgatgaaattagtattgactctcaggaaagtcttgaacagtatgagctttggactcaagagattaaacatttaccaagaaggagagtcactttgctagtaaatatttttggtggagacttcattcctttagacacacctaaacagaaaattcctgtggtagtgacaggcatacactaccatttgtcaactaagagtaaaaggagcaaagacagactcaaccaacttaatcttacatttcaagataagaaaacactctacactccatccatgggtcgactaatgcattttcaagcttcaaatatcagctgcattctcagtcgaagaggacgaccatccccgataaaggaggaccagtctcggtcaaggaataattgtggtcctatgcctagacataacgccaggacttactgtggcagccccgacattcatgaaaccccaagtccaagtacctatcaacgtgggcactcaagattgaataggtctccaaacacgaagtgtgttcgggttcttgatcttcttcctatttattctcattttcctaatgccgaagtaatgatgaggtcaaaaaaaccatcaagactacgtctgcacaagcgtcagagagacatggatgccaatccagggatcaccacttactgccatgtgtttcagagcaagtacttagcccctctgaatcataactcatcattttatgatgcagccacagtgcctgccagtcaaggaaaaaactacagtgacaacaaaaatcatcacagtcaaactgtccgtattccaaaaggatggcaccaggttcaagcagctgaagaagagacccagagccagcacacaaaacacagggctttattagtgggaaacttacatacggagtggtccagtgacagtgggatggaacagaagaaccaccaacccacttgtaaaaagcatgcagctgtacaagttccaattaccatgtttcctgtgtttatttatatcgagatagcatgtgacataaacatcccaactcagtcactaaaagaatttgcaagactactcattgcagtagaagaagaaaggcgaagactg

SEQ ID NO: 130683 - DNA, 1246 bp, Homo sapiens
tttcgcttccccagtgaggaaactgggattcagagaagtcaaagtcaccagcaaggaagtggccgagtctgaacttgaactccctggtggtgccgccagtgcactttcctcctcctgagatgtgggttgattcttttaaagccttgtgaataacactcttgggcttagaagggtccccagtgttcatattggctcgaaagatgggcccacagctaccactgcaaatctgctccagaacttcagagagttgctcccgcggcacctgcagcttagccagggcaggtgtggtagctcccagaaagttttccacggatgtctccttaagtggcaaagccacatttcctccatgtcctgcttcccagcttaggtcccctttaagatcaacgttcttgagcagatcacgaagcatatcgaaaaactgcagtgcggaggtgtagtcaaacaactcagcaggcgtgggaacaatcagcacatcagcagcacatacgacattaatcgtgccgatacccaggttaggcgcgctgtcaataactatgacatcatagtcatgagcaacagtttcaatggccagtcggagcatcaggtgtggatcggtgggcagtttaccttcatcaaatttgcccattaactcagtttcaatacggtgcagagccagacaggaaggaataatgtcaagccccggccagcaagtgggctttattgcataagtgacatcgtccttttccccaagatagaaaggcaggagagtgtcttctgcatgaatatgaagatctggtacccatccgtgatacattgaggctgttccctgggggtcgttaccttccacgagcaaaacacgtagccccttcagagccagatcctgagcaagatgaacagaaactgaggttttgtaaacgccacctttatgggcagcaaccccgatcaccggtggaaatacgtcttcagcacgtcgcaatcgcgtaccaaacacatcacgcatatgattaatttgttcaattgtataaccaacacgttgctcaacccgtcctcgaatttccatatccgggtgcggtagtcgccctgctttctcggcatctctgatagcctgagaagaaaccccaactaaatccgctgcttcacctattctccagcgccgggttattttcctcgcttccgggctgtcatcattaaactgtgcaatggcgatagccttcgtcatttcatgaccagcgtttatgcactggttaagtgtttccatgagtttcat

SEQ ID NO: 130684 - DNA, 1366 bp, Homo sapiens
atgaatgataggaatgagattcaaatggaagccaaactccaaagtcttaccattatagcacaggaaattctatgcaggttctttattacccttaggagacatgcacgtttcctgctcactaaactaggaaggcaaggaatggcaaggtcaggaattactcacagctgtgctgtgtgcattctctgtgggcctagcagggaaggggacagccctgtggcaatgggcatgacacggatgctcctggaatgcagtctcagtgacaagttgtgtgtcatccaggagaagcagtatgaagtgattatcgtcccaactttgttggttactatcttcctcatccttcttggggtcatcctgtggctttttatcagagaacaaagaactcaacagcagcgttctgggacctcaaggcattgcccctgttcctccacctaggggacctaagctggggaagcagggacatgggagggaaatgtgggctttgccacttaaagggagacatccgtgggaaaacttttctggggagcttaccacaccttgcccgggttaaggctggcaggtgccgcgggagcaactctctgaagttctggagcagatttgcagtggtagctgtgggcccatctttcgagccaatatgaacactggggacccttctaagcccaagagtgttattctcaaggctttaaaagaaccagctgggctccatgaggtacaagatttcttagggcgaatccaattccatcaatacctggggaaacacaaaaacctggtgcagctggaaggctgctgcactgaaaagctgccactctatatggtgttggaggatgtggcccagggggacctgctcagctttctctggacctgtcggcgggatgtgatgactatggatggtcttctctatgatctcacagaaaaacaagtatatcacatcggaaagcaggtccttttggcgctggaattcctgcaggagaagcatttgttccatggggatgtggcagccaggaatattctgatgcaaagtgatctcactgctaagctctgtggattaggcctggcttatgaagtttacacccgaggggccatctcctctactcaaaccatacctctcaagtggcttgccccagaacggcttctcctgagacctgctagcatcagagcagatgtgtacagtatcatgaagtcctgctggcgctggcgtgaggctgaccgcccctcacctagagagctgcgcttgcgcctagaagctgccattaaaactgcagatgacgaggctgtgttacaagtaccagagttggtggtacctgaactgtatgcagctgtggccggcatcagagtggagagcctcttctacaactatagcatgctttga

SEQ ID NO: 130685 - DNA, 594 bp, Homo sapiens
atgacaccaagaggcacaggtggagatagtgaagttcctttccaagcagcaaaacctctttctgtgaaacagggggttagctttcggctttgggctcggaggaggccaaggtgcgactttcttcggtcgtcccgaatccgggttcatccgacaccagccgcctccaccatgccgccgaagttcgaccccaacgagatcaaagtcgtatacctgaggtgcaccggaggtgaagtcggtgccacttctgccctggcccccaagatcggccccctgtgtctgtctccaaaaaagaacagacaggcccagattgaggtggtgccttctgcctctgccctgatcatcaaagccctcaaggaaccaccaagagacagaaagaaacagaaaaacattaaacacagtgggaatatcacttttgatgagatcgtcaacattgctcgacagatgcggcaccgatccttagccagagaactctctggaaccattaaagagatcctggggactgcccagtctgtgggctgtaatgttgatggccgccaccctcatgacatcatagatgacatcaacagtggtgctgtggaatgcccagccagttaa

SEQ ID NO: 130686 - DNA, 833 bp, Homo sapiens
ccaaaccctgataacgctagtgacctgattaacccttgcttggcacgagggttgaagagcccccagaggagtgtgagtcccaggggtcccgccagctccactcccaccttccaaacctgtgaaagtcaggtgcctgagtcgcacagtctctcccacccgaatgccatgagctgcagcgacccagcctgtctctgcaggagggccagacatgccgtgacatcaccagctcctctaggaatatgggatacaaggagtggctgagatcggctgatcaccagctcactccgctgcagccgccccagagcagtggctccccgaagccgtgttctggacccctggcacccatcctgggccccaccccatcatccaggccttgggccttcgacctggggagagtccctgtctcctccatgagccgtccagggcctgaagaggttcatctgacaccagccgcctccaccatgccgctgaagtttgatcccaatgagatcaaagtcatatgcctcaggtgcactgggggtgaagtcggtgccacttctgcgctggcccccaagattagccccctgggtctgtctccaaaaaaggttggtaatgacattgacaaggcaataggtgactggaagggccgtaggattacagtaaaactgaacattcaaaacagacaggcccatattgaggtggcaccttctgcctctgccctgatcatcaaagccctcaaggaaccaccaagagacagaaagaaacagaaaaacattaaacgcagtaggaatatcacttttcatgaggtcgttgacattgctcgacagatgcggcaccaatctttagccagataa

SEQ ID NO: 130687 - DNA, 641 bp, Homo sapiens
cggacgcgtgggctcggaggaggccaaggtgcaacttccttcggccgtttctgaatttttgttcatccgacaccagccgcctccaccatgccgtcgaagttcgaccccaacgagatcaaagtcgtatacctgaggtgcaccggaggtgaagtcggtgccacttctgccctggcccccaaaatcggccccctgggtctgtctccaaaaaaagttggtgatgacattgccaaggcaacgggtgactggaagggcctgaggattacagtgaaactgaccattcagaacagacaggcccagattgaggtggtgccttctgcctctgccctgatcatcaaagccctcaagggaaccaccaagagacagaaagaaacagaaaaacattaaacacagtgggaatatcacttttgatgagattgtcaacattgctcgacagatgcggcaccgatccttagccagagaaactctctggaaccattaaagagatcctggggactgcccagtcagtgggctgtaatgttgatggccgccatcctcatgacatcatcgatgacatcaacagtggtgctgtggaatgcccagccagttaagcacaaaggaaaacatttcaataaaggatcatttgacaactggaaaaaaaaaaa

SEQ ID NO: 130688 - DNA, 738 bp, Homo sapiens
atggcttctcatgcttatgataaaaatcaaaatgccaatgtcttagtccacttgtgcttctataacagaatacccaagactggagcatattacctagattctaggagtgtgagcatcagttatttgattggccatcatatagacatgggtcttgagacagccacttccaaaaatgaattcattttcgatagtgcaaataggtatgagaatgccagctccagctacaagggggctgcagtggtagctgctcctcttggagagcatagtggcatggactcagatcagctccatcagctgataccagtgttggcgataactggggagaagggtggtccttggtggcaaaagctgcaggtgtttgcagcggtgcatggatcccccttctgctctctgggaccacactcccttgttaggctaaaggtggctcccatgcctgaaggccttaggctcctactggacaaacacagagaatcaaatacacactcactcttctggacaggaaaagaaacatccagctcatctcacatccaggaaagtgccgcactaaatgcccacatttcaaacacaggcccaagagcttgcagttctcaggaccagctacaagtagggaaaggcccaaagatgagggagtctggaggctttggagaggtgctacttctggaagagaaaaagctacagaggaggggtgctgttgtggcagtgaaggaagaaggagaaattgaaaacactgcacagtga

SEQ ID NO: 130689 - DNA, 1746 bp, Homo sapiens
atggcttctcatgcttatgataaaaatcaaaatgccaatgtcttagtccacttgtgcttctataacagaatacccaagactggagcatattacctagattctaggagtgtgagcatcagttatttgattggccatcatatagacatgggtcttgagacagccacttccaaaaatgaattcattttcgatagtgcaagtacactgctggggatgctttttaggaaaccctcccaacactctctctccctttttagcaagaaattccaggagaatctgatatacctggaatctgatgactgcttgccacctcctccccctccaccttggtctgagccaccgtcatttctcacctggactatcgtcacagttttccagtgggtctccctgcttctgtccttgcccaacatacaggtcattctttacagagcagttggagtagtaccttcacaacctaagtcagacaacctgaaaggatggggatcggggagagtcgttaaagagaagctcagatcagagatacctgactggaagattaaaagtattcacatactggagaggactgcttcctctagcaccgagccctctgtaagtcggcaattgctagaaccggagccagtccccctctccaaggaagctgacagctgggaaattatagaagggctgaaaataggccaaaccaatgtccagaaaccagacaaacatgagggctttatgctgaagaaaagaaaatggcctttaaaaggctggcacaagattcagaaaggaaaggtccatgggagcatagatgtgggactctcagtcatgtcaattaaaaagaaagctcgaagaatagaccttgacaccgaagagcacatctatcatttgaaggtgaaatcagttttcaacagtttctctgccattatcaggggaaacgatttgcctacaccagtggtgaaatcccaggactggtttgatgcatgggtctccaaactgcgacatcatcggttgtatcgtcagaatgaaattgtgagatcaccaagagatgctagttttcacatatttccttcaacgtccacagctgaatcctcaccagctgctaatgtttctgtaatggatggaaagatgcaaccaaacagctttccgtggcagtcccctttaccatgcagcaatagcctccctgcaacgtgcacaactggccagagtaaagtggcagcctggttacaggactcggaagagatggacaggtgtgcagaagatcttgcacattgccagtcaaaccttgtggaacttagcaaactcctgcaaaatttggaaatacttcagagaactcagtcggcacctaactttactgacatgcaggctaactgtgtagatatttcaaagaaagacaagcgggtcacaagacgatggagaacaaaaagtgtcagcaaagatacaaaaatacaactgcaggttcctttcagtgctaccatgtcaccagttcgcttgcattcctccaaccccaacctttgtgcagatattgaatttcagactccccctagccacctcactgaccctctggaaagttcaacagattatacaaagctgcaagaagaattttgtctaatcgcacagaaaggaaagggggcatcaaaaaagcaagccaaaaggaatgctgctgagaaatttcttgccaaatttagtaatatttctccagagaaccacatttctttagtgagtaatgttgacagctatgatgttaatgtcattaagcatttcttgcagtag

SEQ ID NO: 130690 - DNA, 346 bp, Homo sapiens
cgatggcaggtgggggcagcgacctgagcaccagggggctgaacggaggtgtttcacaagtagcaaatgagatgaaccatcttcctgcacacagccaaagtctgcaaaggctgttcacggaagaccaggatgtagatgagggacttgtctatgacactgtattcaagcacttcaaaagacataagctggagatatcaaatgcaataaaaaagacatttccattccttgagggcctccgcgatcgggaactcatcacaaataaaatgtttgaagagaagtgccagaaagcccggaagcaaggaaggaaagtgaccaagcatgtggcaaaatggatactgtggatatt

SEQ ID NO: 130691 - DNA, 649 bp, Homo sapiens
gcagccacactgcacgcaggctgggccgactgagggtctcagaggccattctctgaggcccacgcagggcctatggtgggaggatggcaggtgggggcggcgacctgagcaccaggaggctgaatgaatgtatttcaccagtagcaaatgagatgaaccatcttcctgcacacagccacgatttgcaaaggatgttcacggaagaccagggtgtagatgacaggctgctctatgacattgtattcaagcactttcaaaggaaataaggtggagatttcaaatgcaataaaaaagacatttccattcctcgagggcctccgtgatcgtgatctcatcacaaataaaatgtttgaagattctcaagattcttgtagaaacctggtccctgtacagagagtggtgtacaatgttcttagtgaactggagaagacatttaacctgccagttctggaagcactgttcagcgatgtcaacatgcaggaataccccgatttaattcacatttataaaggctttgaaaatgtaatccatgacaaattgcctctccaagaaagtgaagaaaaagagagggaggagaggtctggcctccaactaagtcttgaacaaggaactggtgaaaactcttttcgaagcctgacttggccacctt

SEQ ID NO: 130692 - DNA, 1668 bp, Homo sapiens
atgcaccatgctccgctggtatatggagaatctgtaggcctctgtgaagaaagcaaagtttctctgatccagaaaacaatgtcagacacactggggttgggaaagggacgggaccacattaagaagacatatccctgtcccctggtaactgacggacagcacagggtcctggtggcccatggacgccacctcatgcctcctttccgaggccacctagccggcgaggcccgccacggacacaccgtgagcacgcgcaacgagcaggggtcggtgatcgccatcccccgtgtccgcctcccgcgttcccgttcccgcggccgccccgcgctcctccgggctccgcccccgcccggccggcgcccagtctcccggcagcgcgtagcgctgcagcctcttcagggctgggcagaaacagaaaccgaaaatcctcctcttatcgggattctagctcaccaaacacttcgaattgtgtgggaacaggttgacatcctatggggccccagcccactaacacaggatgaccgcctggtccggccaggtcatgaagtggccctgggaaccaggttttgctggatatcctgtgtcttaccttgggataaggctctcaggggcaggtgggctataaaactgccagcacaggacaatggcgaaacagttacctgctcctgtgtacccaaggaacttggcatcccccagcaattccacctctctgactggcctggaattgcccctattcctccattagacagcagtggtctaggctgtgagtgtcccaggctgttcacggaagaccaggatgtagatgagggacttgtctatgacactgtattcaagcacttcaaaagacataagctggagatatcaaatgcaataaaaaagacatttccattccttgagggcctccgcgatcgggaactcatcacaaataaaatgtttgaagattctgaagattcttgtagaaacctggtccctgtacaaagagtggtgtacaatgttctcagtgaactggagaagacatttaacctgtcagttttggaagcactgttcagcgaggtcaacatgcaggaataccccgatttaattcacatttataaaagcttcaaaaatgcaatccaagacaaattgtctttccaagaaagtgatcgaaaagaaagggaagagaggcctgacatcaaactaagtcttaaacaaggtaaaaatgacagaataaaaacggtttctcatccgctaagaggaaaaggagacaagggaggagaagtgccagaaagcccggaagcaaggaaggaaagtgaccaagcatgtggcaaaatggatactgtggatattgcaaacaactctactttgggaaaacccaagaggaaaagaaataacagcaaagccgatggccagctggtctcgagtgaaaagaaggcgaacatgaatctgaaagacctttccaagattaggggtcttgctgcttgtcaggcctctcctccaaccgtctgccacatttcagaaaagctgagaaccccttggagtgaaaaaggaggagaaacacggatgcgaactgtccctttatccagcgtatccacaatgtggacaccaccagtccatgagtcactgagtagccatcctggtaatcagatcggctgtcatggtatctcagtgcttgtgttcagagaaccctga

SEQ ID NO: 130693 - DNA, 1535 bp, Homo sapiens
agcttggcgcgccagtgcctcggtttccaggctccgggaataacagaagccagctgagagcgcctgcgcggctgtcggttgatggggaggtcaggtctgggaaactaggccctggggttttccctgagcaagagcggtgcccgagggcctcaggcgtcagtccaggccctgaatggctggtctccagcgggtggcgtcacatctgcctgtgggcgttatgctcccacataatacaacggaagctccagggccccactcatccaagcaagactcttatgaacaaggtgactcttcccagcagtccttgaaggggcacctgaggaacaatttccagaagcagcttttgagcaacaaagagtacgagtctggataaagtctatactcaccccaaatggaccacccaaacaaaagcccggagctactcctatccccactgtactggaatcagccagcaagatccagaaagtgattcccagggccaaggaaatggtttgttttactcgtcaggccctcaatcctggtatcccaaagccaataaccaggactttatcccctttacaaagaaacgagttggagtggaccgggcgttcccattgaaacccatggtccacaggaagtcgtgcagtacaggtgaggctggcactgatggggaccataatgtctacccaaggccccctgagccgagagagttttcatctaggaactttggtgtgaggaaccagggcaacttttctgtggttggtactgttcttgctgccacgcaggcggagaaggccgtggcaaactttgacaggacggagtgggtgcagatccgaagactagaagctgcaggggagagcttagaggaggaaatccgaagaaagcagattctcctgaggggaaagctgaagaagacagaggaggaactcagaaggatccagacgcaaaaggaacaggccaaggaaaatgaaaacggagagctacagaaaattatactccccaggagcagagttaaaggtaataaaagcaacaccatgtacaaacctatcttctccccagaatttgagtttgaggaagaatttagtagagacaggagagaggatgaaacttggggacggtctcaacaaaattcaggtccattccagttctctgattatagaatccagaggctcaaaagggaaaggctggtagcaagcaataataaaattcgagacccagtctcagagccatcggtggagaaattctccccgccttcagaaacaccagtcggtgctttgcagggatccgccagaaattccagcctgtccatggcaccagactcctcaggttccagcggctccattgaagagccacagctgggtgagtgcagccactgtgggcgcaaattcctctcgttcaggctggagagacactccaacatctgcagcaggatgcggggttccaagaggaaagtgtttgactcctccagggcccgggctaagggcacagaactagagcagtacttgaactggaaggggccagcttcagccaaggtaacaagagccttatggatgtga

SEQ ID NO: 130694 - DNA, 630 bp, Homo sapiens
ctggagacagagatcgaggctctcgaggagctgctcttcatgaagaagaaccacgaagaggaagtaaaagacctacaagcccagattaccagctctgggttgaccatggagctgcctcagaagagccgagaggagccagacaagtactgctctcagcagatggaggagagcaccacagtggtcaccatgcagtctgccaaggttggagctgctgagatgatgctcatgaaactgagacgtacagtccagtccttggagattgacctggactccatgagaaatctgaaggtcagcttgggaaacagcctgagggaggtggaggcccactacaccctgcagatggagcagctcaatgggatcctgctgcacctggaatcagagctggcacagacccaggcagagggacagtgccaggcccaggagtacaaggccctgctgaacatcaagctcaagctggaggctgagatcaccacctaccactgcctgctggaagatggcaaggacttcaatcttggtgatgccctggacagcagcaactccatgcaaatcatccaaaagaacactacccactggatagtggatggcaaagtggtgtctgagaataatgacaccaaagttctgagacattaa

SEQ ID NO: 130695 - DNA, 1412 bp, Homo sapiens
cggggtcgtccgcaaagcctgagtcctgtcctttctctctccccggacagcatgagcttcaccactcgctccaccttctccaccaactaccggtccctgggctctgtccaggcgcccagctacggcgcccggccggtcagcagcgcggccagcgtctatgcaggcgctgggggctctggttcccggatctccgtgtcccgctccaccagcttcaggggcggcatggggtccgggggcctggccaccgggatagccgggggtctggcaggaatgggaggcatccagaacgagaaggagaccatgcaaagcctgaacgaccgcctggcctcttacctggacagagtgaggagcctggagaccgagaaccggaggctggagagcaaaatccgggagcacttggagaagaagggaccccaggtcagagactggagccattacttcaagatcatcgaggacctgagggctcagatcttcgcaaatactgtggacaatgcccgcatcgttctgcagattgacaatgcccgtcttgctgctgatgactttagagtcaagtatgagacagagctggccatgcgccagtctgtggagaacgacatccatgggctccgcaaggtcattgatgacaccaatatcacacgactgcagctggagacagagatcgaggctctcaaggaggagctgctcttcatgaagaagaaccacgaagaggaagtaaaaggcctacaagcccagattgccagctctgggttgaccgtggaggtagatgcccccaaatctcaggacctcgccaagatcatggcagacatccgggcccaatatgacgagctggctcggaagaaccgagaggagctagacaagtactggtctcagcagattgaggagagcaccacagtggtcaccacacagtctgctgaggttggagctgctgagacgacgctcacagagctgagacgtacagtccagtccttggagatcgacctggactccatgagaaatctgaaggccagcttggagaacagcctgagggaggtggaggcccgctacgccctacagatggagcagctcaacgggatcctgctgcaccttgagtcagagctggcacagacccgggcagagggacagcgccaggcccaggagtatgaggccctgctgaacatcaaggtcaagctggaggctgagatcgccacctaccgccgcctgctggaagatggcgaggactttaatcttggtgatgccttggacagcagcaactccatgcaaaccatccaaaagaccaccacccgccggatagtggatggcaaagtggtgtctgagaccaatgacaccaaagttctgaggcattaagccagcagaagcagggtaccctttggggagcaggaggccaataaaaagttcagagttcattggatgtc

SEQ ID NO: 130696 - DNA, 479 bp, Homo sapiens
cagcactgcctcaagtatgcgcacaactggctgggctgcaacagcaccctggctcggccccaaccttgctcctagatcagagcagtctccaggagcagggagaggccaggcagcagaagcagatacctccaagcctgctgaggtgggggtgccttcccaggcccctagagtgcagagatatccaggttggtccgcagccacaacctgggtggctacagctgcacaaaggaggtgggggatgcaggaagggctcatgcctgctccagcactcctgcctgctttggcactcctgcctgctcccagcctccaagaacacggtctgtagcaaggacttgggtggctgcagttgcacccaggagagcagggctcctgcctgctcctggtctccaagaacacagggaggctcagccagcagccatgacttgggcagctgcagaaatgcctgggaaactccctcccgccaacttggaaggagctgg

SEQ ID NO: 130697 - DNA, 678 bp, Homo sapiens
  misc_feature (1)...(678): n = a,t,c or g
atggcagcttgtcccatcatcgctgcagctgtcagcaaagaggaggccctgaagtgggtagctcctctctgcaggttggtcctcctgttgtctctgcagctctcagcagaaaagaggccctggacancccaaagtctggagggggctgaagcagcagaggaatggcctgtcagcactgcctcaagtatgcgcacaactggctgggctgcaacagcaccctggctcggccccaaccttgctcctagatcagagcagtcaccaggagcagggagaggccaggcagcagaagcagatacctccaagcctgctgaggaaaacccctggagccaagaggtattccggcagaagttcaggcagtttagttactctgactccactggccctcgggaggctctgagccggctgcgagagctttgctgtcagtggttgaggccggaggtgcactccaaggagcagatcctggagctgctgatgttggagcagttcctggccatccttcctgaggagctgcaagcttggctgcgagagcatcggccagagaatggagaggaagctgtgactatgctggaggagctggaaaaagaactggaggagccaaggcaacaggtcttagatccaggccttgttggagagggcacagccacagcccactggatggagatgccactgcagtgctga

SEQ ID NO: 130698 - DNA, 452 bp, Homo sapiens
  misc_feature (1)...(452): n = a,t,c or g
ggaactggaagaaagggcttttcttcctggttctggcatgttctttgtgtatgtttctgtagcacatgggacacccagcagtgcacatcccaatgagttccaaaggcccctatccctatgggtagcttcccagcaagttctgtaccaggtcagctccccatggggagcttcctagcacccccagagtgtggctccctcagtgagttctgcccagctcagcactgcagtggcatctcccatccagtgggcttgtggctgtgccctctccaacaaggccctggatctaagaccctggcaggaaaggggaagttgtggcaccctcctgcaaatttgttcttacctttgatgttctgcctcagccctagagacactctatatctgttattgctgtattcttttgagtttcactttttgttataacacttagtagttaataattcttaanattaaac

SEQ ID NO: 130699 - DNA, 990 bp, Homo sapiens
atgcttgaggcagtgctggaagagagccctcgggaggaggcggctttctcctgggtcatgaaggggaatctggctgcaggaaaaaccatccaagcgcaagacagagatgctgtgggcatcctcagttccagaactggggaatccatggaaaacctgcagaaaaacttgctgcccaagcagaggaggcgaacgagggaaactttcacaatgtctggagcgcttgatgtcctgcaaatgaaggaggaggatgtccttaagttccttgtagcaggaacccacttaggtggcaccaatcttgacttccagatggaacagtacatctataaaaggaaaagtgatggcatctatatcataaatctgaagaggacctgggagaagcttctgctggcagctcgtgctattattgctattgaaaaccctgctgatgtcagtgttatatcctccaggaatactggccagagggctgtgctgaagtttgctgctgccactgaagccactccaattgctggtcacttcactcctggaaccttcactaaccagatccaggcagacttctgggagccaaggcttcttgtggttactgaccccagggctgaccaccagcctctcacggaggcatcttatgttaacctacctaccattgctctgtgtaacacagattctcctctgcgctatgtggacattgccattccatgcaacaaccagggagctcgctcagtgggtttgatgtggtggacgctggctcgggaagttctgcgcatgcgtggcaccatttctcgtgaacacctatgggaggtcatgcctgatctctacttctacagagatcctgaagagattgaaaaagaagagcaggctgctactgaaaaggcagtgaccaaggaggaatttcagggtgaatggactgctccagctcctgagttcactgctactaagcctgaggttgcagactggtctgaaggtgtacaggtgccctctgtgcctattcagtag

SEQ ID NO: 130700 - DNA, 494 bp, Homo sapiens
atggttgaagaaaatcataccatgaaaaatgagtttatcctcacaggatttacagatcaccctgagctgaagactctgctgtttgtggtgttctttgccatctatctgatcaccgtggtggggaatattagtttggtggcactgatatttacacactgtcggcttcacacaccaatgtacatctttctgggaaatctggctcttgtggattcttgctgtgcctgtgctattacccccaaaatgttagagaacttcttttctgagggcaaaaggatttccctctatgaatgtgcagtacagttttattttctttgcactgtggaaactgcagactgctttcttctggcagcagtggcctatgaccgctatgtggccatctgcaacccactgcagtaccacatcatgatgtccaagaaactctgcattcagatgaccacaggcgccttcatagctggaaatctgcattccatgattcatgtagggcttgtatttag

SEQ ID NO: 130701 - DNA, 1511 bp, Homo sapiens
atggctgaaaggggccaacataaagcttgggctgtggcttcagagggtggaagccccaagctttggcagtttccatgtggtgttgagcctgcaggtgcacagaagtctagaattgaggtttgggaacctccttctagatttcagaagatgtacggaaatgcctggatgcccaggaagaagtttgctgcaggggtggtgccctcatggagaacctctgctagggcagtgcagaaggcaaatgtggggttggagccccaacacacagtccctactggggtaccgcctagtggagctgtgagaagaggaccaccgtcctccagaccccagaatggcagatccactgacagcttgcactgtgaacctggaaaagccacagacactcaatgccagcccgtgaaagcagccaggaagaaggctgtaccctgcaaagccacaggggtggagctgcccaaggctttgggaacccacctcttgcatcagcaccttgcacttctccttgctgctgccatgtgaagaaggatgtgtttgcttcctcttctgccatgattgtgcatgtaggctggcaacagatcagtatctccctgggatggagcttccagaggaaggatctggctgttatctttgctgtttcatggccttcactggtgatactttcaggatttttaaacttgacctgctttcatttgaacacctgcaagcatgcgttactaaactatctctataagtatggacgaattttgaatagtcacagtgattataaacaaaagaagaaaacagtgagaatcagtcagagagaaagtgttgtgcgggttaatacaacaaactgtcacaagtgtttgttgtccgggacgtacattttcgcggtcctgctagtatgcgtggtgttccactctggcgcccaggagaaaaactacaccatccgagaagaaattccagaaaacgtcctgataggcaacttgttgaaagaccttaacttgtcgctgattccaaacaagtccttgacaactactatgcagttcaagctagtgtacaagaccggagatgtgccactgattcgaattgaagaggatactggtgagatcttcactaccggcgctcgcattgatcgtgagaaattatgtgctggtatcccaagggatgagcattgcttttatgaagtggaggttgccattttgccggatgaaatatttagactggttaagatacgttttctgatagaagatataaatgataatgcaccattgttcccagcaacagttatcaacatatcaattccagagaactcggctataaactctaaatatactctcccagcggctgttgatcctgacgtaggcataaacggagttcaaaactacgaactaattaaggaggcatttaaatcttttaattttgctgtgaggaaagttattcctaagggatcagtcacagatagctatattacccccatcaaatgcatcattttcctagattccaaaccctatgtagaaatctccaagttgaagaagtaa

SEQ ID NO: 130702 - DNA, 2187 bp, Homo sapiens
tagttcacaaggcaccccttacaagctttttcacctttccaatttgcttcaaatgccgaacgactgtagaatggtcaatgttgagttcttcagcaacttcaggtgtagttataagaggatcagcttcgatgattgctctcaattggtcactgtcaacttccgatggctggccactatgctcctcatcttcaaggctctcctctcctttgtgaaacttcttgaaccaccactgcactgtgcgttcattagcagttcctgggccaaatgtgttgctgatgttgtgagttgtctccgctgctttatgacccattttgaacttgaataagaaaattgctcgaatttgctttttgtctaacatcatttccatagtctgagtcaccgccgccgccgccgccacagccatggccgagagtggtgaaagcggcggtcctccgggctcccaggatagcgccgccggagccgaaggtgctggcgcccccgcggccgctgcctccgcggagcccaaaatcatgaaagtcaccgtgaagaccccgaaggaaaaggaggaattcgccgtgcccgagaatagctccgtccagcagtttaaggaagaaatctctaaacgttttaaatcacatactgaccaacttgtgttgatatttgcttggaaaaattttgaaagatcaagatactttgagtcagcatggaattcatgatggacttactgttcaccttgtcattaaaacacaaaacaggcctcaggatcattcagctcagcaaacaaatacagctggaagcaatgttactacatcatcaactcctaatagtaactctacatctggttctgctactagcaacccttttggtttaggtggccttgggggacttgcaggtctgagtagcttgggtttgaatactaccaacttctctgaactacagagtcagatgcagcgacaacttttgtctaaccctgaaatgatggtccagatcatggaaaatccctttgttcagagcatgctctcaaatcctgacctgatgagacagttaattatggccaatccacaaatgcagcagttgatacagagaaatccagaaattagtcatatgttgaataatccagatataatgagacaaacgttggaacttgccaggaatccagcaatgatgcaggagatgatgaggaaccaggaccgagctttgagcaacctagaaagcatcccagggggatataatgctttaaggcgcatgtacacagatattcaggaaccaatgctgagtgctgcacaagagcagtttggtggtaatccatttgcttccttggtgagcaatacatcctctggtgaaggtagtcaaccttcccgtacagaaaatagagatccactacccaatccatgggctccacagacttcccagagttcatcagcttccagcggcactgccagcactgtgggtggcactactggtagtactgccagtggcacttctgggcagagtactactgcgccaaatttggtgcctggagtaggagctagtatgttcaacacaccaggaatgcagagcttgttgcaacaaataactgaaaacccacaacttatgcaaaacatgttgtctgccccctacatgagaagcatgatgcagtcactaagccagaatcctgaccttgctgcacagatgatgctgaataatcccctatttgctggaaatcctcagcttcaagaacaaatgagacaacagctcccaactttcctccaacaaatgcagaatcctgatacactatcagcaatgtcaaaccctagagcaatgcaggccttgttacagattcagcagggtttacagacattagcaacggaagccccgggcctcatcccagggtttactcctggcttgggggcattaggaagcactggaggctcttcgggaactaatggatctaacgccacacctagtgaaaacacaagtcccacagcaggaaccactgaacctggacatcagcagtttattcagcagatgctgcaggctcttgctggagtaaatcctcagctacagaatccagaagtcagatttcagcaacaactggaacaactcagtgcaatgggatttttgaaccgtgaagcaaacttgcaagctctaatagcaacaggaggtgatatcaatgcagctattgaaaggttactgggctcccagcatcatagcagcatttctgtatct

SEQ ID NO: 130703 - DNA, 745 bp, Homo sapiens
tttcgtgaagggccagggagaaggaagcggtggctgctgcggatgtcggtgtgagcgagcggcgcctgaacacacggcggctgccgagcgcctgacccgtgcctgcgccagagcctgcaccgagctccggggccccacaccccgctacggtggccctgcgcccgttgctactgaggcggcgtgctctgcattcttcgctgctccaggcctgccggctctggtgtctgctggctcctccttgctcgcctgctccctcctgcttgcctgagtcaccgccgccgccgccgccacagccatggccgagagtggtgaaagcggcggtcctccgggctcccaggatagcgccgccggagccgaaggagctggcggccccgcggccgctgcctccgcggagcccaaaatcatgaaagtcaccgtgttgcttcttccagatcccttttgatctactttcagctttgaaatgatgtaatagcaactgcatcttttgttcgtgttccttttgctggagggtcagtctccggtcacactgcaattttagatggtccagtgcagattctaattcacgaaccatattatcccgttccagaactttcattttcatttcttcattatataactgttgtttccgttcagcttctcgcaaattcaccactatctcggtttgaaagcgccacacgcaccaagaaaacaagatagaattcagattctgatccagcaggtccacttggggcctgaggatctgcat

SEQ ID NO: 130704 - DNA, 1044 bp, Homo sapiens
tcacttgccagctatgttcagggccttcccaccagggtctgccacatagccctctggaacctctgtctccttggttatgcagaacagggcgagaaggaaagtgctgaaggtgacgccaaatgtgaagagtttccggtgtcgcttcaggacctggaagtcatctgccaggcccgtgatgacagcctccatgcctcccataagaacagagacactttctcctcccgctgactctccaaagatggtcacagagcctgggttccctccaaagctggcaatgttgtcctggacccagcgcagggcagccacctggtccaggtgaccccagttcccccggctgtgttcatcccctgtgcttgcaagcagccagctgtgttgcctatgggtgggacagacagatgcatcaagttcccaggtttgacaaaagagggcctttggctttttctctcccttggccaagggtgaaattaacgtctgaaccttcctggacccctttgtgcgggcacctccatcctttttgctgtcctcatggaagccatcggagtttcctgcatcagacaagctggtggaggccacgtggcaagccacatctactgaggcctcatgctgctcttgctctgtaagacacggagcccagaaacccatctgcacttcctgagacctgcctctgtggttccgggccacaatcacagatgggacaccaaacatcacatctgctatcaagtccaggaacaggtctttctttttgacagtgtcgtctgttcctcctaagtatttctcagtggcttctggaatcagttccttagcaatgcactgaaaccagcagacaaaagccatcagcctctgcttcctacaacactggaacacctcactggtccggaagggctgagaaaccctggggatgcttgttggaagaaaccagccaaattccttcctgttaaatccgacaatgtaggggacagtgtggaacttcctttcagcttgaagctcctcgggtgtttttggcagcaccactccatcaatcaccgtgggtgtgtgggggtaact

SEQ ID NO: 130705 - DNA, 1029 bp, Homo sapiens
atgcctgtaatttctgagagtgatgtggccctcactcctgctctggtggagaagggtgacgtcaagcccctggctgagcaaattgctatcactgctgggtgtaaaaccaccacctcagctgtgatggttcactgcctgcgacagaagacggaagaggagctcttggagacgacattgaaaatgagttacccccacacacccacggtgattgatggagtggtgctgccaaaaacacccgaggagcttcaagctgaaaggaagttccacactgtcccctacattgtcggatttaacaggaaggaatttggctgcttcttcctggagaagaatatgtttgttttcttcttgaacatcttgcggcaaaagtcgggccgttacgtgtgcgttcagctgctgcagaccttgaacatcctctttgagaacatcagtcacgagacctcactttgtaaggacattccttggtatttgcctctgtgctgctgtgcatgtagcaggatgaaagcgctgtatggcgtggagtcgatgccacaaaccgccgaaaacgtcgctctaaagttcggtattaaccgtcaggatcaggacgcctttgccctgcgtagccagcagcgcaccgccgccgcgcaagaaagcggctttttcgccgaccagttaattgaggtcagtattgcccagaagaaaggcgatccgctgcggttctgtcaggacgaacacccgcgcgccaccacgctggaagccctggcgaagctgaagccggtggtggatccgcagggcacggtgacggccggtaatgcctccgggttgaacgacggggcctgcgcactgctgctggccagcgaactcggggtgactcgccacgggctgcaaccgatggcacgcattgtcgccagcgccgttaccgggatcgaaccctcaattatgggctttgcaccggcggatgcggtacgcaaggtgttgaagattgccggattgagcctcgaccaaatggacgttatcgagcttaacgaagtgccgtgcagagaactagggtga

SEQ ID NO: 130706 - DNA, 2087 bp, Homo sapiens
agatctggggaaagggagggcttttctgatctctcccaattagaggattaggcaattggcagtgcagggcggtaactgggggccagggtggcgccagggctggacagcacagtccctctgagctgcacggagacctcgcaggcccccggaactgtcgcccttccaggatgtggctccctgctcttgtcctggccactctcgctgcttccgcggcttgggcagggcatccgtcctcgccacctgtggtggacaccgtgcatggcaaagtgctggggaagttcgtcagcttagaaggatttgcacagcctgtggccattttcctgggaatcccttttggcaagccgcctcttggacccctgaggtttactccaccgcagcctgcagaaccatggagctttgtgaagaatgccacctcgtaccctcctatgtgcacccaagatcccaaggcggggcagttactctcagagctatttacaaaccgaaaggagaacattcctctcaagctttctgaagactgtctttacctcaatatttacactcctgctgacttgaccaagaaaaacaggctgccggtgatggtgtggatccacggaggggggctgatggtgggtgcggcatcaacctatgatgggctggcccttgctgcccatgaaaacgtggtggtggtgaccattcaatatcgcctgggcatctggggattcttcagcacaggggatgaacacagccgggggaactggggtcacctggaccaggtggctgccctgcgctgggtccaggacaacattgccagctttggagggaacccaggctctgtgaccatctttggagagtcagcgggaggagaaagtgtctctgttcttgttttgtctccattggccaagaacctcttccaccgggccatttctgagagtggcgtggccctcacttctgttctggtgaagaaaggtgatgtcaagcccttggctgagcaaattgctatcactgctgggtgcaaaaccaccacctctgctgtcatggttcactgcctgcgacagaagacggaagaggagctcttggagacgacattgaaaattggaaattcttatctctggacttacagggagacttcaaagagagtcaccactatttggccaccgtgattgatggggtggtgctgctgaaaacacctgaagagcttcaagctgaaaggaagttccacactgtcccctacatggtcggaattaacaagcaggagtttggctggatgcttccaatgcagttgatgagctatccactctccgaagggcaactggaccagaagacagccatgtcactcctgtggaagtcctatccccttgtttgccattgctaaggaactgattccagaagccactgagaaatacttaggaggaacagacgacactgtcaaaaagaaagacctgatcctggacttgatagcagatgtgatgtttggtgtcccatctgtgattgtggcccggaaccacagagatgctggagcacccacctacatgtatgagtttcagtaccgtccaagcttctcatcagacatgaaacccaagacggtgataggagaccacggggatgagctcttctccgtctttggggccccatttttaaaagagggtgcctcagaagaggagatcagacttagcaagatggtgatgaaattctgggccaactttgctcgcaatggaaaccccaatgggaaagggctgccccactggccagagtacaaccagaaggaagggtatctgcagattggtgccaacacccaggcggcccagaagctgaaggacaaagaagtagctttctggaccaacctctttgccaagaaggcagtggagaagccaccccagacagaccacatagagctgtgaatgaagatccagccggccttggagctggacgaggagcaaagactggggtcttttgcggaaagggattgcaggttcagaaggcatcttaccatggctggggaattgtctggtggtgggggcaggggagagaggccgagaggccatgaaggaggcaagcttttgtatttgtgacctcagcgtttgggaataaaggatcttttgaaggccaca

SEQ ID NO: 130707 - DNA, 1971 bp, Homo sapiens
atgagtgaactcccaatcacaattgctacgaagagaataaaatacctaggaatccaacttacaagggatgtgaaggacctcttcatggagaactacaaaccactgcccagggaaataaaagaggacacaaacaaatggaagaacattccatgctcatggataggaagaataaatatcatgaaaatggccacactgcccaagagctctccaactgtcagcagcacctgtactaaagtgctctatttcactgaccggtcacttacgcccttcatggtcaatataccaaagagggcaccgcaaacggcactcagcctccagagaaccgccatctcgttcctgagggctcaaggtcatccaccaacccggaaccacttaggcgacaattcccacccacgacgacgaaagaaaacagggaagaggaaatgctgggtgaaccggaagtcgagaggcggtgcacacccgtcgcgcatgcgcaaacacagctgtcggaaggtggcgagcctgaggcgaacaatggcggagctgggcgaagccgatgaagcggagttgcagcgcctggtggccgccgagcagcagaaggcgcagtttactgcacaggatgccttgcagcagagattgactcagcaggacacatctgttcttcagctcaaacaagagctactgagggcaaatatggacaaagatgagctgcacaaccagaatgtggatctgcagaggaagctagatgagaggaaccggctcttgggagaatataaaaaagagctggggcagaaggatcgccttcttcagcagcaccaggccaagttagaagaagcactccggaaactctctgatgtcagttaccaccagaattttctgccccaccccaccaccaacccggaaccttccaggcttcttcccaaagcatttctgagaggagaactcactcttggacagatacgaagcagtactatgagcaatccagatcactttcctcaactgttactgccaaaagaccaagtttcaggcaaagcagtgtgtctgatagaagagatttccagtactgaaatccaggtggagatgaagatgccagcctatgaactaaaaattgtgcatgatcacagcccctctggaacactcctgccccgtagtgcccctcgtccccgctccgtagagaaagagcgtgcgtgccgcgcatttctggcctggggagcgggtggagtaaacctgcgggaaccattttacgacaacgtgcggctgtgcggtgtggctgacggcaacgccgctgctcttggagaggttccattgccttctctttcccccacaatgcaggcaggcaccatagcccgttgggaaaaaaaagagggggacaaaatcaatgaaggtgacctaattgcagagagggggatttggcagggtcataggacaatagtggagggaaggcctgaggatattgaggcctttaaaaattatacactggattcctcagcagcacctaccccacaagcggccccagcaccaacccctgctgccactgcttcgccacctacaccttctgctcaggctcctggtagctcatatccccctcacatgcaggtacttcttcctgccctctctcccaccatgaccatgggcacagttcagagatgggaaaaaaaagtgggtgagaagctaagtgaaggagacttactggcagagatagaaactgacaaagccactataggttttgaagtacaggaagaaggttatctggcaaaaatcctggtccctgaaggcacaagagatgtccctctaggaaccccactctgtatcattgtagaaaaagaggcagatatatcagcatttgctgactataggccaaccgaagtaacagatttaaaaccacaagtgccaccacctaccccacccccgattttccatgatgatgatgccatccctggatgggaagggaaaattgtagcttgggtggaagaagaccatggagagaattaa

SEQ ID NO: 130708 - DNA, 463 bp, Homo sapiens
gacagcgcacgttatgttggatcctccagagcggtcgccgggctggagaccccgcccggggagcccccagcaggaacaatgctagcctgcctgacccgagggaacttactggacgtcctgcaggagggcttcaatgagcaacagctgcaggcctatgtggcctgggtgaatgcacagctgaagaagaggccagcagtgaagcctgtgcaggacctgcgacaagatctccgggatggggtgatcctggcatatctcatcgagattgttgcaggagaaaagctgagtggggtacagctgaatcccggttacccaacaggagatgaagaataatgtgggagaaagtgctacagttttgtgggtctcctaaaaagttcgtatgcaccagactttcggctaaagatattttgggattggaaacctgaagtctatcataaagctgatccttaccttagcagctcatttc

SEQ ID NO: 130709 - DNA, 1026 bp, Homo sapiens
tttttttttttagccaaaatgaaggtcctttaattcacatgactttagcactgaaaacccaaaacatatgatgctcttctttcacaccaaaggcattgtgatgattagcgtggatttttctttgataaattttgctggggtcatttcagtatcaataagttttggaagattcagatgtaatctgtacttctcagatacttcaatcaataaatcatcctcagaaacactaaggtcacagagagagacagaattaataccaggtaattcaactttcaactcaattttcagaggtttctcactgtgatcatgcacaatttttaagttcataggctggcatcttcatctccacctggatttcagtactggaaatctcttctatcagacacactgctttgcctgaaacttgggtcttttggcagtaacagttgaggaaagtgatctgggattgctcatagtactgcttcgtatctgtccaagagttagttcccttctcattttttctcttaaatctatggaatcagtttggattcccatcagattttgtttcattctttgaatgcttccttttattctaaatttggtaatatggtaagagtgtgagagggtgaactggaatttctcctcaatgcatttcatggccatctgaattaactgattttttttcacttggtccttttctgctgcatgaagaacatcaggattgtaggcaacatcaatgactgtgtaagcatctgatatctcagttgtatcttctggtttgccaacagttagaggtactggatgagtggttgattggggagctgggatccttgttccactgacacagggttgataaaaagtattttttctttgggtttcaaaatcctggtctgtagacaaagctgtggttctggggcagcacagagctgtttcccttctttcagctgctgctgaataaacttctcatagccctcagggtcactctgagctagatcatctaggaggttccaaaactgagtaacttgggtaagcagaccttttgaggat

SEQ ID NO: 130710 - DNA, 1545 bp, Homo sapiens
atggcagaaggcaaggaggagcaagtcacattttacatggatggcagcagacaaaaagagagacagagtttgtgcagggaaactctgcctcataagccatcagatatcgtgaggcattgtgccaaggtcagtgcttacaggcacataaataacggacacaaagtgattgctgctacaagagagaaacgtttaaaaaaaaaagctatttatgcagagaaggagcaacaggatggaaggctggaggaatcaggaaaaggtcaacagggaaggagacatctggctggttctttacggatgtctgccaattgcagagaggacaagggcagagatgcttacacagtcattgatgttgcctacaatcctgatgttcttcatgcagcagaaaaggaccaagtgaaaaaaaatcagttaattcagatggccatgaaatgcattgaggagaaattccagttcaccctctcacactcttaccatattaccaaatttagaataaaaggaagcattcaaagaatgaaacaaaatctgatgggaatccaaactgattccatagatttaagagaaaaaatgagaagggaactaacatcattggaccagatacgaagcagtactatgagcaatccagatcactttcctcaactgttactgccaaaagaccaagtttcaggcaaagcagtgtgtctgatagaagagatttccagtactgaaatccaggtggagatgaagatgccagcctatgaactaaaaattgtgcatgatcacagtgagaaacctctgaaaattgagttgaaagttgaattacctggtattaattctgtctctctctgtgaccttagtgtttctgagcaacagctgcaggcctatgtggcctgggtgaatgcacagctgaagaagaggccagcagtgaagcctgtgcaggacctgcgacaagatctccgggatggggtgatcctggcatatctcatcgagattgttggcccctctggaacactcctgccccgtagtgcccctcgtccccgctccgtagagaaagagcgtgcgtgccgcgcatttctggcctggggagcgggtggagtaaacctgcgggaaccattttacgacaacgtgcggctgtgcggtgtggctgacggcaacgccgctgctcttggagagaatgaggtaatgcattctgaagcaacccagatgtcaccatctgatctaactatatttggtttgcagaaggaactgctgaaatgtaaacaagaagccagaaacttacaggggataaagatcaccacatgtcaaaagaacaccaactggggactttcattcaacagacagcacttgacacctatgatacagcttggatgtctgtcccctccaaatctcatgctgaaatatgatccccctgacttccgtttccgggtcagagccatggtggtggcaacttcaagccctgctaaccccatggtgttctttgatgtcagcaatggcagtcaggaagttggccgcacaaagatcgagctctctgcagacgttgtgcctaagacgaccgagaactttgggtag

SEQ ID NO: 130711 - DNA, 453 bp, Homo sapiens
ttcgaagcaactggtggcaaaaggttagcatttatgatggcagggacagcgcgccattaccgagagatggcgatccaggccaagaaaaaggtgaccacggccaccgaccccattgaaagactccgactgcagtgcctggccaggggctctgctgggatcaaaggacttggcagagtgtttaaaattatggatgacgataataatcgaacccttgattttaaagaatttatgaaagggttaaatgattatgctgtggtcatggaaaaagaagaggtggaagaacttttccagaggcttgataaacatggaaatggaacaatagacttcaatgaatttcttctcacattaagacctccaatgtccagagccagaaaagaggtaatcatgcaagctcttagaaagttagacaagactggagatggtgttataacaatcgaagaccttcgtgaagat

SEQ ID NO: 130712 - DNA, 487 bp, Homo sapiens
aacggagtggcggcggcatttcctggtgtctgagcctggcgcggaggctatgggcagccaggaggtgctgggccacgcggcccggctggcctcctccggtctcctcctgcaggtgttgtttcggttgatcacctttgtcttgaatgcatttattcttcgcttcctgtcaaaggaaatcgttggcgtagtaaatgtaagactaacgctgctttactcaaccaccctcttcctggccagagaggccttccgcagagcatgtctcagtgggggcacccagcgagactggagccagaccctcaacctgctgtggctaacagtccccctgggtgtgttttggtccttattcctgggctggatctggttgcagctgcttgaagtgcctgatcctaatgttgtccctcactatgcaactggagtggtgctgtttggtctctcggcagtggtggagcttctaggagagcccttttgggtcttggcacaagcacat

SEQ ID NO: 130713 - DNA, 1950 bp, Homo sapiens
atggaggatgctgaggggactgtgactttgctggcagtgacattagtggcaagagacttgaactgtatacagcctcagacaggtccttcaggaggtattccagaagaaagcattgttatcataggagatgtcagctccatgcatgttattgcccctgaagaccttccagtgggacaagatgtggaggtggaagacagtgatattgatgatcctgaccctgtaagagctttgcccttacaaatccacgcatgtggtcgggtaggttttgaagcccatgatgactggtctgaaggaggagatcctgctgctgataccttaatagacccctctcaagatgcaaggtatttaaaatgtgaggggatgcaggcaccccacaattccaacccagttgcccagaaaacagaaattagctatcacatatggattgccaggattcccagggaaaagtctggaaaggtcacggggacactctgtgacctactcaaggacctcactgtcattcattcccttatccccaagcagggctgcagtgatgggctgggagttcttgtccagggcacattccagccgcagggcaatactgacacttgcacctgccaagtttcagcagtggaaggaaaaggagagggcctgatgcaattggccagtctgtcccggagagtgactatctgggcttatggcgactctcaagagagagatctcaagacccaattagaaaagatcacagcaatcaaagacatgaaggaaatgcaggagaaggaatatagaataatggagaaagcccattccaggcagaggaaacagcaccataaaggccctgagaggaaggagcaggcagcaatctttgctgttctgcaacctccactggtgataaccaggcaaacagggtctggagtggacccccagaaaactccagcagacctgcaaaagaggtgccggacagttagaagaaaaactagccaacagaaagcagtagcatcaacattaacaaaaaggataaccacacaaaaactcaatgcaaaggatcacaactcctcaccaacaagggaacaaaactgtacagagaatgagtttgatgaattgacagaagtaggtttcagaaggtgggtaataacaaactcctctgagctaaaggagcatgttctaacccaatgcaaggaagctaagaactttgataaaaggttagaggaattgctaattcaaataaccagtttagagaagaacataagtgacctgatggagctgaaaaacacagcacgagaacgttggaagcatacacaagtatcaatagccaaatcgatcaagcagaaatggaccgctagccagactaataaagaagaaaagagagaagaatcaaatagcacaataaaaaatgataaaggggatatcacaactgatcccacagaaatacaaactaccatcagagaatactataaacatctctatgcaaataaactagaaaatttagaagaaatggacaaattcctggacacatacaccctcccaagactaaaccaggaagaagtcgaacccctgaatagaccaataacaagttctgaaattgaggcagtaattaatagcctaccaaaccaaaaaagtccaggacagacgaattcacagctgacttctaccagagatgcagaaaaggccttcaataaaattcaacaccccttcatgctaaaaacactcaataaactagatattgatggaacatatctcaaaataacaagagctatttatgacaaacccacagccaatgtcatactgaatgggcaaaagctggaagcattccctttgaaaaccggcacaagacaaggatgccctctctcaccactcctattcaatatagtattggaaattctggccagggaaatcaggaattctggaaattacatttggttgaacgagaatggtaaaaaaatagaagaaccatggtctgtctactgctga

SEQ ID NO: 130714 - DNA, 910 bp, Homo sapiens
atggacaacttcttcgcccccgttttcaccatgggcaaatattatacgcaaggcgacaaggtgctgatgccgctggcgattcaggttcatcatgccgtttgtgatggcttccatgtcggcagaatgcttaatgaattacaacagtactgcgatgagtggcagggcggggctttccccaactgcaaaagtagcacccgacaacatgcactgaccccccagggctgctgggcgtgcttggctgatggttcactctcagaagtatctgtccctacccacctcgtaggtgtgtatgatatagtgaataatcttggctcccttgtggccagattaattttccagccaatagaggaaagtttttatatattttttgctaaggtgctggagaggggaaaggatgccacacttcagaagcaggaggacgttgctgtggctgctgcagtcttggagtccctgctcaagctggccctgctggccggcctgaccatcactgtttttggctttgcctattctcagctggctctggatatctacggagggaccatgcttagctcaggatccggcaaggactccgcgggctggtgtgccgggggtccggcgccgcgggccacccacgcccccagccagcaactcggcgcggacggccccgaggccgtggcgcaggacacgcggcggcgcctcgggcccccgacggcgctgtggccccgagcggaacggcccggaagaggagacgcgtccccgggaacccagtgctccgccctggcccagccccgatccagcctgcgcctccacctcgggttgtagacagagcggcggggatcccagaggggttcgcgggtcggacctggagtaccggcccggcgaagcgcgcggctgtcgcccgcacgtgactggctcggacaagatggcatga

SEQ ID NO: 130715 - DNA, 969 bp, Homo sapiens
atgcatgttattgctcccgaagatcttccagtgggacaggatgtggaggtggaagacaacgatattgatgatcctggtcaggccaagaaaaccatggaggagcagtggaccttggtgtccctgctgagcacaagccagcaacaaggacctgtccccccaggctccacggcatcctcagccacagacaagctcagccgctgggaactaacgctgctttactcaaccaccctcttcctggccagagaggccttccgcagagcatgtctcagtgggggcacccagcgagactggagccagaccctcaacctgctgtggctaacagtccccctgggtgtgttttggtccttattcctgggctggatctggttgcagctgcttgaagtgcctgatcctaatgttgtccctcactatgcaactggagtggtgctgtttggtctctcggcagtggtggagcttctaggagagcccttttgggtcttggcacaagcacatatgtttgtgaagctcaaggtgattgcagagagcctgtcggtaattcttaagagcgttctgacagcttttctcgtgctgtggttgcctcactggggattgtacattttctctttggcccagcttttctataccacagttctggggctctgctatgttatttatttcacaaagttactgggttccccagaatcaaccaagcttcaaactcttcctgtctccagaataacagatctgttacccaatattacaagaaatggggcgtttataaactgggaagaggctaaactggcttggggttttttcaaacagtttttcttgaaacagatttttgacagaaggcgggcgatatgttggaggacattttttgaatgtattgaactttggtgatcagggtgtgtatgatataatgaataatcttggctcccttgtggccagattaattttccagccaatagaggaaagttttatatattcttg

SEQ ID NO: 130716 - DNA, 1665 bp, Homo sapiens
atggcacggacgcagggcgcatgcgcccgcgcccccccacccccagctccgcggtcctccaggcagcctgcgcccctcgcgccgcgcccgtggagctcccgggcccggctgccccgctcccgccccagcgccatccctcctggctggggccgcgcgggaggcaaggactccgcgggctggtgtgccgggggtccggcgccgcgggccacccacgcccccagccagcaactcggcgcggacggccccgaggccgtggcgcaggacacgcggcggcgcctcgggcccccgacggcgctgtggccccgagcggaacggcccggaagaggagacgcgtccccgggaacccagtgcccgccctggcccagccccgatccagcctgcgcctcacctcgggttgtagacagagcggggggggatccccagagggggtcgcggggccggacctgggattccggccccgcgaaacgcgcccgctgtcgcccgcacgtgactggctcggacaactcagcgagggggcacaggacagctgcgaattgggacgaacgagcccagagccccgggaaggatcagaacctcgaaggcggcttcaagtcggccccgcagcccgaggtgaccgtgggcggttacgttgcccgagctcgcccccttcttctgagcgcaggggtgttcccgcgccaccgagaccccgggagctcccgatcagactcccagcccgtgaaaggcgttatcggacagggcccagaggcgcccccacagcaagaagaaagtctggggttctccccgtgtgccagtttccccaactgcaaaagtagcacccgacaacatgcactgaccccccagggctgctgggcgtgcttggctgatggttcactctcagaagtatctgtccctacccacctcgtaggtgcggtcagcctctgccgtcagactgcgcaccagcatctgtgggtgaggagagaacctgggctggggcttgacacaaaaggggctttgcctctggacacccccacctgtgccgcaagtggagggggcggggaaacggggaggagggaaagcgagcgatatgtgatgacatttttgaatgtattgaactttggtgatcagggtgtgtatgatatagtgaataatcttggctcccttgtggccagattaattttccagccaatagaggaaagtttttatatattttttgctaaggtgctggagaggggaaaggatgccacacttcagaagcaggaggacgttgctgtggctgctgcagtcttggagtccctgctcaagctggccctgctggccggcctgaccatcactgtttttggctttgcctattctcagctggctctggatatctacggagggaccatgcttagctcaggatccggtcctgttttgctgcgttcctactgtctctatgttctcctgcttgccatcaatggagtgacagagtgtttcacatttgctgccatgagcaaagaggaggtcgacaggtacaattttgtgatgctggccctgtcctcctcattcctggggttatcctatctcttgacccgttggtgtggcagcgtgggcttcatcttggccaactggtttaacatgggcattcggatcacgcagagcctttgcttcatccaccgctactaccgaaggagcccccacaggcccctg

SEQ ID NO: 130717 - DNA, 1521 bp, Homo sapiens
atggatgtcagctctcccccgtgtgtggatggtgttagcatcttgcctccgctgctgatacccaggcaaacagggtctggagtggacctccagcaaaatccaacagacctgcagctgagggtcctgactgttaaaaggaaaactaacaaacagaaaggacatccacaccaaaactccatctgtacgtcaccatcatcaaagaccaaagaatatacattcttctcagtacaacaccacacctattccaaaattgaccacatagttggaagtaaagcagtcctcagcaaacgtaaaacaatagaaattataacaaactgtctcccagaccacagtgcaatcaaactagaactcaggattaagaaactcactcaaaaccacaaaactacatggaaacagaacaacctgctcctgaatgactactgggtacataacaaaatgaaggcagaaataaagatgttctttgaaaccaacaagaacaaagacacaacatacaagaatctctgggacacagttaaggcggtgtgtagagggaaatttatagcattaaatgcccacaagagaaagcaggaaagatccaaaattgacaccctaacatcacaattaaaagaactagagaagcaagagcaaacacattcaaaagctagcagaaggcaagaaataactaagatcagagcagaattgaaggagatagagacacaaaaaaccgttcaaaaaatccatgaatccaggagctggttttttgaaaagatcaacaaaattgatagaccactagcaggactaataaagaagaaaagagagaagagtcaaaaagatgcaataaaaaatgataagttggatatcaccaccgatcccacagaaacacaaactaccatcagagactaccataaacacctctacgcaattaaactagaaaatctagaagaaatggataaattcctcgacacatacactctcccaagactaaaccaggaatctctgaatagaccaataacaggctctgaaattgaggcaataattaatagcttaccaaccaaaaaaaagtacaggaccagacggattcacagccgaattctatcagaggtacaaggaggagctgtgttggaagttctggccagggcaatcaggcaggagaaagaaataaagtgtattcaattaggaaaagaggaagtcaaattgtccctgtttgcagacgacatgattgtatatctagaaaaccccactgtttcagcccaaaatctccttaagctgataagcaacttcagcaaagtctcacgatacaaaatcaatgtgcaaaaatcacaagcattcttatacactaataacagacaaacagagagccaaatcatgagtgaactcccattcacaattgcttcaaagagaataaaatacctaggaatccaacttacaagggatgtgaaggatctcttcaaggagaactacaaaccactgctcaacgaaataaaagaggacacaaatggaagagcattccatgcccacggattggaagaatcaatatcatga

SEQ ID NO: 130718 - DNA, 2317 bp, Homo sapiens; identical to SEQ ID NO: 120362

SEQ ID NO: 130719 - DNA, 915 bp, Homo sapiens
atgaaagtccagaagcttctggcagccaccttttccatcacagtacagccagccttggggggcagactgacacctcacacggccgggtactcctctgagacaaaacttccagaggaacgatcaggcagcagcatttgctgttcaccaatattcgctgttctgcagcctcaactgctgatatccaggcaaacagggtctggagtggacctctggcaaactccaacagacctgcagctgagggtcctgtctgttagaaggaaaactaacaaacagaaaggacatccaccccaaaaacccatctgtacgtcaccatcatcgaagaacaaagttgcaaagctaacagctccttatgagaactcaaaaggcactccttatgttcccagcaataaagatctaaggcccaacagatttgtgagtatccaagagatcgaattctttcttctgaggggggcaagaattgaggttgttgcagacccgtatagaagtgaatttgccactgatgcagaaaaagcagttgacaaaatccaccatctctttatgattaaaaccctcagcaaaatggacattaaagggacgtaccttaaggtaataaaaatcatctatgacaaacccacagccaacatcatactgaatggggaaaagtttaaagcattccctcagagaactggagcaaaacaaggatgcccactttcacgacttctcaacatagtgctggaagtcctagccacagcagtcagacaagtgaaagaaataaaaggcaccgaaattgctaaagaggaagccaaactgttgctgtttgctgataacatgattgtatatctagaaaatcctaaagactcatctaaaaacttcctagaactggtaaatgaattcagcaaagttttaggatacaaaattaaaatacacagtcagtag

SEQ ID NO: 130720 - DNA, 915 bp, Homo sapiens; identical to SEQ ID NO: 121609

SEQ ID NO: 130721 - DNA, 619 bp, Homo sapiens
atgtggaagcctggaagaaataatttttgcacagagatcaagaagaaactctcaaaacgaacaaaggaacactcccccaagtctccatccaggggcagactgacacctcacacggccaggtactcctctgacacaaaacttccagaggaacgatcaggcagcaacatttgctgttcaccaatatccactgttctgcagcctctgctgctggatagccaggcaaatagggtctggagtggacctccagcaaactccaacagacctgcagctgagggtcctgactgttagaaggaaaactaacaaacagaaaggacatccacaccaaaaccccatctgtacgtcaccatcatcaaagaccaaagaacaaagctggatggagaatgactttgacgacttgagagaagaagacttcagacaatcaaactactccaagctacaggaggaagttcgaaaccacggcaaagaagttaaaaaccttgaaaaaagattagacaaatggctaactagaataaccaatgcagagaagtccttaaaggacctgatggagctgaaaaccatggcacgagaactacgtgacgaatgcagaagcctcagtagccgatttgatcaactggaataa

SEQ ID NO: 130722 - DNA, 1815 bp, Homo sapiens
aagtgataacagaattcattgaagtgtagaatgtttaaagaatgtcacatatagagaaagagaatgccgaaaccaatcattggaagagatactacaagggatgctgagctggaatttgacattcagcccaatacaactggcaaacaactttttgaccaggcggagaaaacagttggcttgcgtgaggtttggttttttgggctgctgtatgaacacaggaaaggatattctacatggcttaagctaaatataatgggaccacagcatgatgttagaaaagagaatcctttacagctcaagcttagagctaaagtctttcctgaagatgtttctgaggaaataatttaagagataacgcagagactcttcttcttgcatgataaagaagccatcttaaatgatgagatatattgcccgccagaaactgcagttcttttggcttcctatgctgtccaagccaagtatggagattacaataaagagattcataagccaggctacctggctaatgatagactcctaccccagcgtgtattggaacaacacaaactaacaaaagaacagtgggaagaaagaatacagaactggcatgaagaacatagaggaatgttaagggaggattctatgatggaatacctgaagattgcacaagatctagaaatgtatggagtcaactattttgaaataaaaaataaaaaaggaactgaattgtggctaggtgttgatgctttgggtctgaatatttatgagcatgacgacaagttaacacctaaaattggttttccctggagtgaaatcagaaatatttcatttaatgacaaaaaatttgttataaagccaatcgacaaaaaggcacctgattttgtgttttatgcacctcgtctgagaatcaataagcggattttggccttatgtatgggaaaccatgaactatacatgcgaagaaggaagcctgatactattgaagtacaacagatgaaggctcaggctagggaggagaaacatcagaagcagttggaaagggcacaattagagaatgaaaagaagaaaagagaaatagcagaaaaggaaaaggaaagaatagaacgtgaaaaggaagagctaatggaacgtctaaaacaaattgaagagcagacaattaaagctcagaaagaactagaagaacagactcgaaaagctctagaactggatcaagaacgaaaacgagcaaaagaagaagcagaacgacttgaaaaggagcgtcgagctgctgaagaggcaaagtctgccatagcaaaacaagctgccgaccagatgaagaatcaggagcagctagcagcagaacttgctgaattcactgccaagattgcacttctagaggaagccaagaagaaaaaggaagaggaagcaactgagtggcaacacaaagcttttgcagcccaggaagacttggaaaagaccaaagaagagttaaaaactgtgatgtctgccccccctccacctccaccaccaccagtcattcctccaacagaaaacgaacatgatgaacacgatgagaataatgctgaagctagtgctgaattatcaaatgaaggggtaatgaaccatagaagcgaggaagaacgtgtaaccgaaacacagaaaaatgagcgtgttaagaagcaacttcaggcattaagttcagaattagcccaagccagagatgaaaccaagaaaacacaaaatgatgttcttcatgctgagaatgttaaagcaggccgtgataagtacaagactctgcgacagattcgacaaggcaatacaaagcagcgtatcgatgagtttgaagcaatgtga

SEQ ID NO: 130723 - DNA, 542 bp, Homo sapiens
atgaaattgaaaacctatattaaagggcataagatcaacgtaagagtaactacaatggatgctgagctggaatttgccattcagcccaatacaactggcaaacaactttttgaccagggatatatcggagaatggcaggtggggacccaaactgtatgcattgttccagatgcgctcttgccaaagcagcataaagcaaatgtaacccttaggaagaaggctccctccctcactaggtaagtacaactggcagcctgtgccagggccagctcacctgcccactagacctgccacaccttccactgccaggatgctggtgggacctcataaaatctgaacctgttcatccacaggacctgtggatttcaagtcaaaggaactgaccaagagcaacctctatctttacagcctctgattccatcccttccaggttctttcccaatagtttgcatctcttgggctctttgccaatcaagaacatcatcctccaatttaataattttgaggtgagctagaatttattaaaatgatgttttacctgt

SEQ ID NO: 130724 - DNA, 242 bp, Homo sapiens
tttcgtgaggatgggaagaccgcctgtggccatgagccctccccggtgctcctggggctaaggctggggctgcagccatggggctgggtcagccccagacctggttgctgggtctgcccacagctgtggtctatggctccctggctctcttcaccaccatcctgcacaatgtcttcctgctctactatgtggacacctttgtctcagtgtacaagatcaacaaaatggccttctgggtcgga

SEQ ID NO: 130725 - DNA, 595 bp, Homo sapiens
  misc_feature (1)...(595): n = a,t,c or g
tgcgcggccttcgtgatcgctgcccggccctggaggagctggatctcaccgcctgncgccagctcaaggacgaggccatcgtgtaccctggcaagaggccggcgctggtttccgcagcctctctctggccgtcaacgccaacgtgggggacgccgcggttcaagagttggctcggaactgcccagaactccaccaccttgacctcaccggctgcctccgcgtcggaagcgacggtgtcaggacattggccgagtactgccccgtgctgcgttcgctgcgggtgccggcatctgccaccatgtggcggagtccagcctgagccgcttgcggaagcgcggcgtggacatcgacgtggagccgccgctcaccaggccctggtgctgctgcaggatatggcggcgttcgcaccttttgtcaacctgcaggtctgacccgcctgccaatcggagcacagctggactgtgtggctggggcctgacactgagctgtagggaaactgaactgtgaggacctctggtgagaggccagtgccctgccccaccctggagcttcaaataaagagctttttaccccctcgaaaaaaaaaaaaaaaaaa

SEQ ID NO: 130726 - DNA, 3113 bp, Homo sapiens
cacggtgagtggctggattcagacccctgggtggccgggacaagagaaaagagggaggagggcctttagcggacagcgcctggggctggagagcagcagctgcacacagccggaaagggcgcgcaggcgacgacactcggatccacgtcgacaccgttgtacaaagatacgcggacccgcgggcgtctaaaattctgggaagcagaacctggccggagccactagacagagccgggcctagcccagagacatggagagttgctacaacccaggtctggatggtattattgaatatgatgatttcaaattgaactcctccattgtggaacccaaggagccagccccagaaacagctgatggcccctacctggtgatcgtggaacagcctaagcagagaggcttccgatttcgatatggctgtgaaggcccctcccatggaggactgcccggtgcctccagtgagaagggccgaaagacctatcccactgtcaagatctgtaactacgagggaccagccaagatcgaggtggacctggtaacacacagtgacccacctcgtgctcatgcccacagtctggtgggcaagcaatgctcggagctggggatctgcgccgtttctgtggggcccaaggacatgactgcccaatttaacaacctgggtgtcctgcatgtgactaaggagaacatgatggggactatgatacaaaaacttcagaggcagcggctccgctctaggccccagggccttacggaggccgagcagcgggagctggagcaagaggccaaagaactgaagaaggtgatggatctgagtatagtgcggctgcgcttctctgccttccttagagccagtgatggctccttctccctgcccctgaagccagtcatctcccagcccatccatgacagcaaatctccgggggcatcaaacctgaagatttctcgaatggacaagacagcaggctctgtgcggggtggagatgaagtttatctgctttgtgacaaggtgcagaaagatgacattgaggttcggttctatgaggatgatgagaatggatggcaggcctttggggacttctctcccacagatgtgcataaacagtatgccattgtgttccggacacccccctatcacaagatgaagattgagcggcctgtaacagtgtttctgcaactgaaacgcaagcgaggaggggacgtgtctgattccaaacagttcacctattaccctctggtggaagacaaggaagaggtgcagcggaagcggaggaaggccttgcccaccttctcccagcccttcgggggtggctcccacatgggtggaggctctgggggtgcagccgggggctacggaggagctggaggaggtggcagcctcggtttcttcccctcctccctggcctacagcccctaccagtccggcgcgggccccatgggctgctacccgggaggcgggggcggggcgcagatggccgccacggtgcccagcagggactccggggaggaagccgcggagccgagcgccccctccaggaccccccagtgcgacgcgcaggccccggagatgctgcagcgagctcgagagtacaacgcgcgcctgttcggcctggcgcagcgcagcgcccgagccctactcgactacggcgtcaccgcggaccggcgcgcgctgctggcgggacagcgccacctgctgacggcgcaggacgagaacggagacacaccactgcacctagccatcatccacgggcagaccagtgtcattgagcagatagtctatgtcatccaccacgcccaggacctcggcgttgtcaacctcaccaaccacctgcaccagacgcccctgcacctggcggtgatcacggggcagacgagtgtggtgagctttctgctgcgggtaggtgcagacccagctctgctggatcggcatggagactcagccatgcatctggcgctgcgggcaggcgctggtgctcctgagctgctgcgtgcactgcttcagagtggagctcctgctgtgccccagctgttgcatatgcctgactttgagggactgtatccagtacacctggcggtccgagcccgaagccctgagtgcctggatctgctggtggacagtggggctgaagtggaggccacagagcggcaggggggacgaacagccttgcatctagccacagagatggaggagctggggttggtcacccatctggtcaccaagctccgggccaacgtgaacgctcgcacctttgcgggaaacacacccctgcacctggcagctggactggggtacccgaccctcacccgcctccttctgaaggctggtgctgacatccatgctgaaaacgaggagcccctgtgcccactgccttcaccccctacctctgatagcgactcggactctgaagggcctgagaaggacacccgaagcagcttccggggccacacgcctcttgacctcacttgcagcaccaaggtgaagaccttgctgctaaatgctgctcagaacaccatggagccacccctgaccccgcccagcccagcagggccgggactgtcacttggtgatacagctctgcagaacctggagcagctgctagacgggccagaagcccagggcagctgggcagagctggcagagcgtctggggctgcgcagcctggtagacacgtaccgacagacaacctcacccagtggcagcctcctgcgcagctacgagctggctggcggggacctggcaggtctactggaggccctgtctgacatgggcctagaggagggagtgaggctgctgaggggtccagaaacccgagacaagctgcccagcacaacagaggtgaaggaagacagtgcgtacgggagccagtcagtggagcagaaggcagagaagctgggcccaccccctgagccaccaggagggctctgccacgggcacccccagcctcaggtgcactgacctgctgcctgcccccagcccccttcccggaccccctgtacagcgtccccacctatttcaaatcttatttaacaccccacacccacccctcagttgggacaaataaaggattctcatgggaaggggaggacccctccttcccaacttaaaaaaaaaaaaa

SEQ ID NO: 130727 - DNA, 2711 bp, Homo sapiens
  misc_feature (1)...(2711): n = a,t,c or g
gcggcccccatcttctgacttttcctcgtgtgacccatcttttcaaattcccttacctgaggaaggagcccgattacaaggatatttacctgctcccacccggatctagaagaggaagctaaggcctgggttgggtaactgcctgacgttttactgctctctgtttcctcgagtcactcccagattagtggtgtctagctcagcactgtttctgttatacttcattcataattcccagcgctgttggacgaggatgggaagaccgcctgtggccatgagccctccccggtgctcctggggctaaggctggggctgcagccatggggctgggtcagccccaggcctgggttnctgggtctgcccacagnctgtggtctatggctccctggctctcttcaccaccatcctgcacaatgtcttcctggctctactatgtgggacacctttgtctcagtgttacaagattcatcaaaatggccttctgggtcggagagacagtgtttctcctctggaacagcctcaatgaccccctcttcggttggctcagtgaccggcagttcctcagctcccagccccggtcaggcgccgggctctcctcaagggctgtggtgctggcccgggtgcaggccctgggctggcatgggccgctgctggcgctgtcgttcctggcgttctgggtgccctgggccccagctggcctgcagttcttgctgtgcctgtgcctctatgatggcttcctgacgctcgtggacctgcaccaccatgccttgctggccgacctggccctctcagcccacgaccgaacccacctcaacttcgtactgctccctcttcagcgcggccggctccctctctgtctttgcatcctatgccttttggaacaaggaggatttctcctccttccgcgctttctgcgtgacactggctgtcagctctgggctgggctttctgggggccacacagctgctgaggcggcgggttgaggcggtccgaaaggacccagggtgctcaggcctggatgtggatagcggcctgtgtggagaggagctgcttgtgggccgcgaggacggcggacagcatcaccttgggccggcatctccggcagctggcacgccatcgaaacttcctgtggttcgtgagcatggacctggtgcaggtcttccactgccacttcaacagcaacttcttccctctcttcctggagcatctgttgtccgaccatatctccctttccacgggctccatcctgttgggcctctcctatgtcgctccccatctcaacaacctctacttcctgtccctgtgccggcgctggggcgtctacgcggtggtgcgggggctcttcctgctcaagctgggacttagcctgctcatgttgttggccggcccggaccacctcagcctgctgtgcctcttcattgccagcaaccgcgtcttcactgagggcacctgtaagctgctgaccttggtggtcactgacctggtagaccaggacctggtgctgaaccaccgcaagcaggcagcctcggcactcctctttggcatggatgccttggtgaccaagccaggccacacctttgccccgctgctgggcacctggctgctctgtttctacacaggaggctgccacatgacctgttacatgccacacgcgctcccgcccccacgagcacgcggccgcgccaagcacacggccaaggaggcgggtttggtgcggccactccaaggccaaagcgagaaaatcttactgcgcacgcgcaatagacagccgatggagccaccgatggagccgtccggaggggagcaagagcccggagccgtcaggttcctggacctgccctgggaagacgtgctgctcccacacgtcctgaaccgggtcccgctgcgccagctgctgccggctgcagcgcgttagccgggccttccggtcgctggtgcagcttcacctggccgggctgcgtcgcttcgatgccgcgcaggtgggtccgcagatcccgcgggccgcattggcccggctgctgcgggatgccgaggggctgcaggagctggcactggcgccgtgtcacgaatggctgtcagacgaggacctggtgccggtgctggcgcggaatccgaagcttgcgagatgtggcgttgggcgggctgcgggcaactaagtcgccgggcgcttggggctttggccgagggctgcccacgcctgcagcgcctgtcgctcgcgcactgtgactgggtggacgggctggcgctgcgcggcctcgctgatcgctgcccggccctggaggagctggatctcaccgcctgccgccagctcaaggacgaggccatcgtgtacctggcgcagaggcgcggcgctggtctccgcagcctctctttggccgtcaacgccaacgtgggggacgccgcggttcaagagttggctcggaactgcccagaactccaccaccttgacctcaccggtstgyctccgcgtcggaagcgacggtgtcaggtgcctgggcctgatagggcgggaggagggcagtcacttagcctctgctggtgctgacatccatgctgaaaacgaggagcccctgtgcccactgccttcaccccctacctctgatagcgactcggactctgaagggcctgagaaggacacccgaagcagcttccggggccacacgcctcttgacctcacttgcagcaccaaggtgaggccagcccgggactag

SEQ ID NO: 130728 - DNA, 451 bp, Homo sapiens
aatttcccgtctgcagattcggacggattggcggggccgcttcggcagagtgatgactgatgatgagtccgagagcgtcctctccgactcccatgaagggtcggagctggagctgcctgttatccagctgtgcgggctggtggaggagctcagtttcgaggcaggcgtagatccaaatcccggacaggtatggaccgtggggtaggcctgactgccgaccaaaaacttgagctggtacaaaaagaggttgcggacatgaaggatgacttacgacacacaagggcaaatgcggaacgcgacctgcagcatcacgaggcgatcattgaggaggctgaaattcgatggagtgaagtttcgagagaagtgcatgagtttgaaaaagatattctaaaagccatatccaagaagaaagggagtattttggccactcagaaagtgatgaaatacattg

SEQ ID NO: 130729 - DNA, 893 bp, Homo sapiens
acagtagctcttttctcagcaagatctccttgtccagattgaggtatatttccattgccttgtgaagcttgcttttgtaggcattgagaacctgcagagtgtttccagatgacagctttagctgggtcaattcttgattccttgcgtcaattgtctcaagaaattgagcgttctctatcttcaactgctgaaaatcaacatcgtgaagggcctcactcacctcttccttctgcctcaattgtaaaagcatttttttcctctgaactttgagagaaacatttttcaaacgtaattctccttcatattatccctccggcggttcatgtcctcaatgtatttcatcactttctgagtggccaaaatactccctttcttcttggatatggcttttagaatatctttttcaaactcatgcacttctctcgaaacttcactccatcgaatttcagcctcctcaatgatcgcctcgtgatgctgcaggtcgcgttccgcatttgcccttgtgtgtcgtaagtcatccttcatgtccgcaacctctttttgtaccagctcaagtttttggtcggcagtcaggcctaccccacggtccatacctgtccgggatttggatctacgcctgcctcgaaactgtgcataatctgctgctgatattttaatttctgataatcgtggaggtcgctgatccctgggctccagtttagcgtaatatttctcaaacatctcagtctcagttttgagagcagagtttacatagctgagctcctccaccagcccgcacagctggataacaggcagctccagctccgacccttcatgggagtcggagaggacgctctcggactcatcatcagccatcactctgccgaagcggcccctgccaatgcgtgtgcccc

SEQ ID NO: 130730 - DNA, 639 bp, Homo sapiens
cccgaatccgggttcatccgacaccagccgccttcaccatgccgccgaagttcgaccccaacgagatcaaagtcggatacctgaggtgcaccggaggtgaagtcggtgccacttctgccctggcccccaagatcggccccctgggtctgtctccaaaaaaagttggtgatgacattgccaaggcaacgggtgactggaagggcctgaggattacagtgaaactgaccattcataacagacaggcccagattgaggtggcgccttctgcctctgccctgatcatcaaagccctcaaggaaccacctcgagacagaaagaaactgaaaatccttaaactcagtgggaatatcacttttgatgaaaatggtaacatttgctcgacagatatgcggcccgatccttatccagagaactctctggaaccactaaagagatcctggggactgcccagtctgtgggctgtaatgttgatggccgccaccctcatgacatcatagatgacatcaacagtgagaatgacaaacagccacgaaagagtaagatgagaacttcattcagtccccagattccagggcatgaacactttcactaccttctgcttcttcagcacgttcactgccagttagctttgacattaag

SEQ ID NO: 130731 - DNA, 1103 bp, Homo sapiens
tttcgtgctcggaggaggccaaggtgcaacttccttcggtcgtcccgaatccgggttcatccgacaccagctctcctccaccatgccgccgaagttcgaccccaacgagatcaaagtcggtgcgtgctctggttgtggccggggctgcgggatggagcatccctcggccctgccgcgcgtgcaaagctttccccgtatggggctcttaaagccgctgcctcccagagaccttcccggtgttgcgccgccccggccaagcctcagcctttctgggccttagcttcttcacgtgtaggtggggagggaggactggaccacctgtggcggcttgggagcccgcacgccctaggtataccttgaggttgcaccgggaggtgaaagtcggttgccactttctgcccttggcccccaaagaatcggcccccctgggtcctgtctcccaaaaaaaagttgggtgaatgacatttgccaaaggcaaccgggtgaactggaaagggccttgaggattacaagtgaaactgacccattcaagaacaggacaggccccagattgcacgcgggtgccttcttgccttcttgcccttgattcattcaaagcccttcaagggaaccacccaagagaccagaaaagaaaccagaaaaaacatttaaacaccagttgggaatattcacttttttgaatgagatttgttcaacattgcttcgacagatgcgggcaccgatcccttagcccagagaaactctcttggaaccccacttaaagagattcctgggggactgccccagtccagttgggctggtaatgtttgatgggccgccattcctcatgacattcatcgatgacattcaacagtgggtgctgtggaaatgcccagccgtaagtgacattttcattgttacagtaggggtgaaaggggggccgcccagtgtattcacagagataagctgggaagttttggaaatggttactggtggggtgggataatccttttaaactttttactgattttttttttctttcccacagagttaagcccaaaggaaaacctttcaataaaggatcatttggccactggtggaaaaaaaaaaaaaaaaaaaaaaaa

SEQ ID NO: 130732 - DNA, 965 bp, Homo sapiens
gtttaaaaaaattccaaaatcatatctttgtctgcttctgaagcttgctctgttgacgcaaattgtatttttttctttttttggattttagtatgccttgcaattttttccctttattctcatgcatgaagcacccactaaaagtgactgttgttagtatagcttcagtaatgcggtgatgaggtgacagggcaggtgatgctctcttagtctctttaggctactataacaaaatactttagactgagtaattcataaacaacagagattattgctcacagatctggaggctggaaagtccaagactaaagggtcaggatatttggtgtttggtgaaggtcaaacattcagacacttgcaacgactatagcgacagcagcagtcttcaggaatcctatgtgagggacaaacactcagaagccagctggagtgttctagaatcctatgtgagggacaaacattcagaccccagcagtagtgttgtggaatcctatgtgagggacaaactttcaaacccttgtagcagtgttctggaatcctatgtgagggacaaaaattcagaaccttgtagcagtgttctggaatcctatggatattcagacaccagccacagtgttctggaatcctatgtgacagacaaactttcagaccacagcatgaacattctggaatcctatgtgatggacaaacgttcagaccatagcagtagtgttctgcaatccaatgtgagggacaaacatttagagcccagccgcagtgttctggaatcctatgtgacagacaaacattcagaccacagcaggagagttctggaatcctatgtgcggtacaaactttcagaccacagcaggagagttctggaatcctatgtaagggacaaacattcagaccccaggagcagtgttctaaaatcctatgttaagtgcaagcattcacatccccgcgtgaatgttctcgaatcctag

SEQ ID NO: 130733 - DNA, 410 bp, Homo sapiens
  misc_feature (1)...(410): n = a,t,c or g
cctgtaatgtttctgtggataaggaacagaagctatccaaacgtgaaaaggaaaatggttgcgtccttgagactttgtgctgcgcggggtgctcactcaatcttggctacgtgtacagatgcacgcccaagaagagagacttgttttgcctcagtgttgaagccattgaaagttatgttttagggtcctctgaaaagcaaattgtgtcagaagataaagagctttttaatcttgaaagcagagttgaaatagaaaagtctctaacacagatggaagatgtcttgaaagcattacaaatgaagctgtgggaggcgaatccaaattgtcctttgccncttgtanaagctgactctagntgtgtctccatctgccccgccttnctcccttattgttaatgaancacatatgag

SEQ ID NO: 130734 - DNA, 639 bp, Homo sapiens
ttttttttttttttttttatagagacgacgtctcactatgttgcttcatttaccaaataagggaagaaaggccgggggcagaatggaggacacagactagagttcagcttttacaagtggcaaaggacaatttggattcgggcctcccacagcttcatttgtaatgctttcaagacatcttccattctttcaacggcttcaacactgaggcaaaacaagtctctcttgtaatcaagattcttgggcgtgcatctgtacacgtagccaagattgagtgagcaccccgcgcagcacaaagtctcaaggacgcaaccattttccttttcacgtttggatagcttctgttccttatccacagaaacattacaggaaacacagcgaagcaggatgcagttggtgtcctcctggctggccacccagctcagcgagtcgcccagcggccgccggcagccggagcacaggaacaccagcggcctctcctccgcagccgccgcctcctcctccagctgcgccctctccatgtcggccaccgacgcgtcttcgctcatggagctccacatgctcgcccacttctgcaacagctggtggcggctcgagtcttcggagagtctcttgcccaacagcgaggagtcgctgcat

SEQ ID NO: 130735 - DNA, 418 bp, Homo sapiens
  misc_feature (1)...(418): n = a,t,c or g
cttgtggtataaatagccttgttgttggatgttaacattttctcattgccagataggtgagatggtgatgattgtataaaagagatgtagattataggttgagaactactgttgatagaattatgctttatttttaaaaaatttatgcctctaaatagttttgttaaacactgaatatctaccttgtaatgtatgacatatccaaaattgcattaagtgtatatcttaattatatttaaccatgtataatttttaattatatgtgtgnnnnnnnnnnnnnnnnnnnnnnnaaattcaatagatggaagatgtcttgaaagcattacaaatgaagctgtgggaggccgaatccaaattgtcctttgccacttgtaaaagctgaactctagtctgtgtcctccattctgcccccgccctt

SEQ ID NO: 130736 - DNA, 1591 bp, Homo sapiens
  misc_feature (1)...(1591): n = a,t,c or g
gcgtcgacttttttttttttttttttttttttttggtttaatctttattctcttcaattaagaaaaatacatactacaaaagatttcacatatagaaaacagacaaaaacaaaaattcccccagaaacccaccatcagagatggttactacctcattagtaagtattcctccaggttttttaagcatatagtagtacataagcaggaaaaagtaaaatcctactatatataagcaactgctcttgagcaagttttcaaatggttctgacagatcattctgaccaattttttccagggaactttatggattagtattcagagaagattccatgacactgtgggtagacaaacctctaagaatttttctaatcatttataataaatgttgcccccaaggtgttaaaatgcccaaggtttttaaaaatagtaaataaatgtgatacagaggaaaaaaagttcagaaaattatcccagtttcttatcaaaatcaaaactcctaagtcccaattccaacaagtaccataaaacggtctttaaaatgcgattttgagaaacaatcacctccttatcataaaatatagctatagaagtattcccacaatttggggttttttttttgagagaaggtctcactctgttgcccagactagaacgcagtagtggcatgaccaaggctcactgaagcctcaacctcccaagctcatctgatcctcccacctcagcgtttcgcatgcctggctaatttttttttttctttttttttttgtagagacgacgtctcactatgttgcttccatttaacaaataagctaaggaagggcggggnccagaatggaggacacagactagagttcagcttttaccaagtggccaaaggacaaatttggattcggcctcccacagcttcaagttttgtaatgctttcaagacatcttccattctgtgttagagacttttttctatttcaactctgctttcaagattaaaaagctctttatcttctgacacaatttgcttttcagagggaccctaaaacataactttcaatggcttcaacactgaggcaaaacaagtctctcttgtaatcaagattctttgggcgtgcatctcgtacacgtagccaagattgagtgagcaccccggcgcagcacaaagtctcaaggacgcaaccattttccttttcacgtttggatagcttctgttccttatccacagaaacattacaggaaacacagcgaagcaggatgcagttggtgtcctcctggctggccacccagttcagcgagtcgcccagcggccgccggcagccggagcacaggaacaccagcggcctctcctccgcagccgccgcctcctcctccagctgcgccctctccatgtcggccaccgacgcgtcttcgctcatggagctccacatgctcgcccacttctgcaacagctggtggcggctcgagtcttcggagagtctcttgcccaacagcgaggagtcgctgcatttgcccttgtcgccgcactcacagccgccagcgcatcctctgctacacctcagtgaccgaacgcctgccattacctacaaatcgcccgcgcccca

SEQ ID NO: 130737 - DNA, 465 bp, Homo sapiens
cggcagctaaggaaattgaagttggtggtggtcggaaagctatcataatctttccagaaaatccaagtccggctagtacgcgaattggagaaaaagttcagtgggaagcatgtcgtctttatcgctcagaggagaattctgcctaagccaactcgaaaaagccgtacaaaaaataagcaaaagcgtcccaggagccgtactctgacagctgtgcacgatgccatccttgaggacttggtcttcccaagcgaaattgtgggcaagagaatccgcgtcaaactagatggcagccggctcataaaggttcatttggacaaagcacagcagaacaatgtggaacacaaggttgaaactttttctggtgtctataagaagctcacgggcaaggatgttaattttgaattcccagagtttcaattgtaaacaaaaatgactaaataaaaagtatatattcacagtaaaaaa

SEQ ID NO: 130738 - DNA, 882 bp, Homo sapiens
atgcccatggatggaccactgagcatggccccgggcagcaaggtagctcccagacagagctatccatatcctcaggaaagagctttggatcttcttaagaacttgcttatcagcacagtgccccatgcaattagaaatgatgatggcacagacgaccatcataactgtccagaacagaaagctggaaactataggtacagtaggcagaaattcttgtgtttagtcatccttactacatgggctgagtcagcaagctctgctttaaccacagctgctttcaaatggccaccccagacctttgacacaatccgatcttcagtcttcagggagaacttcactgatctgggaattcacctgcaaactggagggttatcaggaaaatctgtgaatgcagatgaaggagtttggaaaattgctgatacatttcggtcagactgtccccagctttgtcctgacctcctgcaaaggcaacccagcgctcacatggagtccctcatgagctatgctggagataggggaaagcagccgctgcacccagggccagcactcagcaaggagaaggccacgttcagtttgaacactaggatcacgaagcccaacggcaagaagccagacaagttcaagttcggcatctcccaggctcttctggagccaaagatgaacgtggacctcaaggctcagctcagggagctgaatatcacagcagccaaggaaactgaagttggtggtagtcagaaagctatcataatctttgttcctgtttctcgactgaaatcttcccagaaaatccaagtctggctagtatgtgaattggagaaaaagttcagtgagaagcatgttgtctttattgctcagaggagaattctgcctaagccaacttga

SEQ ID NO: 130739 - DNA, 781 bp, Homo sapiens
gcacgaggagaaagccatgttcagttcgagcgccaagatcgtgaagcccaatggcgagaagcccggacgagttcgagtccgggcatctcccagggctctttctggagctggaagatgaactcggaccctcaaggcttcagctcagggaacctgaattattacggccagctaaaggaaattgaaagttggtggttgttcggaaagcctattccattaatcttttgttccccgttccctcaaactgaaaacctttccccagaaaaatcccaaagtccgggcctagttacgccgaattgggaagaaaaaagttccagtggggaaagccatgtccgtcctttatccgccctcagagggagaattcctgcccctaagcccaacctcggaaaaagcccgtaccaaaaaataagccaaaagccgtcccccaggagcccgtactcttgacaagcttgtgcaccgatgcccatcccttgagggactttggtcctttcccaagcggaaatttttgggcaaagagaatcccgcggtcaaacctagatgggcagcccggctcgataaaggttccattttggaccaaagcacagcagaaccaatgttggaacacaagggttgaaacctttttcctggtgtcctataaggaagctcacggggcaaggatgttaatttttggaattccccagagttttcaattgttaaacaaaaattgacttaaataaaaaagtatatattcacagtaaaaaaaaaaaaaaaaaaagtcgacgcggccgcgaatttagtagtagta

SEQ ID NO: 130740 - DNA, 452 bp, Homo sapiens
actctgctggtgatacccaggaaaatgcggtctgcagtggaactccagcaaacttcaacagacctgcagctgagggacctgactgttagaaagaaaactaacaaacggaaagcaacagcatcaacttcacaaaaaggtcatctacaccaaaaccccatctgtaggtcaccaacatcaaagaccaaagaagtaggcttcagaaggtcggtaataacaaacttctctgagctaaaggaggatgttcgaacctatcacaaggaagctaaaaaccttgaaaacagattagatgaatggctaactagaataaacagtgtagagaagaccttaaatgacctgaaggagctgaaaaccatggcacgagatcttcatgatgcatgcacaagcttcaatagacgatttgatcaagtggaagaaagggtaacagtgactgaagatcaaattaatgaaataaa

SEQ ID NO: 130741 - DNA, 621 bp, Homo sapiens; identical to SEQ ID NO: 121590

SEQ ID NO: 130742 - DNA, 455 bp, Homo sapiens
tttaaacatttgtgatttgattttatctcagcttggaatgtggttggagtgtcccacttctaacaactgtttgctaagttaaggctttggtgtttacacagtgttgaatgaagcagcctggtcaccagatgtgatcgcttccccagactgtcgttttttttcaatcagatcactgtcctcatggtcccggttccaaccttcttcctcagtacatccaccagcctttccaacttttgaactttttcattggccacttgggaggcctctctggcatgttgaagttgtaattccatatttgctcgctctgtcagagcttgttgcagttgagtagccagttcctcattttgttgttgagtgatggaaacaatgttctctctgttttttaaagcttcttcatatgtactaagggtatagttaaactgatccttcagattttcttcttgagataaagattt

SEQ ID NO: 130743 - DNA, 465 bp, Homo sapiens
attaaatatagcagcccaatgaaaagcacctttgtggaccctgtggatcccgtggcagtggcggtcatctactgtcttgcagcaggattggtaatcattcgcattcctttcttccagttagtacccctaaaggaggaaaaaatggttttgcttaacatggactattatgaaatggcatctctctctctggtgactcacaggaatgaggcgcccttctctggaagggtacgcagctccttgccagcaacggaacaaagctggatggagaatgactttgacaagttgacagaagtaggctttagaaggtcagtaataacaaacttctctgagctaaaggagcatgttctaacccatcacaaggaagctaaaaaccttgaaaaaaggttagacaaatggcaaactagaataaacagtgtagagaagaccttaaatgacctgatggagctgaaaaccatggcgtgagaa

SEQ ID NO: 130744 - DNA, 411 bp, Homo sapiens
gctggcgctgtctggggaaatgaccttagtcctcttcatgctccttgctgggggctgggttactcatgacaaacctgagcccatgccgagggcagccacaagcgggggcaccagaaaaggtaaaacaaaagctgccctcaaggatctgatagccacgtggaaggaggtgtgtgtctcctcgccagcaacagaacaaagctggatggagaatgactttgatgagttgacagaagtaggcttcagaaggtcggtaataacaaacttcttcaagctaaaggagtatgttctaacccatcacaaggaagctaaaaaccttgaaaaaatgttagacgaatggctaactagaatcaacagtgtagagaagaccttaaatgacctgatggagctgaaaaacatggcatgagaacttcg

SEQ ID NO: 130745 - DNA, 676 bp, Homo sapiens
atggacatctacaccaaagccccatctgtaggtcaccagtatcaaagacaaaaggtagataaaaccacaaaggtgggaagaaaccagaacagaaaagtggaaaattctaaaacccagagtgccacttctcctctaaaggatcacagctcctcaccagcaatggaacaaagctggacagagaatgactttgacgagttgacagaagtaggcttcagaaggtcggtaataacaaacttctctgagctaaaggagcatgttctaacccatcgcaaggaagctaaaaaccttgagaaaaggttagacgaatggctaactagaataaacagtgtagagaagaacttaaatgacctgatggagctgaaaaccatggcacgagaactttgtgacacatgcacaagcttcaatagccgatgcaatcaagtggaagaaaaggtatcagtgattgaacatcaaattaatgaaataaagcaagaagataaagttagagaaaaaagagtaaaaagaaatgaacaaagcctccaagaaatatgggactgtgtgaaaagaccaaatctatgtttgattggtgtacctgaaagtgatggggagaatggaaccaagttggaaaacactcttcaggatattatccaggagaacttccccaacctagcaaggcaggccaacattcaaattcagg

SEQ ID NO: 130746 - DNA, 1968 bp, Homo sapiens
atggtggaaggcaaggaggagcaagtcacatcttacatggatggcagcaggcaaagagagagcttgtgcagggaacctcccccttataaaaccgtcagatctcatgagacttattcactatcacgagaacagccccatgattcaattacctttcactgggtccctccacagcacgtgggaattcaagatgagatttgcgtggggacacagccaaaccatatcatgggttcagggttaggtgtgtctgagctcagactctccttgggtgaggcttaccgaggctgctctggggaatggggtgtggttctcaggccaatggagttatgttcccaggtggattatgggagcctctgctgcatcatgcaggtcaccagggaattttttggctgtctccagaggcctgtagcagcaatccactctcttcaaagggtctgtggactctctctgcttccctggtatattcctgcagtagttcttggagcaaaagtttatgatgtgagtctccacacactactctgttcatccaagtgggagctacagcaggaaaagcaggtgtattggaagctgtgcagaggagctcagttggtacctgacatccctttggccttcacaggctggcggcctctcagtggagatcagaggttggagtatgagagctcagaagatccagggatcctatctcccaagcagctgctgtatgcaggtgtttctcttgtcactcccccactaaaagctttcagtggccccgcactacctccccattccccagggagtgtgcagccaaactggactcatcctgcaagcttgtctccgctggctctaggaaccaagggtgcctatggggactcctgttggaggcagtctgcaaaggaagagcagcttcctagacagtggaaggacagggccattgaagtgagggctccagagggaagagcagcttggtcaccttcgcctcctgatggaagtctcccttcaacactggggattttattaggggaagaccatctgggaccagagggcagtgaagcccacgtggttggaacttcaaggcccagcttcagagttgcagtgacagcaactcatgctgtcaacgggcaaccacaaccaaccctgaggaggtgcaatggaggaaccactaaggaggcagagacccgcaaagcctatgatattgactatttaggcctttgcagaaaaaaattgctgcttctggattcagaacaaccctcatcatgtccccacagaggagtgggagaagtgggtctgaagttctggggaacttcggccaatgggcatcagggcagtcggccaggacagagcactggccagtgccctaggctcccagcccagcagctggacacggtccacactgtcttggcgccaggtgtgaaactgccagcccaggcagctgtgcaggctgtgaatcacagctccttgccagtgatggaacaaagctggacgaagaatgacttcgatgagttgacagaagtaggcttcagaaggtcggtaataacaaacttctccgagctaaaggagcatgttctaacccattacaaggaagataaaaaccttgaaaaaaggttagatgaatggctaactagaataaacagtgtagagaagatcttaaatgacctgacagagctgaaaaccatggcaggagaacttcatgatgcatgcacaagcttcaataggcgatgcaatcaagtgcaagaaaggatatcagtgattgaagatcaaattaatgaaataaaactgtatatgtatctttcggttgtggctaaaactgagcaagaagtttatttcattagttacagcttctgcatggaggaatgggttggaaaggctggtggatgtactgaggaagaaggttggaaccgggaccatgaggacagtgatctgattgaaaaaaaacgacagtctggggaagcgatcacatctggtgaccaggctgcttcattcaacactgtgtaa

SEQ ID NO: 130747 - DNA, 3075 bp, Homo sapiens
atggtaaagggatcaattcaacaagaagagctaactatcctaaatatatatgcacctaatacaggagcacctagattcacaaagcaagtcgtgagtgacctaaaaagagacttagactcccacacattaataatgggagactttaacaccccactgtcaacattagacagatcaacgagacagaaagtcaacaaggatacccaggaattgaactcagctctgcaccaagtggacctaatagacatctacagaactctccactccaaatcaacagaatatacatttttttcagcaccacaccacacctattccaaaactgaccacaaacttggaagtaaagctctcctcagcaaatgtaaaagaacagaaattataacaaactgtctctcagaccacagtgcaatcaaactagaactcaggattaagaatctcactcaaaaccggtcaactacatggaaactgaacaacctgctcctggatgacttctgggtacataacgaaatgaagacagaaataaagatgttctttgaaaccaacaagaacaaagacacaatataccagaatctctgggacacattcaaagcagtgtgtagatggaaatttatagcactaaatgcccacaagagaaagcaggaaagatctaaaattgacaccctaacatcaaaattaaaagaactagagaagcaagaacaaacacattcaaaagctagcagaaggcaagaaataactaagatcagagcaaaactgaaggaaatagagacacaaaaaacccttcaaaaaattaatgaatccaggaggtggttttttgaaaggatcagcaaaattgatagaccgctagcaagactaataaagaaaaaaagagagaagaatcaaatagacgcaataaaaaatgataaaggggatatcaccaccgatcccacagaaatacaaactaccatcagagaatactacaaacacctctacgcaaataaactagaaaatctagaagaaatggataaattcctggacacatacaccctcccaagactaaaccaggaagaagttgaatccctgaatagaccaataaaaaaaaatgagggaatcctccctaactcattttatgaggccagcatcatcctgataccaaagcctggcagagacacaaccaaaaaagagaattttagaccaatatccttgatgaacattgatgcaaaaatcctcaataaaatactggcaaaccgaatccagcagcatatcaaaaagcttatccaccatgatcaagtgggcttcatccctgggatgcaaggctggtttaatatacgcaaatcaataaatgtaatccagtatataaacagaaccaaagacaaaaaccacatgattatctcaatagatgcagaaaaggcctttgacaaaattcaacaacgcttcatgctaaaaactctcaataaattaggtattgatgggacgtatttcaaaataataagagctatctatgacaaacccacagccaacattatactgaatgggcaaaaactggaagcattccctttgaaaaccagcacaagacagggatgccctctctcaccactcctattcaacagagtgttggaagttctggccagggcgatcaggcaggagaaggaaataaagggtattcaattaggaaaagaggaagtcaaattgtccctgtttgcagacgacatgattgtatatctagaaaaccccattgtctcagcccaaaatctccttaagctgataagcaacttcagcaaagtctcaggatacaaaatcaatgtacaaaaatcacaagcattcttatacaccaacaacagacaaacagagagccaaatcatgagtgaactcccattcacaattgcttcaaagagaataaaatacctaggaatccaacttacaagggatgtgaaggacctcttcaaggagaactacaaaccagtgctcaaggaaataaaagaggatacaaacaaatggaagaacattccatgctcatgggtaggaagaatcaatatcgtgaaaatggccacactgcccaaggtaatttacggattcaatgccatccccatcaagctatcaatgactttcttcacagaattggaaaaaactactttaaagttcatatggaaccaaaaaagagccagcatcgccaagtcaatcctaagccaaaagaacaaagctgggggcatcacgctacctgacttcaaactatactacaaggctacagtagccaaaacagcatggtactggtaccaacacagagatacagatcaatggaacagaacagaggcctcacaaataacgccacatatctacaactatctgatctttgacaaacctaagaaaaacaagcaatggggaaaggattccctatttaataaatggtgctgggaaaactggctagccatatgtagaaagctgaaactggatcccttccttacaccttacacaaaaatcaattcaaaatggattaaagacttaaacgttagacctaaaaccataaaaaccctagaagaaaacctagacattaccattcaggacataggcatgggcaaggacttcatgtctaaaacaccaaaagcaatggcaacaaaagccaaaattgacaaatgggaactaattaaactaaagagcttctgcacagcaaaagaaactaccatcagagtgaacaggcaacctacaaaatgggagaaaattttcgcaacctgctcatctgacaaagggctaatatccagaatctacaatgaactcaaacaaatttacaagaaaaaaacaaacaaccccatcaaaaagtgggtgaaggacatgaacagacacttctcaaaagaagacatttatgcagccaaaaaacacatgaaaaaatgctcaccatcactggccatcagagaaatgcaaatcaaaaccacaatgagataccatctcacaccagttagaatggcaatcattaaaaagtcaggaaacaacaggaagctgctgaaggatgtgctctacccaaaccggcgagtaaaccaggaaagagacagatatgagatccaggaaacaggatccaacataggagagaagcaaaggaaattcccaggatga

SEQ ID NO: 130748 - DNA, 894 bp, Homo sapiens
ttattgatttgcgtatgttgaaccagccttgcaacacagggatgaagcccacttgatcatggtggataagctgttgatgtgctgctggattcggtttgccagtattttattgaggatttttgcatcgatgttcattagggatattggtctaaaattctctttttttgttgtgtctctgccaggctttggtatcaggatgatgttggcctcataaaatgagttagggaggattccctctttttctattgattggaaaagtttcagaaggaatggtactagctcctccttgtacctctggtagaattcagctgtgaatccatctgatcctggacattttttggttgggaagctattaattattgcctcaatttcagaacctgttactggtctattcagagattcaacttcttcctggtttagtcttgggagggtgtatgtgtccaggaatttatccatttcttctagattttctagtttatttgcgtagaggtgtttatagcattctctgacggtagtttgtatttctgtgggattggtggtgatatcccctttatcattttttattgcgtctatttgattcttctctcttttcttctttattagtcttgctagcggtctatcaattttgttgatcttttcaaaaaaccagctcctggattcactgattttttgaagggttttttgtttttctatttccttcagttctgctctgatcttagttatttcttgtcttctgctagcttttgaatgtgtttgctcttgcttctctagttcttctgcatctaaaggtaagtctgctaaaatgctcaagtccaagtcatgtgcctctttattgatggtaggaactggaagatgcaactgcttgttctttcctttgaggagatgccccagcat

SEQ ID NO: 130749 - DNA, 954 bp, Homo sapiens
atggcagtgcctggagaggctctgcttttccatgatcctttgaggcagacaggggctatcttggaggaagcagaaaatgcggagtcggagacagaaggggatgacaatgaagcgcggtggaatttggctgtgaatccatctggtcctggactctttttggttggtaaggacacattcaaagcagtgtgtagagggaaatttatagcactaaatgcccacaagagaaagcaggaaagatccaaaattgacaccctaacatcacaattaaaagaacaagaaaagcaagagcaaacacattcaaaagctagcagaaggcaagaaataactaaaatcggagcagaactaaaggaaatagagacacaaaaaacccttcaaaaaattaatgaatccaggagctggtgttttggaaagatcaacaaaattgatagaccgctagcaagactaataaagaagaaaagagagaagaatcaaatagacgcaataaaaaatgataaaggggatatcaccaccgatcccacagaaatacaaactaccatcagagaatactacaaacacctctacgcaaataaactagaaaatctagaagaaatggataaattcctggacacacacaccctcccaagactaaaccaggaagaagttgaatctctgaatagaccaataacaggctctgaaattgtggcaattgtttggttttttaaaaaatatatagtggttggccggaaaaagtacactcgccggcagttttgccacgagagtacactgaacaaaggagacaaagtcatttataacctgacgcatccaccctactgctgtgtccggttttcactggctggaatgggacctcacattctgtatttgtcccaattggctagaaacttagaacttttaaaaagaggcaaaggtagaggagaaaaaaggaaggaggaagtaacttgtggaatgctgagaaag
